United States Patent Application Publication US 2014/0199313 A1 - sequence listing, part 6

SEQ ID NO: 15902 - protein, 190 aa, Rhizobium leguminosarum bv
MTRSQKEKMLAGEMYNAADPEIQAELLLTGAWLKRYNDTLGDSAERWNGLLLERLGAVGLGAVIRPPFHCDYGFNIRIGAWVYINYNCVILDVAAVTIGDGTAIGPAVQIYTADHPHDPEQRQAGLQLGRPVSIGRHAWIGGGAIILPGVTIGDHAVIGAGSVVTRDVPAGSTAMGNPARVKAGGRLPKS

SEQ ID NO: 15903 - DNA, 552 bp, Rhizobium meliloti
  CDS (1)..(552): transl_table=11
atgacacgcactcaaaaagagaagatgctcgcaggcgagatgtacaacgcagcggatccagaaatccaagccgacttgctggccgctggggcttggctgaagcgctacaatagtactttgggcgactccgccgagcagtggcatttgttcctccgcgaagggctaggcgaggttgggcctggagcggttatccgtccgccctttcactgcgattacggcttcaacatcagtatcggagcccacgcctatatgaacttcaactgcgtcatcctcgacgtggcaaaggtgacgatcggcgatgggaccgcaattgggcccgctgtgcagatctataccgccgatcatccggatgaccccgagcagcggcaggcggggctgcagctcgggcgacctgtccgcattggcaagcacgtgtggattggcggtggcgcgatcatcctcccgggcgtgaccattggcgatcatgcggtcgttggcgcgggcagcgtagtcacgcgcgacgtccctccgggcgcaaaagtaatgggaagcccagctcgggtaaggggctga

SEQ ID NO: 15904 - protein, 183 aa, Rhizobium meliloti
MTRTQKEKMLAGEMYNAADPEIQADLLAAGAWLKRYNSTLGDSAEQWHLFLREGLGEVGPGAVIRPPFHCDYGFNISIGAHAYMNFNCVILDVAKVTIGDGTAIGPAVQIYTADHPDDPEQRQAGLQLGRPVRIGKHVWIGGGAIILPGVTIGDHAVVGAGSVVTRDVPPGAKVMGSPARVRG

SEQ ID NO: 15905 - DNA, 624 bp, Lactococcus lactis subsp
  CDS (1)..(624): transl_table=11
atgcctaaattagaaagctacaaacgagttcatacagaagaactctactttcctaacgatcaaaaattatggaaagagcaacaagaagctttagttttactggaaaagtttaatcaaacttcagtgactcagccagagcaacaaatggaacttctaaaaaaaatgttttcagaaattggggaaaattgttttattcaaccccctttttatgctaattttggcggaaaaaatgttcattttgggacagggatttatgctaattttaatctaacattggttgacgatacagatatttttgtaggaaatcatgtcatgtttggaccaaatgttacgattgacacggcgacacatcctgtctcgcctgacttacgtaaacgaggggctcaatataataaaaaagtttacattgaagaaaacgtttggctaggtgctggtgtaattgttttacctggtgttagaattggaaaaaatagtgtgattggcgcagggagtcttgtaactaaagacattccagataatgtggttgcttttggaactccttgtatggttaaaagaaaaatcaatgattctgactttaaaacttatgatcatggaaaaaagattgatttagatgagttcatctga

SEQ ID NO: 15906 - protein, 207 aa, Lactococcus lactis subsp
MPKLESYKRVHTEELYFPNDQKLWKEQQEALVLLEKFNQTSVTQPEQQMELLKKMFSEIGENCFIQPPFYANFGGKNVHFGTGIYANFNLTLVDDTDIFVGNHVMFGPNVTIDTATHPVSPDLRKRGAQYNKKVYIEENVWLGAGVIVLPGVRIGKNSVIGAGSLVTKDIPDNVVAFGTPCMVKRKINDSDFKTYDHGKKIDLDEFI

SEQ ID NO: 15907 - DNA, 645 bp, Methanococcus jannaschii
  CDS (1)..(645): transl_table=11
ttgagcatgattaaattgttaaaaaacactttaaaagatccaaaaaaaattatgagggctttggaatttgccccttcttttgtttttgggaagatatatttgtctatttttggtataaatcctttgaaggttcataattttggaaaaatccatattagaaaatatgacagctctactataataatcaaaagtgggattcttttaagggatgtagaaatagcagcaagaggcaatggaaaaatcattattggagagaactttcactgtgaaccgtatgttagattaaacgtttttgaagaggggattttagagattggagataattgtggaattggttcattttcaataataaatgctactaaaaaaataacaattggtagtaatgttttaatttcaagtcatgttcatattattgatggagaccatggatttaaaaaaggagaattaataaggaatcagaaaatggtctcagagcctattgaaattggagatgatgtttggattggaacaggagttaaaatattaaaaggggttaaaattggggaaggggctgttattggagctggaagtgttgttacaagagatattcccccatattcagtagctgttggagttcctgcaagagttataaagaagagggaataa

SEQ ID NO: 15908 - protein, 214 aa, Methanococcus jannaschii
MSMIKLLKNTLKDPKKIMRALEFAPSFVFGKIYLSIFGINPLKVHNFGKIHIRKYDSSTIIIKSGILLRDVEIAARGNGKIIIGENFHCEPYVRLNVFEEGILEIGDNCGIGSFSIINATKKITIGSNVLISSHVHIIDGDHGFKKGELIRNQKMVSEPIEIGDDVWIGTGVKILKGVKIGEGAVIGAGSVVTRDIPPYSVAVGVPARVIKKRE

SEQ ID NO: 15909 - DNA, 624 bp, Schizosaccharomyces pombe
  CDS (1)..(624)
atgactcgtactcgtgtacaaaaaatgataccgaaaaccattgaataccaaaaaatgatatctggtcaaccgtacaaggcttacgacgaggagttgactcaagcgagatgtaatgctaaaaaattaatgcgaaggtttaatgacactatgggagatttggaaaatgtaggcccagcagaattgattaaaagacgagctgaactgttggctgaagtttttgtatttgacgaatcttcagcaccagagattgagccacctatggcttttgattacggatttaacgttcattttggaaaaaaattctttgcaaattataattgtacatttctagatgttgccataattactattggtaataatgtaatgctaggccccaatgttcaactatgtacagcaacacatcccttggattttaaagcaaggaactccggaattgaatttggtttaccaattaacattcaggacaatgtttggattggtatgggagttatagttctcccaggtgttactatcggggaaggcagtgtaattggagcgggtgctgttgttacaaaagacatcccacctaatacgttggctgtaggatcacctgccaaacctattcgtaaaattgaaaacgagtga

SEQ ID NO: 15910 - protein, 207 aa, Schizosaccharomyces pombe
MTRTRVQKMIPKTIEYQKMISGQPYKAYDEELTQARCNAKKLMRRFNDTMGDLENVGPAELIKRRAELLAEVFVFDESSAPEIEPPMAFDYGFNVHFGKKFFANYNCTFLDVAIITIGNNVMLGPNVQLCTATHPLDFKARNSGIEFGLPINIQDNVWIGMGVIVLPGVTIGEGSVIGAGAVVTKDIPPNTLAVGSPAKPIRKIENE

SEQ ID NO: 15911 - DNA, 591 bp, Saccharomyces cerevisiae
  CDS (1)..(591)
atgggcgtattagaaaatatagtacctggtgagctttatgatgcgaactatgatccagatcttttgaaaattagaaaagagactaaaataaaattgcacgaatacaacacccttagccccgctgatgagaataaaaagagccaggtaataagagaattacttggtagttgcactgataactttataattgaaccgccgttttactgtgattacggaagtaacatctatatcggagacaacttttacgccaatcacaatcttgttatattggatggggccaaggtagtcatcggtgacaacgtatttatcgcccctaatgttggtatttatacggcaggtcatccaattgacgtggaaagacggcttcaaggattagaatatgccatgcctgtgaccattggagacaatgtatggattggaggtggagtgtcaataattcctggagtaaatataggtaaaaactccgtgattgccgccggtagtgttgtgattcgtgacataccagaaaatgtagtggcagcaggtaatccttgtaaggtgataagaaagatcactgaaaaagatagtacaactacaaactatcgaaaatga

SEQ ID NO: 15912 - protein, 196 aa, Saccharomyces cerevisiae
MGVLENIVPGELYDANYDPDLLKIRKETKIKLHEYNTLSPADENKKSQVIRELLGSCTDNFIIEPPFYCDYGSNIYIGDNFYANHNLVILDGAKVVIGDNVFIAPNVGIYTAGHPIDVERRLQGLEYAMPVTIGDNVWIGGGVSIIPGVNIGKNSVIAAGSVVIRDIPENVVAAGNPCKVIRKITEKDSTTTNYRK

SEQ ID NO: 15913 - DNA, 25 bp, Artificial sequence
  Primer sequence
atgaacatgccaatgaccgaaagaa

SEQ ID NO: 15914 - DNA, 28 bp, Artificial sequence
  Primer sequence
ttaaactgacgattcaactttataatct

SEQ ID NO: 15915 - protein, 204 aa, Artificial sequence
  Consensus
  Variant (2)..(4): Xaa in position 2 to 4 is any amino acid
  Variant (5)..(9): Xaa in position 5 to 9 is any or no amino acid
  Variant (11)..(26): Xaa in position 11 to 26 is any or no amino acid
  Variant (28)..(28): Xaa in position 28 is any amino acid
  Variant (31)..(41): Xaa in position 31 to 41 is any amino acid
  Variant (42)..(92): Xaa in position 42 to 92 is any or no amino acid
  Variant (94)..(94): Xaa in position 94 is any or no amino acid
  Variant (97)..(97): Xaa in position 97 is any amino acid
  Variant (98)..(101): Xaa in position 98 to 101 is any or no amino acid
  Variant (103)..(106): Xaa in position 103 to 106 is any amino acid
  Variant (108)..(109): Xaa in position 108 to 109 is any amino acid
  Variant (110)..(112): Xaa in position 110 to 112 is any or no amino acid
  Variant (114)..(119): Xaa in position 114 to 119 is any amino acid
  Variant (120)..(152): Xaa in position 120 to 152 is any or no amino acid
  Variant (154)..(154): Xaa in position 154 is any amino acid
  Variant (156)..(159): Xaa in position 156 to 159 is any amino acid
  Variant (163)..(166): Xaa in position 163 to 166 is any or no amino acid
  Variant (168)..(169): Xaa in position 168 to 169 is any or no amino acid
  Variant (172)..(172): Xaa in position 172 is any or no amino acid
  Variant (175)..(177): Xaa in position 175 to 177 is any or no amino acid
  Variant (188)..(188): Xaa in position 188 is any amino acid
  Variant (191)..(193): Xaa in position 191 to 193 is any amino acid
  Variant (195)..(196): Xaa in position 195 to 196 is any amino acid
  Variant (198)..(198): Xaa in position 198 is any amino acid
  Variant (200)..(200): Xaa in position 200 is any amino acid
IXXXXXXXXGXXXXXXXXXXXXXXXXIXIGXXXXXXXXXXXXXXXXXXXXXXXXXXXXXXXXXXXXXXXXXXXXXXXXXXXXXXXXXXXXXXIXIGXXXXXGXXXXIXXXXXHXXXXXXXXXXXXXXXXXXXXXXXXXXXXXXXXXXXXXXXIXIXXXXWIGXXXXIXXGVXIGXXXVIGAGSVVTKXVPXXXVXXGXPXRVIR

SEQ ID NO: 15916 - protein, 12 aa, Artificial sequence
  Consensus
  Variant (2)..(2): Xaa in position 2 is any or no amino acid
  Variant (4)..(5): Xaa in position 4 to 5 is any amino acid
  Variant (6)..(6): Xaa in position 6 is Ala, Cys, Thr or Val
  Variant (7)..(7): Xaa in position 7 is any amino acid
  Variant (8)..(8): Xaa in position 8 is Phe, Ile, Leu, Met or Val
  Variant (9)..(11): Xaa in position 9 to 11 is any amino acid
  Variant (12)..(12): Xaa in position 12 is Ala, Cys, Asp, Gly, Asn, Ser, Thr or Val
IXGXXXXXXXXX

SEQ ID NO: 15917 - protein, 43 aa, Artificial sequence
  Consensus
  Variant (2)..(2): Xaa in position 2 is any amino acid
  Variant (3)..(4): Xaa in position 3 to 4 is any or no amino acid
  Variant (6)..(10): Xaa in position 6 to 10 is any amino acid
  Variant (11)..(12): Xaa in position 11 to 12 is any or no amino acid
  Variant (14)..(14): Xaa in position 14 is Ala, Ile or Val
  Variant (15)..(15): Xaa in position 15 is any amino acid
  Variant (16)..(16): Xaa in position 16 is Ile, Leu or Val
  Variant (17)..(17): Xaa in position 17 is Asp, Gly or Thr
  Variant (18)..(19): Xaa in position 18 to 19 is any amino acid
  Variant (20)..(20): Xaa in position 20 is Ala, Cys, Gly, Ser, Thr or Val
  Variant (21)..(21): Xaa in position 21 is any amino acid
  Variant (22)..(22): Xaa in position 22 is Ala, Ile, Leu or Val
  Variant (23)..(23): Xaa in position 23 is Ala, Gly or Ser
  Variant (24)..(25): Xaa in position 24 to 25 is any amino acid
  Variant (26)..(26): Xaa in position 26 is Ala, Cys, Ser or Thr
  Variant (27)..(27): Xaa in position 27 is any amino acid
  Variant (28)..(28): Xaa in position 28 is Ala, Ile or Val
  Variant (29)..(31): Xaa in position 29 to 31 is any amino acid
  Variant (32)..(32): Xaa in position 32 is Phe, Ile, Leu, Met or Val
  Variant (33)..(39): Xaa in position 33 to 39 is any amino acid
  Variant (41)..(41): Xaa in position 41 is any amino acid
  Variant (43)..(43): Xaa in position 43 is Ala, Cys or Gly
WXXXGXXXXXXXGXXXXXXXXXXXXXXXXXXXXXXXXXXGXPX

SEQ ID NO: 15918 - DNA, 1818 bp, Escherichia coli; identical to SEQ ID NO: 13510
  CDS (1)..(1818)

SEQ ID NO: 15919 - protein, 605 aa, Escherichia coli; identical to SEQ ID NO: 13511

SEQ ID NO: 15920 - DNA, 1665 bp, Mesorhizobium loti MAFF303099; identical to SEQ ID NO: 13512
  CDS (1)..(1665): transl_table=11

SEQ ID NO: 15921 - protein, 554 aa, Mesorhizobium loti MAFF303099; identical to SEQ ID NO: 13513

SEQ ID NO: 15922 - DNA, 1635 bp, Mesorhizobium loti MAFF303099; identical to SEQ ID NO: 13514
  CDS (1)..(1635): transl_table=11

SEQ ID NO: 15923 - protein, 544 aa, Mesorhizobium loti MAFF303099; identical to SEQ ID NO: 13515

SEQ ID NO: 15924 - DNA, 1851 bp, Thermoplasma volcanium GSS1; identical to SEQ ID NO: 13516
  CDS (1)..(1851): transl_table=11

SEQ ID NO: 15925 - protein, 616 aa, Thermoplasma volcanium GSS1; identical to SEQ ID NO: 13517

SEQ ID NO: 15926 - DNA, 1422 bp, Thermotoga maritima MSB8; identical to SEQ ID NO: 13518
  CDS (1)..(1422): transl_table=11

SEQ ID NO: 15927 - protein, 473 aa, Thermotoga maritima MSB8; identical to SEQ ID NO: 13519

SEQ ID NO: 15928 - DNA, 1671 bp, Thermotoga maritima MSB8; identical to SEQ ID NO: 13520
  CDS (1)..(1671): transl_table=11

SEQ ID NO: 15929 - protein, 556 aa, Thermotoga maritima MSB8; identical to SEQ ID NO: 13521

SEQ ID NO: 15930 - DNA, 1737 bp, Bacillus halodurans C-125; identical to SEQ ID NO: 13522
  CDS (1)..(1737): transl_table=11

SEQ ID NO: 15931 - protein, 578 aa, Bacillus halodurans C-125; identical to SEQ ID NO: 13523

SEQ ID NO: 15932 - DNA, 1704 bp, Streptococcus pyogenes M1 GAS; identical to SEQ ID NO: 13524
  CDS (1)..(1704): transl_table=11

SEQ ID NO: 15933 - protein, 567 aa, Streptococcus pyogenes M1 GAS; identical to SEQ ID NO: 13525

SEQ ID NO: 15934 - DNA, 1614 bp, Streptococcus pyogenes M1 GAS; identical to SEQ ID NO: 13526
  CDS (1)..(1614): transl_table=11

SEQ ID NO: 15935 - protein, 537 aa, Streptococcus pyogenes M1 GAS; identical to SEQ ID NO: 13527

SEQ ID NO: 15936 - DNA, 1974 bp, Deinococcus radiodurans R1; identical to SEQ ID NO: 13528
  CDS (1)..(1974): transl_table=11

SEQ ID NO: 15937 - protein, 657 aa, Deinococcus radiodurans R1; identical to SEQ ID NO: 13529

SEQ ID NO: 15938 - DNA, 1497 bp, Deinococcus radiodurans R1; identical to SEQ ID NO: 13530
  CDS (1)..(1497): transl_table=11

SEQ ID NO: 15939 - protein, 498 aa, Deinococcus radiodurans R1; identical to SEQ ID NO: 13531

SEQ ID NO: 15940 - DNA, 1695 bp, Deinococcus radiodurans R1; identical to SEQ ID NO: 13532
  CDS (1)..(1695): transl_table=11

SEQ ID NO: 15941 - protein, 564 aa, Deinococcus radiodurans R1; identical to SEQ ID NO: 13533

SEQ ID NO: 15942 - DNA, 1452 bp, Deinococcus radiodurans R1; identical to SEQ ID NO: 13534
  CDS (1)..(1452): transl_table=11

SEQ ID NO: 15943 - protein, 483 aa, Deinococcus radiodurans R1; identical to SEQ ID NO: 13535

SEQ ID NO: 15944 - DNA, 1659 bp, Deinococcus radiodurans R1; identical to SEQ ID NO: 13536
  CDS (1)..(1659): transl_table=11

SEQ ID NO: 15945 - protein, 552 aa, Deinococcus radiodurans R1; identical to SEQ ID NO: 13537

SEQ ID NO: 15946 - DNA, 1824 bp, Mycoplasma pulmonis UAB CTIP; identical to SEQ ID NO: 13538
  CDS (1)..(1824): transl_table=4

SEQ ID NO: 15947 - protein, 607 aa, Mycoplasma pulmonis UAB CTIP; identical to SEQ ID NO: 13539

SEQ ID NO: 15948 - DNA, 1806 bp, Mycobacterium tuberculosis CDC1551; identical to SEQ ID NO: 13540
  CDS (1)..(1806): transl_table=11

SEQ ID NO: 15949 - protein, 601 aa, Mycobacterium tuberculosis CDC1551; identical to SEQ ID NO: 13541

SEQ ID NO: 15950 - DNA, 1641 bp, Mycobacterium tuberculosis CDC1551; identical to SEQ ID NO: 13542
  CDS (1)..(1641): transl_table=11

SEQ ID NO: 15951 - protein, 546 aa, Mycobacterium tuberculosis CDC1551; identical to SEQ ID NO: 13543

SEQ ID NO: 15952 - DNA, 1356 bp, Clostridium acetobutylicum ATCC 824; identical to SEQ ID NO: 13544
  CDS (1)..(1356): transl_table=11

SEQ ID NO: 15953 - protein, 451 aa, Clostridium acetobutylicum ATCC 824; identical to SEQ ID NO: 13545

SEQ ID NO: 15954 - DNA, 1785 bp, Agrobacterium tumefaciens str. C58; identical to SEQ ID NO: 13546
  CDS (1)..(1785): transl_table=11

SEQ ID NO: 15955 - protein, 594 aa, Agrobacterium tumefaciens str. C58; identical to SEQ ID NO: 13547

SEQ ID NO: 15956 - DNA, 1608 bp, Streptococcus pneumoniae R6; identical to SEQ ID NO: 13548
  CDS (1)..(1608): transl_table=11

SEQ ID NO: 15957 - protein, 535 aa, Streptococcus pneumoniae R6; identical to SEQ ID NO: 13549

SEQ ID NO: 15958 - DNA, 1764 bp, Streptococcus pneumoniae R6; identical to SEQ ID NO: 13550
  CDS (1)..(1764): transl_table=11

SEQ ID NO: 15959 - protein, 587 aa, Streptococcus pneumoniae R6; identical to SEQ ID NO: 13551

SEQ ID NO: 15960 - DNA, 1851 bp, Thermoplasma acidophilum DSM 1728; identical to SEQ ID NO: 13552
  CDS (1)..(1851): transl_table=11

SEQ ID NO: 15961 - protein, 616 aa, Thermoplasma acidophilum DSM 1728; identical to SEQ ID NO: 13553

SEQ ID NO: 15962 - DNA, 1527 bp, Synechocystis sp. PCC 6803; identical to SEQ ID NO: 13554
  CDS (1)..(1527): transl_table=11

SEQ ID NO: 15963 - protein, 508 aa, Synechocystis sp. PCC 6803; identical to SEQ ID NO: 13555

SEQ ID NO: 15964 - DNA, 1818 bp, Salmonella typhimurium LT2; identical to SEQ ID NO: 13556
  CDS (1)..(1818): transl_table=11

SEQ ID NO: 15965 - protein, 605 aa, Salmonella typhimurium LT2; identical to SEQ ID NO: 13557

SEQ ID NO: 15966 - DNA, 1662 bp, Listeria monocytogenes EGD-e; identical to SEQ ID NO: 13558
  CDS (1)..(1662): transl_table=11

SEQ ID NO: 15967 - protein, 553 aa, Listeria monocytogenes EGD-e; identical to SEQ ID NO: 13559

SEQ ID NO: 15968 - DNA, 1776 bp, Listeria monocytogenes EGD-e; identical to SEQ ID NO: 13560
  CDS (1)..(1776): transl_table=11

SEQ ID NO: 15969 - protein, 591 aa, Listeria monocytogenes EGD-e; identical to SEQ ID NO: 13561

SEQ ID NO: 15970 - DNA, 1467 bp, Nostoc sp. PCC 7120; identical to SEQ ID NO: 13562
  CDS (1)..(1467): transl_table=11

SEQ ID NO: 15971 - protein, 488 aa, Nostoc sp. PCC 7120; identical to SEQ ID NO: 13563

SEQ ID NO: 15972 - DNA, 3483 bp, Ralstonia solanacearum GMI1000; identical to SEQ ID NO: 13564
  CDS (1)..(3483): transl_table=11

SEQ ID NO: 15973 - protein, 1160 aa, Ralstonia solanacearum GMI1000; identical to SEQ ID NO: 13565

SEQ ID NO: 15974 - DNA, 1821 bp, Clostridium perfringens str. 13; identical to SEQ ID NO: 13566
  CDS (1)..(1821): transl_table=11

SEQ ID NO: 15975 - protein, 606 aa, Clostridium perfringens str. 13; identical to SEQ ID NO: 13567

SEQ ID NO: 15976 - DNA, 1665 bp, Clostridium perfringens str. 13; identical to SEQ ID NO: 13568
  CDS (1)..(1665): transl_table=11

SEQ ID NO: 15977 - protein, 554 aa, Clostridium perfringens str. 13; identical to SEQ ID NO: 13569

SEQ ID NO: 15978 - DNA, 1833 bp, Clostridium perfringens str. 13; identical to SEQ ID NO: 13570
  CDS (1)..(1833): transl_table=11

SEQ ID NO: 15979 - protein, 610 aa, Clostridium perfringens str. 13; identical to SEQ ID NO: 13571

SEQ ID NO: 15980 - DNA, 1938 bp, Pyrococcus furiosus DSM 3638; identical to SEQ ID NO: 13572
  CDS (1)..(1938): transl_table=11

SEQ ID NO: 15981 - protein, 645 aa, Pyrococcus furiosus DSM 3638; identical to SEQ ID NO: 13573

SEQ ID NO: 15982 - DNA, 1614 bp, Streptococcus pyogenes MGAS8232; identical to SEQ ID NO: 13574
  CDS (1)..(1614): transl_table=11

SEQ ID NO: 15983 - protein, 537 aa, Streptococcus pyogenes MGAS8232; identical to SEQ ID NO: 13575

SEQ ID NO: 15984 - DNA, 1725 bp, Thermoanaerobacter tengcongensis MB4; identical to SEQ ID NO: 13576
  CDS (1)..(1725): transl_table=11

SEQ ID NO: 15985 - protein, 574 aa, Thermoanaerobacter tengcongensis MB4; identical to SEQ ID NO: 13577

SEQ ID NO: 15986 - DNA, 1575 bp, Thermoanaerobacter tengcongensis MB4; identical to SEQ ID NO: 13578
  CDS (1)..(1575): transl_table=11

SEQ ID NO: 15987 - protein, 524 aa, Thermoanaerobacter tengcongensis MB4; identical to SEQ ID NO: 13579

SEQ ID NO: 15988 - DNA, 1719 bp, Streptomyces coelicolor A3(2); identical to SEQ ID NO: 13580
  CDS (1)..(1719)

SEQ ID NO: 15989 - protein, 572 aa, Streptomyces coelicolor A3(2); identical to SEQ ID NO: 13581

SEQ ID NO: 15990 - DNA, 3351 bp, Xanthomonas campestris pv. campestris str. ATCC 33913; identical to SEQ ID NO: 13582
  CDS (1)..(3351): transl_table=11

SEQ ID NO: 15991 - protein, 1116 aa, Xanthomonas campestris pv. campestris str. ATCC 33913; identical to SEQ ID NO: 13583

SEQ ID NO: 15992 - DNA, 1617 bp, Xanthomonas campestris pv. campestris str. ATCC 33913; identical to SEQ ID NO: 13584
  CDS (1)..(1617): transl_table=11

SEQ ID NO: 15993 - protein, 538 aa, Xanthomonas campestris pv. campestris str. ATCC 33913; identical to SEQ ID NO: 13585

SEQ ID NO: 15994 - DNA, 1617 bp, Xanthomonas axonopodis pv. citri str. 306; identical to SEQ ID NO: 13586
  CDS (1)..(1617): transl_table=11

SEQ ID NO: 15995 - protein, 538 aa, Xanthomonas axonopodis pv. citri str. 306; identical to SEQ ID NO: 13587

SEQ ID NO: 15996 - DNA, 3327 bp, Chlorobium tepidum TLS; identical to SEQ ID NO: 13588
  CDS (1)..(3327): transl_table=11

SEQ ID NO: 15997 - protein, 1108 aa, Chlorobium tepidum TLS; identical to SEQ ID NO: 13589

SEQ ID NO: 15998 - DNA, 1668 bp, Yersinia pestis KIM; identical to SEQ ID NO: 13590
  CDS (1)..(1668): transl_table=11

SEQ ID NO: 15999 - protein, 555 aa, Yersinia pestis KIM; identical to SEQ ID NO: 13591

SEQ ID NO: 16000 - DNA, 1830 bp, Yersinia pestis KIM; identical to SEQ ID NO: 13592
  CDS (1)..(1830): transl_table=11

SEQ ID NO: 16001 - protein, 609 aa, Yersinia pestis KIM; identical to SEQ ID NO: 13593

SEQ ID NO: 16002 - DNA, 1608 bp, Streptococcus agalactiae 2603V/R; identical to SEQ ID NO: 13594
  CDS (1)..(1608): transl_table=11

SEQ ID NO: 16003 - protein, 535 aa, Streptococcus agalactiae 2603V/R; identical to SEQ ID NO: 13595

SEQ ID NO: 16004 - DNA, 1497 bp, Oceanobacillus iheyensis HTE831; identical to SEQ ID NO: 13596
  CDS (1)..(1497): transl_table=11

SEQ ID NO: 16005 - protein, 498 aa, Oceanobacillus iheyensis HTE831; identical to SEQ ID NO: 13597

SEQ ID NO: 16006 - DNA, 1752 bp, Oceanobacillus iheyensis HTE831; identical to SEQ ID NO: 13598
  CDS (1)..(1752): transl_table=11

SEQ ID NO: 16007 - protein, 583 aa, Oceanobacillus iheyensis HTE831; identical to SEQ ID NO: 13599

SEQ ID NO: 16008 - DNA, 1398 bp, Bifidobacterium longum NCC2705; identical to SEQ ID NO: 13600
  CDS (1)..(1398): transl_table=11

SEQ ID NO: 16009 - protein, 465 aa, Bifidobacterium longum NCC2705; identical to SEQ ID NO: 13601

SEQ ID NO: 16010 - DNA, 1818 bp, Shigella flexneri 2a str. 301; identical to SEQ ID NO: 13602
  CDS (1)..(1818): transl_table=11

SEQ ID NO: 16011 - protein, 605 aa, Shigella flexneri 2a str. 301; identical to SEQ ID NO: 13603

SEQ ID NO: 16012 - DNA, 1746 bp, Leptospira interrogans serovar Lai str. 56601; identical to SEQ ID NO: 13604
  CDS (1)..(1746): transl_table=11

SEQ ID NO: 16013 - protein, 581 aa, Leptospira interrogans serovar Lai str. 56601; identical to SEQ ID NO: 13605

SEQ ID NO: 16014 - DNA, 1839 bp, Corynebacterium efficiens YS-314; identical to SEQ ID NO: 13606
  CDS (1)..(1839): transl_table=11

SEQ ID NO: 16015 - protein, 612 aa, Corynebacterium efficiens YS-314; identical to SEQ ID NO: 13607

SEQ ID NO: 16016 - DNA, 1839 bp, Vibrio vulnificus CMCP6; identical to SEQ ID NO: 13608
  CDS (1)..(1839): transl_table=11

SEQ ID NO: 16017 - protein, 612 aa, Vibrio vulnificus CMCP6; identical to SEQ ID NO: 13609

SEQ ID NO: 16018 - DNA, 2064 bp, Vibrio vulnificus CMCP6; identical to SEQ ID NO: 13610
  CDS (1)..(2064): transl_table=11

SEQ ID NO: 16019 - protein, 687 aa, Vibrio vulnificus CMCP6; identical to SEQ ID NO: 13611

SEQ ID NO: 16020 - DNA, 1464 bp, Bradyrhizobium japonicum USDA 110; identical to SEQ ID NO: 13612
  CDS (1)..(1464)

SEQ ID NO: 16021 - protein, 487 aa, Bradyrhizobium japonicum USDA 110; identical to SEQ ID NO: 13613

SEQ ID NO: 16022 - DNA, 1698 bp, Bradyrhizobium japonicum USDA 110; identical to SEQ ID NO: 13614
  CDS (1)..(1698)

SEQ ID NO: 16023 - protein, 565 aa, Bradyrhizobium japonicum USDA 110; identical to SEQ ID NO: 13615

SEQ ID NO: 16024 - DNA, 1626 bp, Lactobacillus plantarum WCFS1; identical to SEQ ID NO: 13616
  CDS (1)..(1626): transl_table=11

SEQ ID NO: 16025 - protein, 541 aa, Lactobacillus plantarum WCFS1; identical to SEQ ID NO: 13617

SEQ ID NO: 16026 - DNA, 1827 bp, Vibrio parahaemolyticus RIMD 2210633; identical to SEQ ID NO: 13618
  CDS (1)..(1827): transl_table=11

SEQ ID NO: 16027 - protein, 608 aa, Vibrio parahaemolyticus RIMD 2210633; identical to SEQ ID NO: 13619

SEQ ID NO: 16028 - DNA, 1818 bp, Salmonella enterica subsp. enterica serovar Typhi Ty2; identical to SEQ ID NO: 13620
  CDS (1)..(1818): transl_table=11

SEQ ID NO: 16029 - protein, 605 aa, Salmonella enterica subsp. enterica serovar Typhi Ty2; identical to SEQ ID NO: 13621

SEQ ID NO: 16030 - DNA, 2079 bp, Bacteroides thetaiotaomicron VPI-5482; identical to SEQ ID NO: 13622
  CDS (1)..(2079): transl_table=11

SEQ ID NO: 16031 - protein, 692 aa, Bacteroides thetaiotaomicron VPI-5482; identical to SEQ ID NO: 13623

SEQ ID NO: 16032 - DNA, 1854 bp, Bacteroides thetaiotaomicron VPI-5482; identical to SEQ ID NO: 13624
  CDS (1)..(1854): transl_table=11

SEQ ID NO: 16033 - protein, 617 aa, Bacteroides thetaiotaomicron VPI-5482; identical to SEQ ID NO: 13625

SEQ ID NO: 16034 - DNA, 1767 bp, Enterococcus faecalis V583; identical to SEQ ID NO: 13626
  CDS (1)..(1767): transl_table=11

SEQ ID NO: 16035 - protein, 588 aa, Enterococcus faecalis V583; identical to SEQ ID NO: 13627

SEQ ID NO: 16036 - DNA, 1614 bp, Enterococcus faecalis V583; identical to SEQ ID NO: 13628
  CDS (1)..(1614): transl_table=11

SEQ ID NO: 16037 - protein, 537 aa, Enterococcus faecalis V583; identical to SEQ ID NO: 13629

SEQ ID NO: 16038 - DNA, 1674 bp, Enterococcus faecalis V583; identical to SEQ ID NO: 13630
  CDS (1)..(1674): transl_table=11

SEQ ID NO: 16039 - protein, 557 aa, Enterococcus faecalis V583; identical to SEQ ID NO: 13631

SEQ ID NO: 16040 - DNA, 1719 bp, Streptomyces avermitilis MA-4680; identical to SEQ ID NO: 13632
  CDS (1)..(1719)

SEQ ID NO: 16041 - protein, 572 aa, Streptomyces avermitilis MA-4680; identical to SEQ ID NO: 13633

SEQ ID NO: 16042 - DNA, 1752 bp, Streptomyces avermitilis MA-4680; identical to SEQ ID NO: 13634
  CDS (1)..(1752)

SEQ ID NO: 16043 - protein, 583 aa, Streptomyces avermitilis MA-4680; identical to SEQ ID NO: 13635

SEQ ID NO: 16044 - DNA, 1665 bp, Bacillus anthracis str. Ames; identical to SEQ ID NO: 13636
  CDS (1)..(1665): transl_table=11

SEQ ID NO: 16045 - protein, 554 aa, Bacillus anthracis str. Ames; identical to SEQ ID NO: 13637

SEQ ID NO: 16046 - DNA, 1761 bp, Bacillus anthracis str. Ames; identical to SEQ ID NO: 13638
  CDS (1)..(1761): transl_table=11

SEQ ID NO: 16047 - protein, 586 aa, Bacillus anthracis str. Ames; identical to SEQ ID NO: 13639

SEQ ID NO: 16048 - DNA, 1641 bp, Mycobacterium bovis AF2122/97; identical to SEQ ID NO: 13640
  CDS (1)..(1641): transl_table=11

SEQ ID NO: 16049 - protein, 546 aa, Mycobacterium bovis AF2122/97; identical to SEQ ID NO: 13641

SEQ ID NO: 16050 - DNA, 1761 bp, Rhodopirellula baltica SH 1; identical to SEQ ID NO: 13642
  CDS (1)..(1761): transl_table=11

SEQ ID NO: 16051 - protein, 586 aa, Rhodopirellula baltica SH 1; identical to SEQ ID NO: 13643

SEQ ID NO: 16052 - DNA, 3342 bp, Bordetella pertussis Tohama I; identical to SEQ ID NO: 13644
  CDS (1)..(3342): transl_table=11

SEQ ID NO: 16053 - protein, 1113 aa, Bordetella pertussis Tohama I; identical to SEQ ID NO: 13645

SEQ ID NO: 16054 - DNA, 3342 bp, Bordetella bronchiseptica RB50; identical to SEQ ID NO: 13646
  CDS (1)..(3342)

SEQ ID NO: 16055 - protein, 1113 aa, Bordetella bronchiseptica RB50; identical to SEQ ID NO: 13647

SEQ ID NO: 16056 - DNA, 1452 bp, Prochlorococcus marinus str. MIT 9313; identical to SEQ ID NO: 13648
  CDS (1)..(1452): transl_table=11

SEQ ID NO: 16057 - protein, 483 aa, Prochlorococcus marinus str. MIT 9313; identical to SEQ ID NO: 13649

SEQ ID NO: 16058 - DNA, 1407 bp, Synechococcus sp. WH 8102; identical to SEQ ID NO: 13650
  CDS (1)..(1407): transl_table=11

SEQ ID NO: 16059 - protein, 468 aa, Synechococcus sp. WH 8102; identical to SEQ ID NO: 13651

SEQ ID NO: 16060 - DNA, 1662 bp, Synechococcus sp. WH 8102; identical to SEQ ID NO: 13652
  CDS (1)..(1662): transl_table=11

SEQ ID NO: 16061 - protein, 553 aa, Synechococcus sp. WH 8102; identical to SEQ ID NO: 13653

SEQ ID NO: 16062 - DNA, 1863 bp, Gloeobacter violaceus PCC 7421; identical to SEQ ID NO: 13654
  CDS (1)..(1863): transl_table=11

SEQ ID NO: 16063 - protein, 620 aa, Gloeobacter violaceus PCC 7421; identical to SEQ ID NO: 13655

SEQ ID NO: 16064 - DNA, 1443 bp, Gloeobacter violaceus PCC 7421; identical to SEQ ID NO: 13656
  CDS (1)..(1443): transl_table=11

SEQ ID NO: 16065 - protein, 480 aa, Gloeobacter violaceus PCC 7421; identical to SEQ ID NO: 13657

SEQ ID NO: 16066 - DNA, 1635 bp, Vibrio vulnificus YJ016; identical to SEQ ID NO: 13658
  CDS (1)..(1635): transl_table=11

SEQ ID NO: 16067 - protein, 544 aa, Vibrio vulnificus YJ016; identical to SEQ ID NO: 13659

SEQ ID NO: 16068 - DNA, 3303 bp, Rhodopseudomonas palustris CGA009; identical to SEQ ID NO: 13660
  CDS (1)..(3303): transl_table=11

SEQ ID NO: 16069 - protein, 1100 aa, Rhodopseudomonas palustris CGA009; identical to SEQ ID NO: 13661

SEQ ID NO: 16070 - DNA, 1617 bp, Rhodopseudomonas palustris CGA009; identical to SEQ ID NO: 13662
  CDS (1)..(1617): transl_table=11

SEQ ID NO: 16071 - protein, 538 aa, Rhodopseudomonas palustris CGA009; identical to SEQ ID NO: 13663

SEQ ID NO: 16072 - DNA, 3336 bp, Geobacter sulfurreducens PCA; identical to SEQ ID NO: 13664
  CDS (1)..(3336): transl_table=11

SEQ ID NO: 16073 - protein, 1111 aa, Geobacter sulfurreducens PCA; identical to SEQ ID NO: 13665

SEQ ID NO: 16074 - DNA, 1335 bp, Mycobacterium avium subsp. paratuberculosis str. k10; identical to SEQ ID NO: 13666
  CDS (1)..(1335): transl_table=11

SEQ ID NO: 16075 - protein, 444 aa, Mycobacterium avium subsp. paratuberculosis str. k10; identical to SEQ ID NO: 13667

SEQ ID NO: 16076 - DNA, 1773 bp, Mycobacterium avium subsp. paratuberculosis str. k10; identical to SEQ ID NO: 13668
  CDS (1)..(1773): transl_table=11

SEQ ID NO: 16077 - protein, 590 aa, Mycobacterium avium subsp. paratuberculosis str. k10; identical to SEQ ID NO: 13669

SEQ ID NO: 16078 - DNA, 1725 bp, Lactobacillus johnsonii NCC 533; identical to SEQ ID NO: 13670
  CDS (1)..(1725): transl_table=11

SEQ ID NO: 16079 - protein, 574 aa, Lactobacillus johnsonii NCC 533; identical to SEQ ID NO: 13671

SEQ ID NO: 16080 - DNA, 1668 bp, Lactobacillus johnsonii NCC 533; identical to SEQ ID NO: 13672
  CDS (1)..(1668): transl_table=11

SEQ ID NO: 16081 - protein, 555 aa, Lactobacillus johnsonii NCC 533; identical to SEQ ID NO: 13673

SEQ ID NO: 16082 - DNA, 1665 bp, Bacillus cereus ATCC 10987; identical to SEQ ID NO: 13674
  CDS (1)..(1665): transl_table=11

SEQ ID NO: 16083 - protein, 554 aa, Bacillus cereus ATCC 10987; identical to SEQ ID NO: 13675

SEQ ID NO: 16084 - DNA, 1710 bp, Anopheles gambiae str. PEST; identical to SEQ ID NO: 13676
  CDS (1)..(1710)

SEQ ID NO: 16085 - protein, 569 aa, Anopheles gambiae str. PEST; identical to SEQ ID NO: 13677

SEQ ID NO: 16086 - DNA, 1800 bp, Anopheles gambiae str. PEST; identical to SEQ ID NO: 13678
  CDS (1)..(1800)

SEQ ID NO: 16087 - protein, 599 aa, Anopheles gambiae str. PEST; identical to SEQ ID NO: 13679

SEQ ID NO: 16088 - DNA, 1509 bp, Anopheles gambiae str. PEST; identical to SEQ ID NO: 13680
  CDS (1)..(1509)

SEQ ID NO: 16089 - protein, 502 aa, Anopheles gambiae str. PEST; identical to SEQ ID NO: 13681

SEQ ID NO: 16090 - DNA, 1716 bp, Gibberella zeae PH-1; identical to SEQ ID NO: 13682
  CDS (1)..(1716)

SEQ ID NO: 16091 - protein, 571 aa, Gibberella zeae PH-1; identical to SEQ ID NO: 13683

SEQ ID NO: 16092 - DNA, 1635 bp, Leptospira interrogans serovar Copenhageni str. Fiocruz L1-130; identical to SEQ ID NO: 13684
  CDS (1)..(1635): transl_table=11

SEQ ID NO: 16093 - protein, 544 aa, Leptospira interrogans serovar Copenhageni str. Fiocruz L1-130; identical to SEQ ID NO: 13685

SEQ ID NO: 16094 - DNA, 1251 bp, Thermus thermophilus HB27; identical to SEQ ID NO: 13686
  CDS (1)..(1251): transl_table=11

SEQ ID NO: 16095 - protein, 416 aa, Thermus thermophilus HB27 [sequence omitted]

SEQ ID NO: 16096 - DNA, 1662 bp, Listeria monocytogenes str. 4b F2365; identical to SEQ ID NO: 13688
  CDS (1)..(1662): transl_table=11

SEQ ID NO: 16097 - protein, 553 aa, Listeria monocytogenes str. 4b F2365; identical to SEQ ID NO: 13689

SEQ ID NO: 16098 - DNA, 1533 bp, Listeria monocytogenes str. 4b F2365; identical to SEQ ID NO: 13690
  CDS (1)..(1533): transl_table=11

SEQ ID NO: 16099 - protein, 510 aa, Listeria monocytogenes str. 4b F2365; identical to SEQ ID NO: 13691

SEQ ID NO: 16100 - DNA, 1761 bp, Bacillus thuringiensis serovar konkukian str. 97-27; identical to SEQ ID NO: 13692
  CDS (1)..(1761): transl_table=11

SEQ ID NO: 16101 - protein, 586 aa, Bacillus thuringiensis serovar konkukian str. 97-27; identical to SEQ ID NO: 13693

SEQ ID NO: 16102 - DNA, 1710 bp, Leifsonia xyli subsp. xyli str. CTCB07; identical to SEQ ID NO: 13694
  CDS (1)..(1710): transl_table=11

SEQ ID NO: 16103 - protein, 569 aa, Leifsonia xyli subsp. xyli str. CTCB07; identical to SEQ ID NO: 13695

SEQ ID NO: 16104 - DNA, 1683 bp, Bacillus licheniformis ATCC 14580; identical to SEQ ID NO: 13696
  CDS (1)..(1683): transl_table=11

SEQ ID NO: 16105 - protein, 560 aa, Bacillus licheniformis ATCC 14580; identical to SEQ ID NO: 13697

SEQ ID NO: 16106 - DNA, 1764 bp, Bacillus licheniformis ATCC 14580; identical to SEQ ID NO: 13698
  CDS (1)..(1764): transl_table=11

SEQ ID NO: 16107 - protein, 587 aa, Bacillus licheniformis ATCC 14580; identical to SEQ ID NO: 13699

SEQ ID NO: 16108 - DNA, 1620 bp, Methylococcus capsulatus str. Bath; identical to SEQ ID NO: 13700
  CDS (1)..(1620): transl_table=11

SEQ ID NO: 16109 - protein, 539 aa, Methylococcus capsulatus str. Bath; identical to SEQ ID NO: 13701

SEQ ID NO: 16110 - DNA, 1866 bp, Photobacterium profundum SS9; identical to SEQ ID NO: 13702
  CDS (1)..(1866): transl_table=11

SEQ ID NO: 16111 - protein, 621 aa, Photobacterium profundum SS9; identical to SEQ ID NO: 13703

SEQ ID NO: 16112 - DNA, 1656 bp, Thermus thermophilus HB8; identical to SEQ ID NO: 13704
  CDS (1)..(1656): transl_table=11

SEQ ID NO: 16113 - protein, 551 aa, Thermus thermophilus HB8; identical to SEQ ID NO: 13705

SEQ ID NO: 16114 - DNA, 1767 bp, Geobacillus kaustophilus HTA426; identical to SEQ ID NO: 13706
  CDS (1)..(1767): transl_table=11

SEQ ID NO: 16115 - protein, 588 aa, Geobacillus kaustophilus HTA426; identical to SEQ ID NO: 13707

SEQ ID NO: 16116 - DNA, 1542 bp, Geobacillus kaustophilus HTA426; identical to SEQ ID NO: 13708
  CDS (1)..(1542): transl_table=11

SEQ ID NO: 16117 - protein, 513 aa, Geobacillus kaustophilus HTA426; identical to SEQ ID NO: 13709

SEQ ID NO: 16118 - DNA, 4983 bp, Geobacillus kaustophilus HTA426; identical to SEQ ID NO: 13710
  CDS (1)..(4983): transl_table=11

SEQ ID NO: 16119 - protein, 1660 aa, Geobacillus kaustophilus HTA426; identical to SEQ ID NO: 13711

SEQ ID NO: 16120 - DNA, 1689 bp, Azoarcus sp. EbN1; identical to SEQ ID NO: 13712
  CDS (1)..(1689): transl_table=11

SEQ ID NO: 16121 - protein, 562 aa, Azoarcus sp. EbN1; identical to SEQ ID NO: 13713

SEQ ID NO: 16122 - DNA, 1770 bp, Bacillus clausii KSM-K16; identical to SEQ ID NO: 13714
  CDS (1)..(1770): transl_table=11

SEQ ID NO: 16123 - protein, 589 aa, Bacillus clausii KSM-K16; identical to SEQ ID NO: 13715

SEQ ID NO: 16124 - DNA, 2298 bp, Thermococcus kodakarensis KOD1; identical to SEQ ID NO: 13716
  CDS (1)..(2298): transl_table=11

SEQ ID NO: 16125 - protein, 765 aa, Thermococcus kodakarensis KOD1; identical to SEQ ID NO: 13717

SEQ ID NO: 16126 - DNA, 2724 bp, Xanthomonas oryzae pv. oryzae KACC10331; identical to SEQ ID NO: 13718
  CDS (1)..(2724): transl_table=11

SEQ ID NO: 16127 - protein, 907 aa, Xanthomonas oryzae pv. oryzae KACC10331; identical to SEQ ID NO: 13719

SEQ ID NO: 16128 - DNA, 1260 bp, Vibrio fischeri ES114; identical to SEQ ID NO: 13720
  CDS (1)..(1260): transl_table=11

SEQ ID NO: 16129 - protein, 419 aa, Vibrio fischeri ES114; identical to SEQ ID NO: 13721

SEQ ID NO: 16130 - DNA, 1815 bp, Corynebacterium glutamicum ATCC 13032; identical to SEQ ID NO: 13722
  CDS (1)..(1815): transl_table=11

SEQ ID NO: 16131 - protein, 604 aa, Corynebacterium glutamicum ATCC 13032; identical to SEQ ID NO: 13723

SEQ ID NO: 16132 - DNA, 3327 bp, Pseudomonas syringae pv. syringae B728a; identical to SEQ ID NO: 13724
  CDS (1)..(3327)

SEQ ID NO: 16133 - protein, 1108 aa, Pseudomonas syringae pv. syringae B728a; identical to SEQ ID NO: 13725

SEQ ID NO: 16134 - DNA, 1659 bp, Lactobacillus gasseri; identical to SEQ ID NO: 13726
  CDS (1)..(1659)

SEQ ID NO: 16135 - protein, 552 aa, Lactobacillus gasseri; identical to SEQ ID NO: 13727

SEQ ID NO: 16136 - DNA, 1467 bp, Nostoc punctiforme PCC 73102; identical to SEQ ID NO: 13728
  CDS (1)..(1467)

SEQ ID NO: 16137 - protein, 488 aa, Nostoc punctiforme PCC 73102; identical to SEQ ID NO: 13729

SEQ ID NO: 16138 - DNA, 1674 bp, Nostoc punctiforme PCC 73102; identical to SEQ ID NO: 13730
  CDS (1)..(1674)

SEQ ID NO: 16139 - protein, 557 aa, Nostoc punctiforme PCC 73102; identical to SEQ ID NO: 13731

SEQ ID NO: 16140 - DNA, 1266 bp, Bifidobacterium longum DJO10A; identical to SEQ ID NO: 13732
  CDS (1)..(1266)

SEQ ID NO: 16141 - protein, 421 aa, Bifidobacterium longum DJO10A; identical to SEQ ID NO: 13733

SEQ ID NO: 16142 - DNA, 3333 bp, Desulfovibrio desulfuricans G20; identical to SEQ ID NO: 13734
  CDS (1)..(3333)

SEQ ID NO: 16143 - protein, 1110 aa, Desulfovibrio desulfuricans G20; identical to SEQ ID NO: 13735

SEQ ID NO: 16144 - DNA, 1467 bp, Anabaena variabilis ATCC 29413; identical to SEQ ID NO: 13736
  CDS (1)..(1467)

SEQ ID NO: 16145 - protein, 488 aa, Anabaena variabilis ATCC 29413; identical to SEQ ID NO: 13737

SEQ ID NO: 16146 - DNA, 3366 bp, Ralstonia eutropha JMP134; identical to SEQ ID NO: 13738
  CDS (1)..(3366)

SEQ ID NO: 16147 - protein, 1121 aa, Ralstonia eutropha JMP134; identical to SEQ ID NO: 13739

SEQ ID NO: 16148 - DNA, 2586 bp, Rhodobacter sphaeroides 2.4.1; identical to SEQ ID NO: 13740
  CDS (1)..(2586)

SEQ ID NO: 16149 - protein, 861 aa, Rhodobacter sphaeroides 2.4.1; identical to SEQ ID NO: 13741

SEQ ID NO: 16150 - DNA, 3417 bp, Burkholderia cepacia R18194; identical to SEQ ID NO: 13742
  CDS (1)..(3417)

SEQ ID NO: 16151 - protein, 1138 aa, Burkholderia cepacia R18194; identical to SEQ ID NO: 13743

SEQ ID NO: 16152 - DNA, 1776 bp, Listeria monocytogenes str. 4b H7858; identical to SEQ ID NO: 13744
  CDS (1)..(1776): transl_table=11

SEQ ID NO: 16153 - protein, 591 aa, Listeria monocytogenes str. 4b H7858; identical to SEQ ID NO: 13745

SEQ ID NO: 16154 - DNA, 1533 bp, Listeria monocytogenes str. 1/2a F6854; identical to SEQ ID NO: 13746
  CDS (1)..(1533): transl_table=11

SEQ ID NO: 16155 - protein, 510 aa, Listeria monocytogenes str. 1/2a F6854; identical to SEQ ID NO: 13747

SEQ ID NO: 16156 - DNA, 1662 bp, Listeria monocytogenes str. 1/2a F6854; identical to SEQ ID NO: 13748
  CDS (1)..(1662): transl_table=11

SEQ ID NO: 16157 - protein, 553 aa, Listeria monocytogenes str. 1/2a F6854; identical to SEQ ID NO: 13749

SEQ ID NO: 16158 - DNA, 3342 bp, Pseudomonas fluorescens PfO-1; identical to SEQ ID NO: 13750
  CDS (1)..(3342)

SEQ ID NO: 16159 - protein, 1113 aa, Pseudomonas fluorescens PfO-1; identical to SEQ ID NO: 13751

SEQ ID NO: 16160 - DNA, 1629 bp, Rhodospirillum rubrum; identical to SEQ ID NO: 13752
  CDS (1)..(1629)

SEQ ID NO: 16161 - protein, 542 aa, Rhodospirillum rubrum; identical to SEQ ID NO: 13753

SEQ ID NO: 16162 - DNA, 3303 bp, Rhodospirillum rubrum; identical to SEQ ID NO: 13754
  CDS (1)..(3303)

SEQ ID NO: 16163 - protein, 1100 aa, Rhodospirillum rubrum; identical to SEQ ID NO: 13755

SEQ ID NO: 16164 - DNA, 3465 bp, Burkholderia fungorum LB400; identical to SEQ ID NO: 13756
  CDS (1)..(3465)

SEQ ID NO: 16165 - protein, 1154 aa, Burkholderia fungorum LB400; identical to SEQ ID NO: 13757

SEQ ID NO: 16166 - DNA, 1821 bp, Thermobifida fusca; identical to SEQ ID NO: 13758
  CDS (1)..(1821)

SEQ ID NO: 16167 - protein, 606 aa, Thermobifida fusca; identical to SEQ ID NO: 13759

SEQ ID NO: 16168 - DNA, 1563 bp, Microbulbifer degradans 2-40; identical to SEQ ID NO: 13760
  CDS (1)..(1563)

SEQ ID NO: 16169 - protein, 520 aa, Microbulbifer degradans 2-40; identical to SEQ ID NO: 13761

SEQ ID NO: 16170 - DNA, 1671 bp, Oenococcus oeni PSU-1; identical to SEQ ID NO: 13762
  CDS (1)..(1671)

SEQ ID NO: 16171 - protein, 556 aa, Oenococcus oeni PSU-1; identical to SEQ ID NO: 13763

SEQ ID NO: 16172 - DNA, 1482 bp, Trichodesmium erythraeum IMS101; identical to SEQ ID NO: 13764
  CDS (1)..(1482)

SEQ ID NO: 16173 - protein, 493 aa, Trichodesmium erythraeum IMS101; identical to SEQ ID NO: 13765

SEQ ID NO: 16174 - DNA, 3288 bp, Thiobacillus denitrificans ATCC 25259; identical to SEQ ID NO: 13766
  CDS (1)..(3288)

SEQ ID NO: 16175 - protein, 1095 aa, Thiobacillus denitrificans ATCC 25259; identical to SEQ ID NO: 13767

SEQ ID NO: 16176 - DNA, 1815 bp, Chloroflexus aurantiacus; identical to SEQ ID NO: 13768
  CDS (1)..(1815)

SEQ ID NO: 16177 - protein, 604 aa, Chloroflexus aurantiacus; identical to SEQ ID NO: 13769

SEQ ID NO: 16178 - DNA, 4140 bp, Chloroflexus aurantiacus; identical to SEQ ID NO: 13770
  CDS (1)..(4140)

SEQ ID NO: 16179 - protein, 1379 aa, Chloroflexus aurantiacus; identical to SEQ ID NO: 13771

SEQ ID NO: 16180 - DNA, 3363 bp, Chloroflexus aurantiacus; identical to SEQ ID NO: 13772
  CDS (1)..(3363)

SEQ ID NO: 16181 - protein, 1120 aa, Chloroflexus aurantiacus; identical to SEQ ID NO: 13773

SEQ ID NO: 16182 - DNA, 1803 bp, Lactococcus lactis subsp. cremoris SK11; identical to SEQ ID NO: 13774
  CDS (1)..(1803)

SEQ ID NO: 16183 - protein, 600 aa, Lactococcus lactis subsp. cremoris SK11; identical to SEQ ID NO: 13775

SEQ ID NO: 16184 - DNA, 1755 bp, Lactococcus lactis subsp. cremoris SK11; identical to SEQ ID NO: 13776
  CDS (1)..(1755)

SEQ ID NO: 16185 - protein, 584 aa, Lactococcus lactis subsp. cremoris SK11; identical to SEQ ID NO: 13777

SEQ ID NO: 16186 - DNA, 1695 bp, Lactobacillus casei ATCC 334; identical to SEQ ID NO: 13778
  CDS (1)..(1695)

SEQ ID NO: 16187 - protein, 564 aa, Lactobacillus casei ATCC 334; identical to SEQ ID NO: 13779

SEQ ID NO: 16188 - DNA, 1779 bp, Lactobacillus casei ATCC 334; identical to SEQ ID NO: 13780
  CDS (1)..(1779)

SEQ ID NO: 16189 - protein, 592 aa, Lactobacillus casei ATCC 334; identical to SEQ ID NO: 13781

SEQ ID NO: 16190 - DNA, 1668 bp, Lactobacillus casei ATCC 334; identical to SEQ ID NO: 13782
  CDS (1)..(1668)

SEQ ID NO: 16191 - protein, 555 aa, Lactobacillus casei ATCC 334; identical to SEQ ID NO: 13783

SEQ ID NO: 16192 - DNA, 570 bp, Lactobacillus delbrueckii subsp. bulgaricus ATCC BAA-365; identical to SEQ ID NO: 13784
  CDS (1)..(570)

SEQ ID NO: 16193 - protein, 189 aa, Lactobacillus delbrueckii subsp. bulgaricus ATCC BAA-365; identical to SEQ ID NO: 13785

SEQ ID NO: 16194 - DNA, 1827 bp, Deinococcus geothermalis DSM 11300; identical to SEQ ID NO: 13786
  CDS (1)..(1827): transl_table=11

SEQ ID NO: 16195 - protein, 608 aa, Deinococcus geothermalis DSM 11300; identical to SEQ ID NO: 13787

SEQ ID NO: 16196 - DNA, 1491 bp, Deinococcus geothermalis DSM 11300; identical to SEQ ID NO: 13788
  CDS (1)..(1491): transl_table=11

SEQ ID NO: 16197 - protein, 496 aa, Deinococcus geothermalis DSM 11300; identical to SEQ ID NO: 13789

SEQ ID NO: 16198 - DNA, 2097 bp, Deinococcus geothermalis DSM 11300; identical to SEQ ID NO: 13790
  CDS (1)..(2097): transl_table=11

SEQ ID NO: 16199 - protein, 698 aa, Deinococcus geothermalis DSM 11300; identical to SEQ ID NO: 13791

SEQ ID NO: 16200 - DNA, 1662 bp, Anaeromyxobacter dehalogenans 2CP-C; identical to SEQ ID NO: 13792
  CDS (1)..(1662): transl_table=11

SEQ ID NO: 16201 - protein, 553 aa, Anaeromyxobacter dehalogenans 2CP-C; identical to SEQ ID NO: 13793

SEQ ID NO: 16202 - DNA, 1638 bp, Anaeromyxobacter dehalogenans 2CP-C; identical to SEQ ID NO: 13794
  CDS (1)..(1638): transl_table=11

SEQ ID NO: 16203 - protein, 545 aa, Anaeromyxobacter dehalogenans 2CP-C; identical to SEQ ID NO: 13795

SEQ ID NO: 16204 - DNA, 1602 bp, Anaeromyxobacter dehalogenans 2CP-C; identical to SEQ ID NO: 13796
  CDS (1)..(1602): transl_table=11

SEQ ID NO: 16205 - protein, 533 aa, Anaeromyxobacter dehalogenans 2CP-C; identical to SEQ ID NO: 13797

SEQ ID NO: 16206 - DNA, 1188 bp, Streptococcus pneumoniae TIGR4; identical to SEQ ID NO: 13798
  CDS (1)..(1188)

SEQ ID NO: 16207 - protein, 395 aa, Streptococcus pneumoniae TIGR4; identical to SEQ ID NO: 13799

SEQ ID NO: 16208 - DNA, 1407 bp, Arthrobacter sp. FB24; identical to SEQ ID NO: 13800
  CDS (1)..(1407): transl_table=11

SEQ ID NO: 16209 - protein, 468 aa, Arthrobacter sp. FB24; identical to SEQ ID NO: 13801

SEQ ID NO: 16210 - DNA, 1968 bp, Arthrobacter sp. FB24; identical to SEQ ID NO: 13802
  CDS (1)..(1968): transl_table=11

SEQ ID NO: 16211 - protein, 655 aa, Arthrobacter sp. FB24; identical to SEQ ID NO: 13803

SEQ ID NO: 16212 - DNA, 1797 bp, Arthrobacter sp. FB24; identical to SEQ ID NO: 13804
  CDS (1)..(1797): transl_table=11

SEQ ID NO: 16213 - protein, 598 aa, Arthrobacter sp. FB24; identical to SEQ ID NO: 13805

SEQ ID NO: 16214 - DNA, 3327 bp, Azotobacter vinelandii AvOP; identical to SEQ ID NO: 13806
  CDS (1)..(3327): transl_table=11

SEQ ID NO: 16215 - protein, 1108 aa, Azotobacter vinelandii AvOP; identical to SEQ ID NO: 13807

SEQ ID NO: 16216 - DNA, 3414 bp, Burkholderia vietnamiensis G4; identical to SEQ ID NO: 13808
  CDS (1)..(3414): transl_table=11

SEQ ID NO: 16217 - protein, 1137 aa, Burkholderia vietnamiensis G4; identical to SEQ ID NO: 13809

SEQ ID NO: 16218 - DNA, 3414 bp, Burkholderia cenocepacia HI2424; identical to SEQ ID NO: 13810
  CDS (1)..(3414): transl_table=11

SEQ ID NO: 16219 - protein, 1137 aa, Burkholderia cenocepacia HI2424; identical to SEQ ID NO: 13811

SEQ ID NO: 16220 - DNA, 1614 bp, Chromohalobacter salexigens DSM 3043; identical to SEQ ID NO: 13812
  CDS (1)..(1614): transl_table=11

SEQ ID NO: 16221 - protein, 537 aa, Chromohalobacter salexigens DSM 3043; identical to SEQ ID NO: 13813

SEQ ID NO: 16222 - DNA, 3396 bp, Burkholderia pseudomallei S13; identical to SEQ ID NO: 13814
  CDS (1)..(3396)

SEQ ID NO: 16223 - protein, 1131 aa, Burkholderia pseudomallei S13; identical to SEQ ID NO: 13815

SEQ ID NO: 16224 - DNA, 1728 bp, Clostridium thermocellum ATCC 27405; identical to SEQ ID NO: 13816
  CDS (1)..(1728): transl_table=11

SEQ ID NO: 16225 - protein, 575 aa, Clostridium thermocellum ATCC 27405; identical to SEQ ID NO: 13817

SEQ ID NO: 16226 - DNA, 1461 bp, Crocosphaera watsonii WH 8501; identical to SEQ ID NO: 13818
  CDS (1)..(1461): transl_table=11

SEQ ID NO: 16227 - protein, 486 aa, Crocosphaera watsonii WH 8501; identical to SEQ ID NO: 13819

SEQ ID NO: 16228 - DNA, 3318 bp, Chlorobium phaeobacteroides BS1; identical to SEQ ID NO: 13820
  CDS (1)..(3318): transl_table=11

SEQ ID NO: 16229 - protein, 1105 aa, Chlorobium phaeobacteroides BS1; identical to SEQ ID NO: 13821

SEQ ID NO: 16230 - DNA, 3339 bp, Geobacter metallireducens GS-15; identical to SEQ ID NO: 13822
  CDS (1)..(3339): transl_table=11

SEQ ID NO: 16231 - protein, 1112 aa, Geobacter metallireducens GS-15; identical to SEQ ID NO: 13823

SEQ ID NO: 16232 - DNA, 1785 bp, Exiguobacterium sp. 255-15; identical to SEQ ID NO: 13824
  CDS (1)..(1785): transl_table=11

SEQ ID NO: 16233 - protein, 594 aa, Exiguobacterium sp. 255-15; identical to SEQ ID NO: 13825

SEQ ID NO: 16234 - DNA, 1674 bp, Exiguobacterium sp. 255-15; identical to SEQ ID NO: 13826
  CDS (1)..(1674): transl_table=11

SEQ ID NO: 16235 - protein, 557 aa, Exiguobacterium sp. 255-15; identical to SEQ ID NO: 13827

SEQ ID NO: 16236 - DNA, 1611 bp, Exiguobacterium sp. 255-15; identical to SEQ ID NO: 13828
  CDS (1)..(1611): transl_table=11

SEQ ID NO: 16237 - protein, 536 aa, Exiguobacterium sp. 255-15; identical to SEQ ID NO: 13829

SEQ ID NO: 16238 - DNA, 1788 bp, Exiguobacterium sp. 255-15; identical to SEQ ID NO: 13830
  CDS (1)..(1788): transl_table=11

SEQ ID NO: 16239 - protein, 595 aa, Exiguobacterium sp. 255-15; identical to SEQ ID NO: 13831

SEQ ID NO: 16240 - DNA, 1803 bp, Frankia sp. CcI3; identical to SEQ ID NO: 13832
  CDS (1)..(1803): transl_table=11

SEQ ID NO: 16241 - protein, 600 aa, Frankia sp. CcI3; identical to SEQ ID NO: 13833

SEQ ID NO: 16242 - DNA, 3582 bp, Desulfitobacterium hafniense DCB-2; identical to SEQ ID NO: 13834
  CDS (1)..(3582): transl_table=11

SEQ ID NO: 16243 - protein, 1193 aa, Desulfitobacterium hafniense DCB-2; identical to SEQ ID NO: 13835

SEQ ID NO: 16244 - DNA, 1719 bp, Frankia sp. EAN1pec; identical to SEQ ID NO: 13836
  CDS (1)..(1719): transl_table=11

SEQ ID NO: 16245 - protein, 572 aa, Frankia sp. EAN1pec; identical to SEQ ID NO: 13837

SEQ ID NO: 16246 - DNA, 1761 bp, Moorella thermoacetica ATCC 39073; identical to SEQ ID NO: 13838
  CDS (1)..(1761): transl_table=11

SEQ ID NO: 16247 - protein, 586 aa, Moorella thermoacetica ATCC 39073; identical to SEQ ID NO: 13839

SEQ ID NO: 16248 - DNA, 1623 bp, Shewanella baltica OS155; identical to SEQ ID NO: 13840
  CDS (1)..(1623): transl_table=11

SEQ ID NO: 16249 - protein, 540 aa, Shewanella baltica OS155; identical to SEQ ID NO: 13841

SEQ ID NO: 16250 - DNA, 1635 bp, Shewanella amazonensis SB2B; identical to SEQ ID NO: 13842
  CDS (1)..(1635): transl_table=11

SEQ ID NO: 16251 - protein, 544 aa, Shewanella amazonensis SB2B; identical to SEQ ID NO: 13843

SEQ ID NO: 16252 - DNA, 3297 bp, Pelodictyon phaeoclathratiforme BU-1; identical to SEQ ID NO: 13844
  CDS (1)..(3297): transl_table=11

SEQ ID NO: 16253 - protein, 1098 aa, Pelodictyon phaeoclathratiforme BU-1; identical to SEQ ID NO: 13845

SEQ ID NO: 16254 - DNA, 3414 bp, Prosthecochloris aestuarii DSM 271; identical to SEQ ID NO: 13846
  CDS (1)..(3414): transl_table=11

SEQ ID NO: 16255 - protein, 1137 aa, Prosthecochloris aestuarii DSM 271; identical to SEQ ID NO: 13847

SEQ ID NO: 16256 - DNA, 1593 bp, Rubrobacter xylanophilus DSM 9941; identical to SEQ ID NO: 13848
  CDS (1)..(1593): transl_table=11

SEQ ID NO: 16257 - protein, 530 aa, Rubrobacter xylanophilus DSM 9941; identical to SEQ ID NO: 13849

SEQ ID NO: 16258 - DNA, 5328 bp, Rubrobacter xylanophilus DSM 9941; identical to SEQ ID NO: 13850
  CDS (1)..(5328): transl_table=11

SEQ ID NO: 16259 - protein, 1775 aa, Rubrobacter xylanophilus DSM 9941; identical to SEQ ID NO: 13851

SEQ ID NO: 16260 - DNA, 1755 bp, Mesorhizobium sp. BNC1; identical to SEQ ID NO: 13852
  CDS (1)..(1755): transl_table=11

SEQ ID NO: 16261 - protein, 584 aa, Mesorhizobium sp. BNC1; identical to SEQ ID NO: 13853

SEQ ID NO: 16262 - DNA, 3348 bp, Mesorhizobium sp. BNC1; identical to SEQ ID NO: 13854
  CDS (1)..(3348): transl_table=11

SEQ ID NO: 16263 - protein, 1115 aa, Mesorhizobium sp. BNC1; identical to SEQ ID NO: 13855

SEQ ID NO: 16264 - DNA, 1653 bp, Silicibacter sp. TM1040; identical to SEQ ID NO: 13856
  CDS (1)..(1653): transl_table=11

SEQ ID NO: 16265 - protein, 550 aa, Silicibacter sp. TM1040; identical to SEQ ID NO: 13857

SEQ ID NO: 16266 - DNA, 3267 bp, Nitrobacter hamburgensis X14; identical to SEQ ID NO: 13858
  CDS (1)..(3267): transl_table=11

SEQ ID NO: 16267 - protein, 1088 aa, Nitrobacter hamburgensis X14; identical to SEQ ID NO: 13859

SEQ ID NO: 16268 - DNA, 1926 bp, Shewanella denitrificans OS-217; identical to SEQ ID NO: 13860
  CDS (1)..(1926): transl_table=11

SEQ ID NO: 16269 - protein, 641 aa, Shewanella denitrificans OS-217; identical to SEQ ID NO: 13861

SEQ ID NO: 16270 - DNA, 1419 bp, Thermotoga neapolitana; identical to SEQ ID NO: 13862
  CDS (1)..(1419): transl_table=11

SEQ ID NO: 16271 - protein, 472 aa, Thermotoga neapolitana; identical to SEQ ID NO: 13863

SEQ ID NO: 16272 - DNA, 1701 bp, Bacteroides thetaiotaomicron; identical to SEQ ID NO: 13864
  CDS (1)..(1701): transl_table=11

SEQ ID NO: 16273 - protein, 566 aa, Bacteroides thetaiotaomicron; identical to SEQ ID NO: 13865

SEQ ID NO: 16274 - DNA, 3906 bp, Alicyclobacillus acidocaldarius; identical to SEQ ID NO: 13866
  CDS (1)..(3906): transl_table=11

SEQ ID NO: 16275 - protein, 1301 aa, Alicyclobacillus acidocaldarius; identical to SEQ ID NO: 13867

SEQ ID NO: 16276 - DNA, 1797 bp, Klebsiella oxytoca; identical to SEQ ID NO: 13868
  CDS (1)..(1797): transl_table=11

SEQ ID NO: 16277 - protein, 598 aa, Klebsiella oxytoca; identical to SEQ ID NO: 13869

SEQ ID NO: 16278 - DNA, 1581 bp, Bacillus sp; identical to SEQ ID NO: 13870
  CDS (1)..(1581): transl_table=11

SEQ ID NO: 16279 - protein, 526 aa, Bacillus sp; identical to SEQ ID NO: 13871

SEQ ID NO: 16280 - DNA, 1761 bp, Anoxybacillus flavithermus; identical to SEQ ID NO: 13872
  CDS (1)..(1761): transl_table=11

SEQ ID NO: 16281 - protein, 586 aa, Anoxybacillus flavithermus; identical to SEQ ID NO: 13873

SEQ ID NO: 16282 - DNA, 1749 bp, Thermoactinomyces thalpophilus; identical to SEQ ID NO: 13874
  CDS (1)..(1749): transl_table=11

SEQ ID NO: 16283 - protein, 582 aa, Thermoactinomyces thalpophilus; identical to SEQ ID NO: 13875

SEQ ID NO: 16284 - DNA, 1332 bp, Anaerobranca gottschalkii; identical to SEQ ID NO: 13876
  CDS (1)..(1332): transl_table=11

SEQ ID NO: 16285 - protein, 443 aa, Anaerobranca gottschalkii; identical to SEQ ID NO: 13877

SEQ ID NO: 16286 - DNA, 1740 bp, Aedes albopictus; identical to SEQ ID NO: 13878
  CDS (1)..(1740)

SEQ ID NO: 16287 - protein, 579 aa, Aedes albopictus; identical to SEQ ID NO: 13879

SEQ ID NO: 16288 - DNA, 1170 bp, Aeromonas hydrophila; identical to SEQ ID NO: 13880
  misc_feature (866)..(866): n is a, c, g, or t
  CDS (1)..(1170): transl_table=11

SEQ ID NO: 16289 - protein, 389 aa, Aeromonas hydrophila; identical to SEQ ID NO: 13881
  misc_feature (289)..(289): Xaa can be any naturally occuring amino acid

SEQ ID NO: 16290 - DNA, 1449 bp, Thermoactinomyces vulgaris; identical to SEQ ID NO: 13882
  CDS (1)..(1449): transl_table=11

SEQ ID NO: 16291 - protein, 482 aa, Thermoactinomyces vulgaris; identical to SEQ ID NO: 13883

SEQ ID NO: 16292 - DNA, 1581 bp, Xanthomonas campestris; identical to SEQ ID NO: 13884
  CDS (1)..(1581): transl_table=11

SEQ ID NO: 16293 - protein, 526 aa, Xanthomonas campestris; identical to SEQ ID NO: 13885

SEQ ID NO: 16294 - DNA, 3309 bp, Rhodobacter sphaeroides f; identical to SEQ ID NO: 13886
  CDS (1)..(3309): transl_table=11

SEQ ID NO: 16295 - protein, 1102 aa, Rhodobacter sphaeroides f; identical to SEQ ID NO: 13887

SEQ ID NO: 16296 - DNA, 1548 bp, Ostreococcus tauri; identical to SEQ ID NO: 13888
  CDS (1)..(1548)

SEQ ID NO: 16297 - protein, 515 aa, Ostreococcus tauri; identical to SEQ ID NO: 13889

SEQ ID NO: 16298 - DNA, 1554 bp, uncultured bacterium; identical to SEQ ID NO: 13890
  CDS (1)..(1554)

SEQ ID NO: 16299 - protein, 517 aa, uncultured bacterium; identical to SEQ ID NO: 13891

SEQ ID NO: 16300 - DNA, 2628 bp, Chlamydomonas reinhardtii; identical to SEQ ID NO: 13892
  CDS (1)..(2628)

SEQ ID NO: 16301 - protein, 875 aa, Chlamydomonas reinhardtii; identical to SEQ ID NO: 13893

SEQ ID NO: 16302 - DNA, 1962 bp, Paenibacillus sp; identical to SEQ ID NO: 13894
  CDS (1)..(1962): transl_table=11

SEQ ID NO: 16303 - protein, 653 aa, Paenibacillus sp; identical to SEQ ID NO: 13895

SEQ ID NO: 16304 - DNA, 1548 bp, Halothermothrix orenii; identical to SEQ ID NO: 13896
  CDS (1)..(1548): transl_table=11

SEQ ID NO: 16305 - protein, 515 aa, Halothermothrix orenii; identical to SEQ ID NO: 13897

SEQ ID NO: 16306 - DNA, 1533 bp, Paenibacillus sp; identical to SEQ ID NO: 13898
  CDS (1)..(1533): transl_table=11

SEQ ID NO: 16307 - protein, 510 aa, Paenibacillus sp; identical to SEQ ID NO: 13899

SEQ ID NO: 16308 - DNA, 1767 bp, Bacillus stearothermophilus; identical to SEQ ID NO: 13900
  CDS (1)..(1767): transl_table=11

SEQ ID NO: 16309 - protein, 588 aa, Bacillus stearothermophilus; identical to SEQ ID NO: 13901

SEQ ID NO: 16310 - DNA, 6057 bp, Bacillus stearothermophilus; identical to SEQ ID NO: 13902
  CDS (1)..(6057): transl_table=11

SEQ ID NO: 16311 - protein, 2018 aa, Bacillus stearothermophilus; identical to SEQ ID NO: 13903

SEQ ID NO: 16312 - DNA, 1983 bp, Thermococcus sp; identical to SEQ ID NO: 13904
  CDS (1)..(1983): transl_table=11

SEQ ID NO: 16313 - protein, 660 aa, Thermococcus sp; identical to SEQ ID NO: 13905

SEQ ID NO: 16314 - DNA, 2181 bp, Thermococcus sp; identical to SEQ ID NO: 13906
  CDS (1)..(2181)

SEQ ID NO: 16315 - protein, 726 aa, Thermococcus sp; identical to SEQ ID NO: 13907

SEQ ID NO: 16316 - DNA, 2220 bp, Thermococcus sp; identical to SEQ ID NO: 13908
  CDS (1)..(2220): transl_table=11

SEQ ID NO: 16317 - protein, 739 aa, Thermococcus sp; identical to SEQ ID NO: 13909

SEQ ID NO: 16318 - DNA, 1737 bp, Alicyclobacillus acidocaldarius; identical to SEQ ID NO: 13910
  CDS (1)..(1737): transl_table=11

SEQ ID NO: 16319 - protein, 578 aa, Alicyclobacillus acidocaldarius; identical to SEQ ID NO: 13911

SEQ ID NO: 16320 - DNA, 1548 bp, Paenibacillus polymyxa; identical to SEQ ID NO: 13912
  CDS (1)..(1548): transl_table=11

SEQ ID NO: 16321 - protein, 515 aa, Paenibacillus polymyxa; identical to SEQ ID NO: 13913

SEQ ID NO: 16322 - DNA, 1689 bp, Dictyoglomus thermophilum; identical to SEQ ID NO: 13914
  CDS (1)..(1689): transl_table=11

SEQ ID NO: 16323 - protein, 562 aa, Dictyoglomus thermophilum; identical to SEQ ID NO: 13915

SEQ ID NO: 16324 - DNA, 1497 bp, Dictyoglomus thermophilum; identical to SEQ ID NO: 13916
  CDS (1)..(1497): transl_table=11

SEQ ID NO: 16325 - protein, 498 aa, Dictyoglomus thermophilum; identical to SEQ ID NO: 13917

SEQ ID NO: 16326 - DNA, 1242 bp, Triticum aestivum; identical to SEQ ID NO: 13918
  CDS (1)..(1242)

SEQ ID NO: 16327 - protein, 413 aa, Triticum aestivum; identical to SEQ ID NO: 13919

SEQ ID NO: 16328 - DNA, 1761 bp, Bacillus acidopullulyticus; identical to SEQ ID NO: 13920
  CDS (1)..(1761): transl_table=11

SEQ ID NO: 16329 - protein, 586 aa, Bacillus acidopullulyticus; identical to SEQ ID NO: 13921

SEQ ID NO: 16330 - DNA, 1563 bp, Bacillus megaterium; identical to SEQ ID NO: 13922
  CDS (1)..(1563): transl_table=11

SEQ ID NO: 16331 - protein, 520 aa, Bacillus megaterium; identical to SEQ ID NO: 13923

SEQ ID NO: 16332 - DNA, 4428 bp, Thermoanaerobacter thermohydrosulfuricus; identical to SEQ ID NO: 13924
  CDS (1)..(4428): transl_table=11

SEQ ID NO: 16333 - protein, 1475 aa, Thermoanaerobacter thermohydrosulfuricus; identical to SEQ ID NO: 13925

SEQ ID NO: 16334 - DNA, 1776 bp, Bacillus sphaericus; identical to SEQ ID NO: 13926
  CDS (1)..(1776): transl_table=11

SEQ ID NO: 16335 - protein, 591 aa, Bacillus sphaericus; identical to SEQ ID NO: 13927

SEQ ID NO: 16336 - DNA, 1725 bp, Thermoanaerobacter ethanolicus; identical to SEQ ID NO: 13928
  CDS (1)..(1725): transl_table=11

SEQ ID NO: 16337 - protein, 574 aa, Thermoanaerobacter ethanolicus; identical to SEQ ID NO: 13929

SEQ ID NO: 16338 - DNA, 1761 bp, Drosophila virilis; identical to SEQ ID NO: 13930
  CDS (1)..(1761)

SEQ ID NO: 16339 - protein, 586 aa, Drosophila virilis; identical to SEQ ID NO: 13931

SEQ ID NO: 16340 - DNA, 1329 bp, Thermotoga neapolitana; identical to SEQ ID NO: 13932
  CDS (1)..(1329): transl_table=11

SEQ ID NO: 16341 - protein, 442 aa, Thermotoga neapolitana; identical to SEQ ID NO: 13933

SEQ ID NO: 16342 - DNA, 2001 bp, Thermoactinomyces vulgaris; identical to SEQ ID NO: 13934
  CDS (1)..(2001): transl_table=11

SEQ ID NO: 16343 - protein, 666 aa, Thermoactinomyces vulgaris; identical to SEQ ID NO: 13935

SEQ ID NO: 16344 - DNA, 1758 bp, Thermoactinomyces vulgaris; identical to SEQ ID NO: 13936
  CDS (1)..(1758): transl_table=11

SEQ ID NO: 16345 - protein, 585 aa, Thermoactinomyces vulgaris; identical to SEQ ID NO: 13937

SEQ ID NO: 16346 - DNA, 24 bp, Artificial sequence
  Primer sequence
atgatgttaaatgcatggcacctg

SEQ ID NO: 16347 - DNA, 24 bp, Artificial sequence
  Primer sequence
ttagttcatccataccgtagccga

SEQ ID NO: 16348 - protein, 917 aa, Artificial sequence; identical to SEQ ID NO: 13940
  Consensus
  Variant (2)..(2): Xaa in position 2 is any amino acid
  Variant (6)..(6): Xaa in position 6 is any amino acid
  Variant (15)..(16): Xaa in position 15 to 16 is any amino acid
  Variant (18)..(18): Xaa in position 18 is any amino acid
  Variant (22)..(22): Xaa in position 22 is any amino acid
  Variant (25)..(25): Xaa in position 25 is any amino acid
  Variant (26)..(85): Xaa in position 26 to 85 is any or no amino acid
  Variant (89)..(89): Xaa in position 89 is any amino acid
  Variant (93)..(93): Xaa in position 93 is any amino acid
  Variant (99)..(99): Xaa in position 99 is any amino acid
  Variant (101)..(108): Xaa in position 101 to 108 is any or no amino acid
  Variant (112)..(112): Xaa in position 112 is any amino acid
  Variant (117)..(117): Xaa in position 117 is any amino acid
  Variant (121)..(121): Xaa in position 121 is any amino acid
  Variant (124)..(125): Xaa in position 124 to 125 is any amino acid
  Variant (126)..(152): Xaa in position 126 to 152 is any or no amino acid
  Variant (158)..(158): Xaa in position 158 is any amino acid
  Variant (161)..(162): Xaa in position 161 to 162 is any amino acid
  Variant (166)..(166): Xaa in position 166 is any amino acid
  Variant (171)..(171): Xaa in position 171 is any amino acid
  Variant (174)..(175): Xaa in position 174 to 175 is any amino acid
  Variant (178)..(179): Xaa in position 178 to 179 is any amino acid
  Variant (182)..(182): Xaa in position 182 is any amino acid
  Variant (186)..(189): Xaa in position 186 to 189 is any or no amino acid
  Variant (195)..(195): Xaa in position 195 is any amino acid
  Variant (197)..(197): Xaa in position 197 is any amino acid
  Variant (203)..(203): Xaa in position 203 is any amino acid
  Variant (205)..(205): Xaa in position 205 is any amino acid
  Variant (208)..(208): Xaa in position 208 is any amino acid
  Variant (211)..(214): Xaa in position 211 to 214 is any amino acid
  Variant (215)..(256): Xaa in position 215 to 256 is any or no amino acid
  Variant (258)..(258): Xaa in position 258 is any or no amino acid
  Variant (266)..(266): Xaa in position 266 is any or no amino acid
  Variant (268)..(269): Xaa in position 268 to 269 is any amino acid
  Variant (270)..(394): Xaa in position 270 to 394 is any or no amino acid
  Variant (397)..(399): Xaa in position 397 to 399 is any or no amino acid
  Variant (401)..(402): Xaa in position 401 to 402 is any amino acid
  Variant (403)..(404): Xaa in position 403 to 404 is any or no amino acid
  Variant (413)..(413): Xaa in position 413 is any amino acid
  Variant (415)..(417): Xaa in position 415 to 417 is any amino acid
  Variant (420)..(420): Xaa in position 420 is any amino acid
  Variant (421)..(426): Xaa in position 421 to 426 is any or no amino acid
  Variant (433)..(433): Xaa in position 433 is any amino acid
  Variant (434)..(434): Xaa in position 434 is any or no amino acid
  Variant (436)..(441): Xaa in position 436 to 441 is any or no amino acid
  Variant (449)..(449): Xaa in position 449 is any amino acid
  Variant (451)..(452): Xaa in position 451 to 452 is any amino acid
  Variant (454)..(458): Xaa in position 454 to 458 is any amino acid
  Variant (459)..(487): Xaa in position 459 to 487 is any or no amino acid
  Variant (489)..(490): Xaa in position 489 to 490 is any amino acid
  Variant (492)..(495): Xaa in position 492 to 495 is any amino acid
  Variant (498)..(498): Xaa in position 498 is any amino acid
  Variant (504)..(509): Xaa in position 504 to 509 is any amino acid
  Variant (510)..(529): Xaa in position 510 to 529 is any or no amino acid
  Variant (532)..(534): Xaa in position 532 to 534 is any amino acid
  Variant (535)..(538): Xaa in position 535 to 538 is any or no amino acid
  Variant (540)..(544): Xaa in position 540 to 544 is any amino acid
  Variant (547)..(554): Xaa in position 547 to 554 is any amino acid
  Variant (555)..(592): Xaa in position 555 to 592 is any or no amino acid
  Variant (594)..(607): Xaa in position 594 to 607 is any amino acid
  Variant (608)..(611): Xaa in position 608 to 611 is any or no amino acid
  Variant (613)..(613): Xaa in position 613 is any amino acid
  Variant (617)..(618): Xaa in position 617 to 618 is any amino acid
  Variant (620)..(620): Xaa in position 620 is any amino acid
  Variant (623)..(623): Xaa in position 623 is any amino acid
  Variant (625)..(627): Xaa in position 625 to 627 is any amino acid
  Variant (628)..(667): Xaa in position 628 to 667 is any or no amino acid
  Variant (672)..(674): Xaa in position 672 to 674 is any amino acid
  Variant (684)..(684): Xaa in position 684 is any amino acid
  Variant (694)..(697): Xaa in position 694 to 697 is any amino acid
  Variant (698)..(737): Xaa in position 698 to 737 is any or no amino acid
  Variant (739)..(739): Xaa in position 739 is any amino acid
  Variant (740)..(740): Xaa in position 740 is any or no amino acid
  Variant (742)..(742): Xaa in position 742 is any or no amino acid
  Variant (745)..(745): Xaa in position 745 is any or no amino acid
  Variant (747)..(750): Xaa in position 747 to 750 is any amino acid
  Variant (752)..(797): Xaa in position 752 to 797 is any or no amino acid
  Variant (801)..(801): Xaa in position 801 is any amino acid
  Variant (803)..(803): Xaa in position 803 is any amino acid
  Variant (805)..(805): Xaa in position 805 is any amino acid
  Variant (808)..(808): Xaa in position 808 is any amino acid
  Variant (812)..(814): Xaa in position 812 to 814 is any amino acid
  Variant (817)..(817): Xaa in position 817 is any amino acid
  Variant (818)..(818): Xaa in position 818 is any or no amino acid
  Variant (820)..(827): Xaa in position 820 to 827 is any amino acid
  Variant (828)..(840): Xaa in position 828 to 840 is any or no amino acid
  Variant (845)..(845): Xaa in position 845 is any amino acid
  Variant (847)..(850): Xaa in position 847 to 850 is any amino acid
  Variant (852)..(852): Xaa in position 852 is any amino acid
  Variant (857)..(857): Xaa in position 857 is any amino acid
  Variant (859)..(864): Xaa in position 859 to 864 is any amino acid
  Variant (865)..(886): Xaa in position 865 to 886 is any or no amino acid
  Variant (888)..(898): Xaa in position 888 to 898 is any amino acid
  Variant (899)..(909): Xaa in position 899 to 909 is any or no amino acid
  Variant (911)..(915): Xaa in position 911 to 915 is any amino acid
  Variant (916)..(916): Xaa in position 916 is any or no amino acid

SEQ ID NO: 16349 - protein, 8 aa, Artificial sequence
  Consensus
  Variant (2)..(2): Xaa in position 2 is Glu or Gln
  Variant (3)..(3): Xaa in position 3 is Ile, Leu or Val
  Variant (4)..(7): Xaa in position 4 to 7 is any amino acid
YXXXXXXF

SEQ ID NO: 16350 - protein, 72 aa, Artificial sequence; identical to SEQ ID NO: 13942
  Consensus
  Variant (2)..(12): Xaa in position 2 to 12 is any amino acid
  Variant (14)..(16): Xaa in position 14 to 16 is any amino acid
  Variant (17)..(17): Xaa in position 17 is Phe, Ile, Leu, Met or Val
  Variant (18)..(18): Xaa in position 18 is Trp or Tyr
  Variant (19)..(19): Xaa in position 19 is Phe, Ile, Leu, Met or Val
  Variant (20)..(20): Xaa in position 20 is any amino acid
  Variant (22)..(30): Xaa in position 22 to 30 is any amino acid
  Variant (31)..(31): Xaa in position 31 is any or no amino acid
  Variant (33)..(35): Xaa in position 33 to 35 is any amino acid
  Variant (36)..(36): Xaa in position 36 is Asp, Glu, Asn or Thr
  Variant (37)..(39): Xaa in position 37 to 39 is any amino acid
  Variant (40)..(40): Xaa in position 40 is Phe, Ile, Leu or Val
  Variant (41)..(44): Xaa in position 41 to 44 is any amino acid
  Variant (46)..(52): Xaa in position 46 to 52 is any amino acid
  Variant (53)..(53): Xaa in position 53 is Phe, Leu, Met or Val
  Variant (54)..(61): Xaa in position 54 to 61 is any amino acid
  Variant (62)..(62): Xaa in position 62 is Phe, Ile, Leu, Met or Val
  Variant (63)..(63): Xaa in position 63 is any amino acid
  Variant (64)..(64): Xaa in position 64 is Ile, Leu or Val
  Variant (65)..(66): Xaa in position 65 to 66 is any amino acid
  Variant (67)..(67): Xaa in position 67 is Asp or Glu
  Variant (68)..(71): Xaa in position 68 to 71 is any amino acid

SEQ ID NO: 16351 - protein, 14 aa, Artificial sequence
  Consensus
  Variant (2)..(6): Xaa in position 2 to 6 is any amino acid
  Variant (7)..(8): Xaa in position 7 to 8 is any or no amino acid
  Variant (10)..(10): Xaa in position 10 is Ala or Gly
  Variant (11)..(11): Xaa in position 11 is any amino acid
  Variant (13)..(13): Xaa in position 13 is Phe, Ile, Leu, Met or Val
WXXXXXXXDXXRXD

SEQ ID NO: 16352 - protein, 12 aa, Artificial sequence
  Consensus
  Variant (2)..(2): Xaa in position 2 is any amino acid
  Variant (3)..(3): Xaa in position 3 is Ala, Ile, Pro or Val
  Variant (4)..(5): Xaa in position 4 to 5 is any amino acid
  Variant (7)..(7): Xaa in position 7 is any amino acid
  Variant (9)..(9): Xaa in position 9 is Asp, Glu, Gly, Asn, Gln, Ser or Thr
  Variant (11)..(11): Xaa in position 11 is any amino acid
GXXXXYXGXEXG

SEQ ID NO: 16353 - DNA, 1203 bp, Escherichia coli; identical to SEQ ID NO: 13945
  CDS (1)..(1203)

SEQ ID NO: 16354 - protein, 400 aa, Escherichia coli; identical to SEQ ID NO: 13946

SEQ ID NO: 16355 - DNA, 1281 bp, Aquifex aeolicus VF5; identical to SEQ ID NO: 13947
  CDS (1)..(1281): transl_table=11

SEQ ID NO: 16356 - protein, 426 aa, Aquifex aeolicus VF5; identical to SEQ ID NO: 13948

SEQ ID NO: 16357 - DNA, 1260 bp, Neisseria meningitidis Z2491; identical to SEQ ID NO: 13949
  CDS (1)..(1260): transl_table=11

SEQ ID NO: 16358 - protein, 419 aa, Neisseria meningitidis Z2491; identical to SEQ ID NO: 13950

SEQ ID NO: 16359 - DNA, 1425 bp, Deinococcus radiodurans R1; identical to SEQ ID NO: 13951
  CDS (1)..(1425): transl_table=11

SEQ ID NO: 16360 - protein, 474 aa, Deinococcus radiodurans R1; identical to SEQ ID NO: 13952

SEQ ID NO: 16361 - DNA, 1392 bp, Mycobacterium tuberculosis CDC1551; identical to SEQ ID NO: 13953
  CDS (1)..(1392): transl_table=11

SEQ ID NO: 16362 - protein, 463 aa, Mycobacterium tuberculosis CDC1551; identical to SEQ ID NO: 13954

SEQ ID NO: 16363 - DNA, 1203 bp, Salmonella typhimurium LT2; identical to SEQ ID NO: 13955
  CDS (1)..(1203): transl_table=11

SEQ ID NO: 16364 - protein, 400 aa, Salmonella typhimurium LT2; identical to SEQ ID NO: 13956

SEQ ID NO: 16365 - DNA, 1320 bp, Agrobacterium tumefaciens str. C58; identical to SEQ ID NO: 13957
  CDS (1)..(1320): transl_table=11

SEQ ID NO: 16366 - protein, 439 aa, Agrobacterium tumefaciens str. C58; identical to SEQ ID NO: 13958

SEQ ID NO: 16367 - DNA, 1251 bp, Yersinia pestis KIM; identical to SEQ ID NO: 13959
  CDS (1)..(1251): transl_table=11

SEQ ID NO: 16368 - protein, 416 aa, Yersinia pestis KIM; identical to SEQ ID NO: 13960

SEQ ID NO: 16369 - DNA, 1314 bp, Thermosynechococcus elongatus BP-1; identical to SEQ ID NO: 13961
  CDS (1)..(1314): transl_table=11

SEQ ID NO: 16370 - protein, 437 aa, Thermosynechococcus elongatus BP-1; identical to SEQ ID NO: 13962

SEQ ID NO: 16371 - DNA, 1464 bp, Oceanobacillus iheyensis HTE831; identical to SEQ ID NO: 13963
  CDS (1)..(1464): transl_table=11

SEQ ID NO: 16372 - protein, 487 aa, Oceanobacillus iheyensis HTE831; identical to SEQ ID NO: 13964

SEQ ID NO: 16373 - DNA, 1209 bp, Pseudomonas putida KT2440; identical to SEQ ID NO: 13965
  CDS (1)..(1209): transl_table=11

SEQ ID NO: 16374 - protein, 402 aa, Pseudomonas putida KT2440; identical to SEQ ID NO: 13966

SEQ ID NO: 16375 - DNA, 1305 bp, Bradyrhizobium japonicum USDA 110; identical to SEQ ID NO: 13967
  CDS (1)..(1305)

SEQ ID NO: 16376 - protein, 434 aa, Bradyrhizobium japonicum USDA 110; identical to SEQ ID NO: 13968

SEQ ID NO: 16377 - DNA, 1434 bp, Lactobacillus plantarum WCFS1; identical to SEQ ID NO: 13969
  CDS (1)..(1434): transl_table=11

SEQ ID NO: 16378 - protein, 477 aa, Lactobacillus plantarum WCFS1; identical to SEQ ID NO: 13970

SEQ ID NO: 16379 - DNA, 1203 bp, Salmonella enterica subsp. enterica serovar Typhi Ty2; identical to SEQ ID NO: 13971
  CDS (1)..(1203): transl_table=11

SEQ ID NO: 16380 - protein, 400 aa, Salmonella enterica subsp. enterica serovar Typhi Ty2; identical to SEQ ID NO: 13972

SEQ ID NO: 16381 - DNA, 1170 bp, Bacteroides thetaiotaomicron VPI-5482; identical to SEQ ID NO: 13973
  CDS (1)..(1170): transl_table=11

SEQ ID NO: 16382 - protein, 389 aa, Bacteroides thetaiotaomicron VPI-5482; identical to SEQ ID NO: 13974

SEQ ID NO: 16383 - DNA, 1407 bp, Coxiella burnetii RSA 493; identical to SEQ ID NO: 13975
  CDS (1)..(1407): transl_table=11

SEQ ID NO: 16384 - protein, 468 aa, Coxiella burnetii RSA 493; identical to SEQ ID NO: 13976

SEQ ID NO: 16385 - DNA, 1185 bp, Porphyromonas gingivalis W83; identical to SEQ ID NO: 13977
  CDS (1)..(1185): transl_table=11

SEQ ID NO: 16386 - protein, 394 aa, Porphyromonas gingivalis W83; identical to SEQ ID NO: 13978

SEQ ID NO: 16387 - DNA, 1608 bp, Oryza sativa (japonica cultivar-group); identical to SEQ ID NO: 13979
  CDS (1)..(1608)

SEQ ID NO: 16388 - protein, 535 aa, Oryza sativa (japonica cultivar-group); identical to SEQ ID NO: 13980

SEQ ID NO: 16389 - DNA, 1446 bp, Geobacter sulfurreducens PCA; identical to SEQ ID NO: 13981
  CDS (1)..(1446): transl_table=11

SEQ ID NO: 16390 - protein, 481 aa, Geobacter sulfurreducens PCA; identical to SEQ ID NO: 13982

SEQ ID NO: 16391 - DNA, 1437 bp, Treponema denticola ATCC 35405; identical to SEQ ID NO: 13983
  CDS (1)..(1437): transl_table=11

SEQ ID NO: 16392 - protein, 478 aa, Treponema denticola ATCC 35405; identical to SEQ ID NO: 13984

SEQ ID NO: 16393 - DNA, 1293 bp, Eremothecium gossypii; identical to SEQ ID NO: 13985
  CDS (1)..(1293)

SEQ ID NO: 16394 - protein, 430 aa, Eremothecium gossypii; identical to SEQ ID NO: 13986

SEQ ID NO: 16395 - DNA, 1434 bp, Neurospora crassa; identical to SEQ ID NO: 13987
  CDS (1)..(1434)

SEQ ID NO: 16396 - protein, 477 aa, Neurospora crassa; identical to SEQ ID NO: 13988

SEQ ID NO: 16397 - DNA, 5916 bp, Magnaporthe grisea 70-15; identical to SEQ ID NO: 13989
  CDS (1)..(5916)

SEQ ID NO: 16398 - protein, 1971 aa, Magnaporthe grisea 70-15; identical to SEQ ID NO: 13990

SEQ ID NO: 16399 - DNA, 1380 bp, Gibberella zeae PH-1; identical to SEQ ID NO: 13991
  CDS (1)..(1380)

SEQ ID NO: 16400 - protein, 459 aa, Gibberella zeae PH-1; identical to SEQ ID NO: 13992

SEQ ID NO: 16401 - DNA, 1839 bp, Ustilago maydis 521; identical to SEQ ID NO: 13993
  CDS (1)..(1839)

SEQ ID NO: 16402 - protein, 612 aa, Ustilago maydis 521; identical to SEQ ID NO: 13994

SEQ ID NO: 16403 - DNA, 1464 bp, Aspergillus nidulans FGSC A4; identical to SEQ ID NO: 13995
  CDS (1)..(1464)

SEQ ID NO: 16404 - protein, 487 aa, Aspergillus nidulans FGSC A4; identical to SEQ ID NO: 13996

SEQ ID NO: 16405 - DNA, 1296 bp, Candida glabrata CBS138; identical to SEQ ID NO: 13997
  CDS (1)..(1296)

SEQ ID NO: 16406 - protein, 431 aa, Candida glabrata CBS138; identical to SEQ ID NO: 13998

SEQ ID NO: 16407 - DNA, 1284 bp, Kluyveromyces lactis NRRL Y-1140; identical to SEQ ID NO: 13999
  CDS (1)..(1284)

SEQ ID NO: 16408 - protein, 427 aa, Kluyveromyces lactis NRRL Y-1140; identical to SEQ ID NO: 14000

SEQ ID NO: 16409 - DNA, 1269 bp, Debaryomyces hansenii CBS767; identical to SEQ ID NO: 14001
  CDS (1)..(1269)

SEQ ID NO: 16410 - protein, 422 aa, Debaryomyces hansenii CBS767; identical to SEQ ID NO: 14002

SEQ ID NO: 16411 - DNA, 1245 bp, Yarrowia lipolytica CLIB99; identical to SEQ ID NO: 14003
  CDS (1)..(1245)

SEQ ID NO: 16412 - protein, 414 aa, Yarrowia lipolytica CLIB99; identical to SEQ ID NO: 14004

SEQ ID NO: 16413 - DNA, 1362 bp, Cryptococcus neoformans var. neoformans JEC21; identical to SEQ ID NO: 14005
  CDS (1)..(1362)

SEQ ID NO: 16414 - protein, 453 aa, Cryptococcus neoformans var. neoformans JEC21; identical to SEQ ID NO: 14006

SEQ ID NO: 16415 - DNA, 1173 bp, Entamoeba histolytica HM-1:IMSS; identical to SEQ ID NO: 14007
  CDS (1)..(1173)

SEQ ID NO: 16416 - protein, 390 aa, Entamoeba histolytica HM-1:IMSS; identical to SEQ ID NO: 14008

SEQ ID NO: 16417 - DNA, 1266 bp, Candida albicans SC5314; identical to SEQ ID NO: 14009
  CDS (1)..(1266): transl_table=12

SEQ ID NO: 16418 - protein, 421 aa, Candida albicans SC5314; identical to SEQ ID NO: 14010

SEQ ID NO: 16419 - DNA, 1305 bp, Bartonella quintana str. Toulouse; identical to SEQ ID NO: 14011
  CDS (1)..(1305): transl_table=11

SEQ ID NO: 16420 - protein, 434 aa, Bartonella quintana str. Toulouse; identical to SEQ ID NO: 14012

SEQ ID NO: 16421 - DNA, 1305 bp, Bartonella henselae str. Houston-1; identical to SEQ ID NO: 14013
  CDS (1)..(1305): transl_table=11

SEQ ID NO: 16422 - protein, 434 aa, Bartonella henselae str. Houston-1; identical to SEQ ID NO: 14014

SEQ ID NO: 16423 - DNA, 1470 bp, Bacillus licheniformis ATCC 14580; identical to SEQ ID NO: 14015
  CDS (1)..(1470): transl_table=11

SEQ ID NO: 16424 - protein, 489 aa, Bacillus licheniformis ATCC 14580; identical to SEQ ID NO: 14016

SEQ ID NO: 16425 - DNA, 1167 bp, Bacteroides fragilis YCH46; identical to SEQ ID NO: 14017
  CDS (1)..(1167): transl_table=11

SEQ ID NO: 16426 - protein, 388 aa, Bacteroides fragilis YCH46; identical to SEQ ID NO: 14018

SEQ ID NO: 16427 - DNA, 1350 bp, Methylococcus capsulatus str. Bath; identical to SEQ ID NO: 14019
  CDS (1)..(1350): transl_table=11

SEQ ID NO: 16428 - protein, 449 aa, Methylococcus capsulatus str. Bath; identical to SEQ ID NO: 14020

SEQ ID NO: 16429 - DNA, 1317 bp, Nocardia farcinica IFM 10152; identical to SEQ ID NO: 14021
  CDS (1)..(1317): transl_table=11

SEQ ID NO: 16430 - protein, 438 aa, Nocardia farcinica IFM 10152; identical to SEQ ID NO: 14022

SEQ ID NO: 16431 - DNA, 1404 bp, Legionella pneumophila str. Paris; identical to SEQ ID NO: 14023
  CDS (1)..(1404): transl_table=11

SEQ ID NO: 16432 - protein, 467 aa, Legionella pneumophila str. Paris; identical to SEQ ID NO: 14024

SEQ ID NO: 16433 - DNA, 1404 bp, Legionella pneumophila str. Lens; identical to SEQ ID NO: 14025
  CDS (1)..(1404): transl_table=11

SEQ ID NO: 16434 - protein, 467 aa, Legionella pneumophila str. Lens; identical to SEQ ID NO: 14026

SEQ ID NO: 16435 - DNA, 1473 bp, Geobacillus kaustophilus HTA426; identical to SEQ ID NO: 14027
  CDS (1)..(1473): transl_table=11

SEQ ID NO: 16436 - protein, 490 aa, Geobacillus kaustophilus HTA426; identical to SEQ ID NO: 14028

SEQ ID NO: 16437 - DNA, 1347 bp, Idiomarina loihiensis L2TR; identical to SEQ ID NO: 14029
  CDS (1)..(1347): transl_table=11

SEQ ID NO: 16438 - protein, 448 aa, Idiomarina loihiensis L2TR; identical to SEQ ID NO: 14030

SEQ ID NO: 16439 - DNA, 1344 bp, Silicibacter pomeroyi DSS-3; identical to SEQ ID NO: 14031
  CDS (1)..(1344): transl_table=11

SEQ ID NO: 16440 - protein, 447 aa, Silicibacter pomeroyi DSS-3; identical to SEQ ID NO: 14032

SEQ ID NO: 16441 - DNA, 1260 bp, Neisseria gonorrhoeae FA 1090; identical to SEQ ID NO: 14033
  CDS (1)..(1260): transl_table=11

SEQ ID NO: 16442 - protein, 419 aa, Neisseria gonorrhoeae FA 1090; identical to SEQ ID NO: 14034

SEQ ID NO: 16443 - DNA, 1167 bp, Bacteroides fragilis NCTC 9343; identical to SEQ ID NO: 14035
  CDS (1)..(1167): transl_table=11

SEQ ID NO: 16444 - protein, 388 aa, Bacteroides fragilis NCTC 9343; identical to SEQ ID NO: 14036

SEQ ID NO: 16445 - DNA, 1251 bp, Salmonella enterica subsp. enterica serovar Choleraesuis str; identical to SEQ ID NO: 14037
  CDS (1)..(1251): transl_table=11

SEQ ID NO: 16446 - protein, 416 aa, Salmonella enterica subsp. enterica serovar Choleraesuis str; identical to SEQ ID NO: 14038

SEQ ID NO: 16447 - DNA, 1224 bp, Pseudomonas syringae pv. syringae B728a; identical to SEQ ID NO: 14039
  CDS (1)..(1224)

SEQ ID NO: 16448 - protein, 407 aa, Pseudomonas syringae pv. syringae B728a; identical to SEQ ID NO: 14040

SEQ ID NO: 16449 - DNA, 1326 bp, Corynebacterium jeikeium K411; identical to SEQ ID NO: 14041
  CDS (1)..(1326): transl_table=11

SEQ ID NO: 16450 - protein, 441 aa, Corynebacterium jeikeium K411; identical to SEQ ID NO: 14042

SEQ ID NO: 16451 - DNA, 1293 bp, Rhodobacter sphaeroides 2.4.1; identical to SEQ ID NO: 14043
  CDS (1)..(1293)

SEQ ID NO: 16452 - protein, 430 aa, Rhodobacter sphaeroides 2.4.1; identical to SEQ ID NO: 14044

SEQ ID NO: 16453 - DNA, 1134 bp, Xylella fastidiosa Ann-1; identical to SEQ ID NO: 14045
  CDS (1)..(1134)

SEQ ID NO: 16454 - protein, 377 aa, Xylella fastidiosa Ann-1; identical to SEQ ID NO: 14046

SEQ ID NO: 16455 - DNA, 1464 bp, Leuconostoc mesenteroides subsp. mesenteroides ATCC 8293; identical to SEQ ID NO: 14047
  CDS (1)..(1464)

SEQ ID NO: 16456 - protein, 487 aa, Leuconostoc mesenteroides subsp. mesenteroides ATCC 8293; identical to SEQ ID NO: 14048

SEQ ID NO: 16457 - DNA, 1242 bp, Psychrobacter sp. 273-4; identical to SEQ ID NO: 14049
  CDS (1)..(1242)

SEQ ID NO: 16458 - protein, 413 aa, Psychrobacter sp. 273-4; identical to SEQ ID NO: 14050

SEQ ID NO: 16459 - DNA, 1179 bp, Ralstonia eutropha JMP134; identical to SEQ ID NO: 14051
  CDS (1)..(1179)

SEQ ID NO: 16460 - protein, 392 aa, Ralstonia eutropha JMP134; identical to SEQ ID NO: 14052

SEQ ID NO: 16461 - DNA, 1200 bp, Burkholderia cepacia R18194; identical to SEQ ID NO: 14053
  CDS (1)..(1200)

SEQ ID NO: 16462 - protein, 399 aa, Burkholderia cepacia R18194; identical to SEQ ID NO: 14054

SEQ ID NO: 16463 - DNA, 1224 bp, Pseudomonas fluorescens PfO-1; identical to SEQ ID NO: 14055
  CDS (1)..(1224)

SEQ ID NO: 16464 - protein, 407 aa, Pseudomonas fluorescens PfO-1; identical to SEQ ID NO: 14056

SEQ ID NO: 16465 - DNA, 1197 bp, Burkholderia fungorum LB400; identical to SEQ ID NO: 14057
  CDS (1)..(1197)

SEQ ID NO: 16466 - protein, 398 aa, Burkholderia fungorum LB400; identical to SEQ ID NO: 14058

SEQ ID NO: 16467 - DNA, 1428 bp, Oenococcus oeni PSU-1; identical to SEQ ID NO: 14059
  CDS (1)..(1428)

SEQ ID NO: 16468 - protein, 475 aa, Oenococcus oeni PSU-1; identical to SEQ ID NO: 14060

SEQ ID NO: 16469 - DNA, 1380 bp, Trichodesmium erythraeum IMS101; identical to SEQ ID NO: 14061
  CDS (1)..(1380)

SEQ ID NO: 16470 - protein, 459 aa, Trichodesmium erythraeum IMS101; identical to SEQ ID NO: 14062

SEQ ID NO: 16471 - DNA, 1434 bp, Campylobacter upsaliensis RM3195; identical to SEQ ID NO: 14063
  CDS (1)..(1434): transl_table=11

SEQ ID NO: 16472 - protein, 477 aa, Campylobacter upsaliensis RM3195; identical to SEQ ID NO: 14064

SEQ ID NO: 16473 - DNA, 1488 bp, Lactococcus lactis subsp. cremoris SK11; identical to SEQ ID NO: 14065
  CDS (1)..(1488)

SEQ ID NO: 16474 - protein, 495 aa, Lactococcus lactis subsp. cremoris SK11; identical to SEQ ID NO: 14066

SEQ ID NO: 16475 - DNA, 1461 bp, Deinococcus geothermalis DSM 11300; identical to SEQ ID NO: 14067
  CDS (1)..(1461): transl_table=11

SEQ ID NO: 16476 - protein, 486 aa, Deinococcus geothermalis DSM 11300; identical to SEQ ID NO: 14068

SEQ ID NO: 16477 - DNA, 1359 bp, Azotobacter vinelandii AvOP; identical to SEQ ID NO: 14069
  CDS (1)..(1359): transl_table=11

SEQ ID NO: 16478 - protein, 452 aa, Azotobacter vinelandii AvOP; identical to SEQ ID NO: 14070

SEQ ID NO: 16479 - DNA, 1356 bp, Burkholderia vietnamiensis G4; identical to SEQ ID NO: 14071
  CDS (1)..(1356): transl_table=11

SEQ ID NO: 16480 - protein, 451 aa, Burkholderia vietnamiensis G4; identical to SEQ ID NO: 14072

SEQ ID NO: 16481 - DNA, 1200 bp, Burkholderia mallei 10229; identical to SEQ ID NO: 14073
  CDS (1)..(1200)

SEQ ID NO: 16482 - protein, 399 aa, Burkholderia mallei 10229; identical to SEQ ID NO: 14074

SEQ ID NO: 16483 - DNA, 1200 bp, Burkholderia cenocepacia AU 1054; identical to SEQ ID NO: 14075
  CDS (1)..(1200): transl_table=11

SEQ ID NO: 16484 - protein, 399 aa, Burkholderia cenocepacia AU 1054; identical to SEQ ID NO: 14076

SEQ ID NO: 16485 - DNA, 1356 bp, Burkholderia pseudomallei 1655; identical to SEQ ID NO: 14077
  CDS (1)..(1356)

SEQ ID NO: 16486 - protein, 451 aa, Burkholderia pseudomallei 1655; identical to SEQ ID NO: 14078

SEQ ID NO: 16487 - DNA, 1173 bp, Chromohalobacter salexigens DSM 3043; identical to SEQ ID NO: 14079
  CDS (1)..(1173): transl_table=11

SEQ ID NO: 16488 - protein, 390 aa, Chromohalobacter salexigens DSM 3043; identical to SEQ ID NO: 14080

SEQ ID NO: 16489 - DNA, 1356 bp, Burkholderia pseudomallei 668; identical to SEQ ID NO: 14081
  CDS (1)..(1356)

SEQ ID NO: 16490 - protein, 451 aa, Burkholderia pseudomallei 668; identical to SEQ ID NO: 14082

SEQ ID NO: 16491 - DNA, 1269 bp, Polaromonas sp. JS666; identical to SEQ ID NO: 14083
  CDS (1)..(1269): transl_table=11

SEQ ID NO: 16492 - protein, 422 aa, Polaromonas sp. JS666; identical to SEQ ID NO: 14084

SEQ ID NO: 16493 - DNA, 1341 bp, Crocosphaera watsonii WH 8501; identical to SEQ ID NO: 14085
  CDS (1)..(1341): transl_table=11

SEQ ID NO: 16494 - protein, 446 aa, Crocosphaera watsonii WH 8501; identical to SEQ ID NO: 14086

SEQ ID NO: 16495 - DNA, 1431 bp, Geobacter metallireducens GS-15; identical to SEQ ID NO: 14087
  CDS (1)..(1431): transl_table=11

SEQ ID NO: 16496 - protein, 476 aa, Geobacter metallireducens GS-15; identical to SEQ ID NO: 14088

SEQ ID NO: 16497 - DNA, 1206 bp, Methanosarcina barkeri str. fusaro; identical to SEQ ID NO: 14089
  CDS (1)..(1206): transl_table=11

SEQ ID NO: 16498 - protein, 401 aa, Methanosarcina barkeri str. fusaro; identical to SEQ ID NO: 14090

SEQ ID NO: 16499 - DNA, 1206 bp, Desulfuromonas acetoxidans DSM 684; identical to SEQ ID NO: 14091
  CDS (1)..(1206): transl_table=11

SEQ ID NO: 16500 - protein, 401 aa, Desulfuromonas acetoxidans DSM 684; identical to SEQ ID NO: 14092

SEQ ID NO: 16501 - DNA, 1293 bp, Jannaschia sp. CCS1; identical to SEQ ID NO: 14093
  CDS (1)..(1293): transl_table=11

SEQ ID NO: 16502 - protein, 430 aa, Jannaschia sp. CCS1; identical to SEQ ID NO: 14094

SEQ ID NO: 16503 - DNA, 1458 bp, Desulfitobacterium hafniense DCB-2; identical to SEQ ID NO: 14095
  CDS (1)..(1458): transl_table=11

SEQ ID NO: 16504 - protein, 485 aa, Desulfitobacterium hafniense DCB-2; identical to SEQ ID NO: 14096

SEQ ID NO: 16505 - DNA, 1218 bp, Methanococcoides burtonii DSM 6242; identical to SEQ ID NO: 14097
  CDS (1)..(1218): transl_table=11

SEQ ID NO: 16506 - protein, 405 aa, Methanococcoides burtonii DSM 6242; identical to SEQ ID NO: 14098

SEQ ID NO: 16507 - DNA, 1575 bp, Frankia sp. EAN1pec; identical to SEQ ID NO: 14099
  CDS (1)..(1575): transl_table=11

SEQ ID NO: 16508 - protein, 524 aa, Frankia sp. EAN1pec; identical to SEQ ID NO: 14100

SEQ ID NO: 16509 - DNA, 1200 bp, Ralstonia metallidurans CH34; identical to SEQ ID NO: 14101
  CDS (1)..(1200): transl_table=11

SEQ ID NO: 16510 - protein, 399 aa, Ralstonia metallidurans CH34; identical to SEQ ID NO: 14102

SEQ ID NO: 16511 - DNA, 1341 bp, Magnetococcus sp. MC-1; identical to SEQ ID NO: 14103
  CDS (1)..(1341): transl_table=11

SEQ ID NO: 16512 - protein, 446 aa, Magnetococcus sp. MC-1; identical to SEQ ID NO: 14104

SEQ ID NO: 16513 - DNA, 1305 bp, Mesorhizobium sp. BNC1; identical to SEQ ID NO: 14105
  CDS (1)..(1305): transl_table=11

SEQ ID NO: 16514 - protein, 434 aa, Mesorhizobium sp. BNC1; identical to SEQ ID NO: 14106

SEQ ID NO: 16515 - DNA, 1290 bp, Silicibacter sp. TM1040; identical to SEQ ID NO: 14107
  CDS (1)..(1290): transl_table=11

SEQ ID NO: 16516 - protein, 429 aa, Silicibacter sp. TM1040; identical to SEQ ID NO: 14108

SEQ ID NO: 16517 - DNA, 1305 bp, Nitrobacter hamburgensis X14; identical to SEQ ID NO: 14109
  CDS (1)..(1305): transl_table=11

SEQ ID NO: 16518 - protein, 434 aa, Nitrobacter hamburgensis X14; identical to SEQ ID NO: 14110

SEQ ID NO: 16519 - DNA, 1308 bp, Paracoccus denitrificans PD1222; identical to SEQ ID NO: 14111
  CDS (1)..(1308): transl_table=11

SEQ ID NO: 16520 - protein, 435 aa, Paracoccus denitrificans PD1222; identical to SEQ ID NO: 14112

SEQ ID NO: 16521 - DNA, 1230 bp, Pseudomonas fluorescens; identical to SEQ ID NO: 14113
  CDS (1)..(1230): transl_table=11

SEQ ID NO: 16522 - protein, 409 aa, Pseudomonas fluorescens; identical to SEQ ID NO: 14114

SEQ ID NO: 16523 - DNA, 1215 bp, Pseudomonas fluorescens; identical to SEQ ID NO: 14115
  CDS (1)..(1215): transl_table=11

SEQ ID NO: 16524 - protein, 404 aa, Pseudomonas fluorescens; identical to SEQ ID NO: 14116

SEQ ID NO: 16525 - DNA, 1443 bp, Staphylococcus haemolyticus; identical to SEQ ID NO: 14117
  CDS (1)..(1443): transl_table=11

SEQ ID NO: 16526 - protein, 480 aa, Staphylococcus haemolyticus; identical to SEQ ID NO: 14118

SEQ ID NO: 16527 - DNA, 1245 bp, Leishmania major; identical to SEQ ID NO: 14119
  CDS (1)..(1245)

SEQ ID NO: 16528 - protein, 414 aa, Leishmania major; identical to SEQ ID NO: 14120

SEQ ID NO: 16529 - DNA, 1380 bp, Gibberella moniliformis; identical to SEQ ID NO: 14121
  CDS (1)..(1380)

SEQ ID NO: 16530 - protein, 459 aa, Gibberella moniliformis; identical to SEQ ID NO: 14122

SEQ ID NO: 16531 - DNA, 1233 bp, Schizosaccharomyces pombe; identical to SEQ ID NO: 14123
  CDS (1)..(1233)

SEQ ID NO: 16532 - protein, 410 aa, Schizosaccharomyces pombe; identical to SEQ ID NO: 14124

SEQ ID NO: 16533 - DNA, 1290 bp, Saccharomyces cerevisiae; identical to SEQ ID NO: 14125
  CDS (1)..(1290)

SEQ ID NO: 16534 - protein, 429 aa, Saccharomyces cerevisiae; identical to SEQ ID NO: 14126

SEQ ID NO: 16535 - DNA, 1200 bp, Pseudomonas aeruginosa; identical to SEQ ID NO: 14127
  CDS (1)..(1200): transl_table=11

SEQ ID NO: 16536 - protein, 399 aa, Pseudomonas aeruginosa; identical to SEQ ID NO: 14128

SEQ ID NO: 16537 - DNA, 1197 bp, Pseudomonas aeruginosa; identical to SEQ ID NO: 14129
  CDS (1)..(1197): transl_table=11

SEQ ID NO: 16538 - protein, 398 aa, Pseudomonas aeruginosa; identical to SEQ ID NO: 14130

SEQ ID NO: 16539 - DNA, 1224 bp, Acinetobacter sp; identical to SEQ ID NO: 14131
  CDS (1)..(1224): transl_table=11

SEQ ID NO: 16540 - protein, 407 aa, Acinetobacter sp; identical to SEQ ID NO: 14132

SEQ ID NO: 16541 - DNA, 1218 bp, Bordetella pertussis; identical to SEQ ID NO: 14133
  CDS (1)..(1218): transl_table=11

SEQ ID NO: 16542 - protein, 405 aa, Bordetella pertussis; identical to SEQ ID NO: 14134

SEQ ID NO: 16543 - DNA, 1305 bp, Brucella melitensis; identical to SEQ ID NO: 14135
  CDS (1)..(1305): transl_table=11

SEQ ID NO: 16544 - protein, 434 aa, Brucella melitensis; identical to SEQ ID NO: 14136

SEQ ID NO: 16545 - DNA, 1305 bp, Brucella suis; identical to SEQ ID NO: 14137
  CDS (1)..(1305)

SEQ ID NO: 16546 - protein, 434 aa, Brucella suis; identical to SEQ ID NO: 14138

SEQ ID NO: 16547 - DNA, 1200 bp, Buchnera aphidicola; identical to SEQ ID NO: 14139
  CDS (1)..(1200): transl_table=11

SEQ ID NO: 16548 - protein, 399 aa, Buchnera aphidicola; identical to SEQ ID NO: 14140

SEQ ID NO: 16549 - DNA, 1197 bp, Buchnera aphidicola; identical to SEQ ID NO: 14141
  CDS (1)..(1197): transl_table=11

SEQ ID NO: 16550 - protein, 398 aa, Buchnera aphidicola; identical to SEQ ID NO: 14142

SEQ ID NO: 16551 - DNA, 1200 bp, Burkholderia mallei; identical to SEQ ID NO: 14143
  CDS (1)..(1200): transl_table=11

SEQ ID NO: 16552 - protein, 399 aa, Burkholderia mallei; identical to SEQ ID NO: 14144

SEQ ID NO: 16553 - DNA, 1209 bp, Chromobacterium violaceum; identical to SEQ ID NO: 14145
  CDS (1)..(1209): transl_table=11

SEQ ID NO: 16554 - protein, 402 aa, Chromobacterium violaceum; identical to SEQ ID NO: 14146

SEQ ID NO: 16555 - DNA, 1206 bp, Erwinia carotovora; identical to SEQ ID NO: 14147
  CDS (1)..(1206): transl_table=11

SEQ ID NO: 16556 - protein, 401 aa, Erwinia carotovora; identical to SEQ ID NO: 14148

SEQ ID NO: 16557 - DNA, 1215 bp, Methanosarcina acetivorans; identical to SEQ ID NO: 14149
  CDS (1)..(1215): transl_table=11

SEQ ID NO: 16558 - protein, 404 aa, Methanosarcina acetivorans; identical to SEQ ID NO: 14150

SEQ ID NO: 16559 - DNA, 1209 bp, Neisseria gonorrhoeae; identical to SEQ ID NO: 14151
  CDS (1)..(1209)

SEQ ID NO: 16560 - protein, 402 aa, Neisseria gonorrhoeae; identical to SEQ ID NO: 14152

SEQ ID NO: 16561 - DNA, 1209 bp, Neisseria meningitidis; identical to SEQ ID NO: 14153
  CDS (1)..(1209)

SEQ ID NO: 16562 - protein, 402 aa, Neisseria meningitidis; identical to SEQ ID NO: 14154

SEQ ID NO: 16563 - DNA, 1209 bp, Neisseria meningitidis; identical to SEQ ID NO: 14155
  CDS (1)..(1209): transl_table=11

SEQ ID NO: 16564 - protein, 402 aa, Neisseria meningitidis; identical to SEQ ID NO: 14156

SEQ ID NO: 16565 - DNA, 1215 bp, Photorhabdus luminescens; identical to SEQ ID NO: 14157
  CDS (1)..(1215): transl_table=11

SEQ ID NO: 16566 - protein, 404 aa, Photorhabdus luminescens; identical to SEQ ID NO: 14158

SEQ ID NO: 16567 - DNA, 1218 bp, Photobacterium profundum; identical to SEQ ID NO: 14159
  CDS (1)..(1218): transl_table=11

SEQ ID NO: 16568 - protein, 405 aa, Photobacterium profundum; identical to SEQ ID NO: 14160

SEQ ID NO: 16569 - DNA, 1170 bp, Ralstonia solanacearum; identical to SEQ ID NO: 14161
  CDS (1)..(1170)

SEQ ID NO: 16570 - protein, 389 aa, Ralstonia solanacearum; identical to SEQ ID NO: 14162

SEQ ID NO: 16571 - DNA, 1305 bp, Rhizobium loti; identical to SEQ ID NO: 14163
  CDS (1)..(1305): transl_table=11

SEQ ID NO: 16572 - protein, 434 aa, Rhizobium loti; identical to SEQ ID NO: 14164

SEQ ID NO: 16573 - DNA, 1305 bp, Rhizobium meliloti; identical to SEQ ID NO: 14165
  CDS (1)..(1305): transl_table=11

SEQ ID NO: 16574 - protein, 434 aa, Rhizobium meliloti; identical to SEQ ID NO: 14166

SEQ ID NO: 16575 - DNA, 1203 bp, Salmonella choleraesuis; identical to SEQ ID NO: 14167
  CDS (1)..(1203)

SEQ ID NO: 16576 - protein, 400 aa, Salmonella choleraesuis; identical to SEQ ID NO: 14168

SEQ ID NO: 16577 - DNA, 1203 bp, Salmonella paratyphi; identical to SEQ ID NO: 14169
  CDS (1)..(1203): transl_table=11

SEQ ID NO: 16578 - protein, 400 aa, Salmonella paratyphi; identical to SEQ ID NO: 14170

SEQ ID NO: 16579 - DNA, 1308 bp, Vibrio cholerae; identical to SEQ ID NO: 14171
  CDS (1)..(1308): transl_table=11

SEQ ID NO: 16580 - protein, 435 aa, Vibrio cholerae; identical to SEQ ID NO: 14172

SEQ ID NO: 16581 - DNA, 1311 bp, Vibrio parahaemolyticus; identical to SEQ ID NO: 14173
  CDS (1)..(1311): transl_table=11

SEQ ID NO: 16582 - protein, 436 aa, Vibrio parahaemolyticus; identical to SEQ ID NO: 14174

SEQ ID NO: 16583 - DNA, 1314 bp, Vibrio vulnificus; identical to SEQ ID NO: 14175
  CDS (1)..(1314): transl_table=11

SEQ ID NO: 16584 - protein, 437 aa, Vibrio vulnificus; identical to SEQ ID NO: 14176

SEQ ID NO: 16585 - DNA, 1314 bp, Vibrio vulnificus; identical to SEQ ID NO: 14177
  CDS (1)..(1314): transl_table=11

SEQ ID NO: 16586 - protein, 437 aa, Vibrio vulnificus; identical to SEQ ID NO: 14178

SEQ ID NO: 16587 - DNA, 1179 bp, Xanthomonas axonopodis; identical to SEQ ID NO: 14179
  CDS (1)..(1179): transl_table=11

SEQ ID NO: 16588 - protein, 392 aa, Xanthomonas axonopodis; identical to SEQ ID NO: 14180

SEQ ID NO: 16589 - DNA, 1197 bp, Xanthomonas campestris; identical to SEQ ID NO: 14181
  CDS (1)..(1197): transl_table=11

SEQ ID NO: 16590 - protein, 398 aa, Xanthomonas campestris; identical to SEQ ID NO: 14182

SEQ ID NO: 16591 - DNA, 1185 bp, Xylella fastidiosa; identical to SEQ ID NO: 14183
  CDS (1)..(1185): transl_table=11

SEQ ID NO: 16592 - protein, 394 aa, Xylella fastidiosa; identical to SEQ ID NO: 14184

SEQ ID NO: 16593 - DNA, 1185 bp, Xylella fastidiosa; identical to SEQ ID NO: 14185
  CDS (1)..(1185): transl_table=11

SEQ ID NO: 16594 - protein, 394 aa, Xylella fastidiosa; identical to SEQ ID NO: 14186

SEQ ID NO: 16595 - DNA, 24 bp, Artificial sequence
  Primer sequence
atgacacaattcgcttctcctgtt

SEQ ID NO: 16596 - DNA, 26 bp, Artificial sequence
  Primer sequence
ttaactggcttttttaatatgcggaa

SEQ ID NO: 16597 - protein, 581 aa, Artificial sequence; identical to SEQ ID NO: 14189
  Consensus
  Variant (3)..(3): Xaa in position 3 is any amino acid
  Variant (20)..(22): Xaa in position 20 to 22 is any amino acid
  Variant (23)..(24): Xaa in position 23 to 24 is any or no amino acid
  Variant (27)..(29): Xaa in position 27 to 29 is any amino acid
  Variant (31)..(31): Xaa in position 31 is any amino acid
  Variant (33)..(33): Xaa in position 33 is any amino acid
  Variant (35)..(36): Xaa in position 35 to 36 is any amino acid
  Variant (38)..(42): Xaa in position 38 to 42 is any amino acid
  Variant (43)..(53): Xaa in position 43 to 53 is any or no amino acid
  Variant (56)..(57): Xaa in position 56 to 57 is any amino acid
  Variant (60)..(60): Xaa in position 60 is any amino acid
  Variant (62)..(63): Xaa in position 62 to 63 is any amino acid
  Variant (68)..(68): Xaa in position 68 is any amino acid
  Variant (72)..(72): Xaa in position 72 is any amino acid
  Variant (75)..(76): Xaa in position 75 to 76 is any amino acid
  Variant (78)..(78): Xaa in position 78 is any amino acid
  Variant (80)..(88): Xaa in position 80 to 88 is any or no amino acid
  Variant (95)..(96): Xaa in position 95 to 96 is any amino acid
  Variant (100)..(103): Xaa in position 100 to 103 is any amino acid
  Variant (105)..(105): Xaa in position 105 is any amino acid
  Variant (107)..(109): Xaa in position 107 to 109 is any amino acid
  Variant (110)..(126): Xaa in position 110 to 126 is any or no amino acid
  Variant (128)..(128): Xaa in position 128 is any or no amino acid
  Variant (130)..(130): Xaa in position 130 is any or no amino acid
  Variant (132)..(132): Xaa in position 132 is any or no amino acid
  Variant (134)..(134): Xaa in position 134 is any or no amino acid
  Variant (136)..(137): Xaa in position 136 to 137 is any amino acid
  Variant (138)..(138): Xaa in position 138 is any or no amino acid
  Variant (153)..(154): Xaa in position 153 to 154 is any amino acid
  Variant (156)..(156): Xaa in position 156 is any amino acid
  Variant (158)..(161): Xaa in position 158 to 161 is any amino acid
  Variant (162)..(162): Xaa in position 162 is any or no amino acid
  Variant (164)..(172): Xaa in position 164 to 172 is any amino acid
  Variant (174)..(176): Xaa in position 174 to 176 is any amino acid
  Variant (178)..(183): Xaa in position 178 to 183 is any amino acid
  Variant (184)..(198): Xaa in position 184 to 198 is any or no amino acid
  Variant (208)..(208): Xaa in position 208 is any amino acid
  Variant (210)..(212): Xaa in position 210 to 212 is any amino acid
  Variant (214)..(215): Xaa in position 214 to 215 is any amino acid
  Variant (218)..(218): Xaa in position 218 is any amino acid
  Variant (221)..(222): Xaa in position 221 to 222 is any amino acid
  Variant (224)..(224): Xaa in position 224 is any amino acid
  Variant (225)..(236): Xaa in position 225 to 236 is any or no amino acid
  Variant (238)..(238): Xaa in position 238 is any or no amino acid
  Variant (244)..(245): Xaa in position 244 to 245 is any amino acid
  Variant (250)..(250): Xaa in position 250 is any amino acid
  Variant (252)..(252): Xaa in position 252 is any amino acid
  Variant (263)..(263): Xaa in position 263 is any amino acid
  Variant (265)..(266): Xaa in position 265 to 266 is any amino acid
  Variant (269)..(270): Xaa in position 269 to 270 is any amino acid
  Variant (271)..(288): Xaa in position 271 to 288 is any or no amino acid
  Variant (290)..(291): Xaa in position 290 to 291 is any amino acid
  Variant (294)..(295): Xaa in position 294 to 295 is any amino acid
  Variant (298)..(299): Xaa in position 298 to 299 is any amino acid
  Variant (302)..(303): Xaa in position 302 to 303 is any amino acid
  Variant (305)..(305): Xaa in position 305 is any amino acid
  Variant (306)..(316): Xaa in position 306 to 316 is any or no amino acid
  Variant (318)..(318): Xaa in position 318 is any amino acid
  Variant (326)..(329): Xaa in position 326 to 329 is any amino acid
  Variant (334)..(334): Xaa in position 334 is any amino acid
  Variant (337)..(337): Xaa in position 337 is any amino acid
  Variant (338)..(391): Xaa in position 338 to 391 is any or no amino acid
  Variant (394)..(394): Xaa in position 394 is any amino acid
  Variant (397)..(397): Xaa in position 397 is any amino acid
  Variant (401)..(401): Xaa in position 401 is any amino acid
  Variant (407)..(408): Xaa in position 407 to 408 is any amino acid
  Variant (416)..(416): Xaa in position 416 is any amino acid
  Variant (418)..(418): Xaa in position 418 is any amino acid
  Variant (419)..(427): Xaa in position 419 to 427 is any or no amino acid
  Variant (430)..(430): Xaa in position 430 is any amino acid
  Variant (433)..(442): Xaa in position 433 to 442 is any or no amino acid
  Variant (453)..(453): Xaa in position 453 is any amino acid
  Variant (455)..(455): Xaa in position 455 is any amino acid
  Variant (457)..(457): Xaa in position 457 is any amino acid
  Variant (459)..(459): Xaa in position 459 is any amino acid
  Variant (461)..(466): Xaa in position 461 to 466 is any amino acid
  Variant (468)..(474): Xaa in position 468 to 474 is any or no amino acid
  Variant (484)..(484): Xaa in position 484 is any amino acid
  Variant (489)..(491): Xaa in position 489 to 491 is any amino acid
  Variant (492)..(531): Xaa in position 492 to 531 is any or no amino acid
  Variant (541)..(542): Xaa in position 541 to 542 is any amino acid
  Variant (545)..(545): Xaa in position 545 is any amino acid
  Variant (553)..(553): Xaa in position 553 is any amino acid
  Variant (557)..(557): Xaa in position 557 is any amino acid
  Variant (559)..(560): Xaa in position 559 to 560 is any amino acid
  Variant (561)..(575): Xaa in position 561 to 575 is any or no amino acid
  Variant (578)..(579): Xaa in position 578 to 579 is any amino acid

SEQ ID NO: 16598 - protein, 10 aa, Artificial sequence
  Consensus
  Variant (2)..(2): Xaa in position 2 is any amino acid
  Variant (3)..(3): Xaa in position 3 is Asn or Thr
  Variant (5)..(5): Xaa in position 5 is any amino acid
  Variant (7)..(7): Xaa in position 7 is any amino acid
  Variant (8)..(8): Xaa in position 8 is Phe, Ile, Leu or Val
  Variant (9)..(9): Xaa in position 9 is any amino acid
LXXDXYXXXM

SEQ ID NO: 16599 - protein, 25 aa, Artificial sequence
  Consensus
  Variant (2)..(4): Xaa in position 2 to 4 is any or no amino acid
  Variant (8)..(10): Xaa in position 8 to 10 is any amino acid
  Variant (11)..(11): Xaa in position 11 is Ala or Gly
  Variant (12)..(14): Xaa in position 12 to 14 is any amino acid
  Variant (15)..(15): Xaa in position 15 is Ala, Asp, Glu, Gly, Asn, Gln or Ser
  Variant (16)..(19): Xaa in position 16 to 19 is any amino acid
  Variant (22)..(22): Xaa in position 22 is any amino acid
  Variant (25)..(25): Xaa in position 25 is Ala, Glu, Gln or Ser
GXXXTSNXXXXXXXXXXXXGTXAHX

SEQ ID NO: 16600 - DNA, 738 bp, Escherichia coli
  CDS (1)..(738)
atgacgttaactgcttcatcttcttcccgcgctgttacgaattctcctgtggttgttgcccttgattatcataatcgtgatgacgcgctggcctttgtcgacaagatcgacccacgcgattgtcgtctgaaggtcggcaaagagatgtttacattgtttgggccacagtttgtgcgcgaacttcaacagcgtggttttgatatctttcttgacctgaaattccacgatatccccaacactgcagcgcacgctgtcgctgctgcagctgacttaggcgtgtggatggtgaatgttcatgcctctggtggggcgcgtatgatgaccgcagcgcgtgaggcactggttccgtttggcaaagatgcaccgcttttgattgctgtgacagtgttgaccagcatggaagccagcgacctggtcgatcttggcatgacactgtcacctgcagattatgcagaacgtctggcggcactgacgcaaaaatgtggccttgatggtgtggtgtgttctgctcaggaagctgtgcgctttaaacaggtattcggtcaggagttcaaactggttacgccgggcattcgtccgcaggggagtgaagctggtgaccagcgccgcattatgacgccagaacaggcgttgtcggctggtgttgattatatggtgattggtcgcccggtaacgcaatcggtagatccagcgcagacgctgaaagcgatcaacgcctctttacagcggagtgcatga

SEQ ID NO: 16601 - protein, 245 aa, Escherichia coli
MTLTASSSSRAVTNSPVVVALDYHNRDDALAFVDKIDPRDCRLKVGKEMFTLFGPQFVRELQQRGFDIFLDLKFHDIPNTAAHAVAAAADLGVWMVNVHASGGARMMTAAREALVPFGKDAPLLIAVTVLTSMEASDLVDLGMTLSPADYAERLAALTQKCGLDGVVCSAQEAVRFKQVFGQEFKLVTPGIRPQGSEAGDQRRIMTPEQALSAGVDYMVIGRPVTQSVDPAQTLKAINASLQRSA

SEQ ID NO: 16602 - DNA, 681 bp, Thermoplasma volcanium GSS1
  CDS (1)..(681): transl_table=11
ctggcatggatatccagttgcgtggataagagaattatagtagccttggatgttaaggaaaagaaaaaagctatagatattgcagaaagcctatcggacattgtatttgcttttaagataaactggcccttagtactatattcatctcctgaggttataggtgaaatttcgcaatatggtaaggttatatgtgactttaaagtggcagatatcccttatacgaactcgctaataacagagagagttcgggatcttggtgcatggggaataatatctcactcgtttcttggagaagaatcccttaaatccgtggtcaatgcagctaaaggcatgcatgtattttcagttgtggctatgtcgcatcctggctcagatatgataaactccaatgctatgcaactaatgaaactatccatagaatgtggggtttacggatttgttgcccctgcaaacaagattgatgacctaagaatgatcaggtctgcaacggacagagtaataatatcgccaggaataggagcacagggaggtgatccgtacacagctgttctgaatggatcggattatttaatagtgggccggagcgtttatgaaagcgataagccagagttagaggtttcaaagcttcagcaaactgccgagagagctattgaggacagggagagacttaaaaacagttaa

SEQ ID NO: 16603 - protein, 226 aa, Thermoplasma volcanium GSS1
MAWISSCVDKRIIVALDVKEKKKAIDIAESLSDIVFAFKINWPLVLYSSPEVIGEISQYGKVICDFKVADIPYTNSLITERVRDLGAWGIISHSFLGEESLKSVVNAAKGMHVFSVVAMSHPGSDMINSNAMQLMKLSIECGVYGFVAPANKIDDLRMIRSATDRVIISPGIGAQGGDPYTAVLNGSDYLIVGRSVYESDKPELEVSKLQQTAERAIEDRERLKNS

SEQ ID NO: 16604 - DNA, 726 bp, Pyrococcus horikoshii OT3
  CDS (1)..(726): transl_table=11
atgggccgaaaccccagcgaaagccctcaagagtgcaattcacgtggcctatatcctaaagaaagaggagataacgcccgaaatactggaggtggtcaagtgatagttttggccttagatgtttatgaaggagaaagggccattaaaatagctaaaagtgttaaggattacatttcgatgataaaggttaactggccactcattcttggaagtggagtggatataataagaagacttaaggaggagacaggagttgagataatagctgatcttaagcttgctgacataccgaatactaataggttgatagcaagaaaggtctttggggctggagcggactatgtaatagtgcataccttcgttggtagggatagcgtaatggcagtgaaggagcttggggaaataataatggtggttgaaatgagccatcctggagcactcgagttcattaatcctttaacagatagattcatagaagtcgcaaatgaaattgagccttttggggttatagctcctgggacaaggcctgagagaattggatacattagggatagattgaaggaagggataaagattctcgcccctgggataggggcccagggtggtaaagctaaggatgctgttaaagctggagcggattatataatagtgggaagggcaatatataacgctccaaatccaagagaagcagcaaaagcgatatacgatgaaataagaggtgtttag

SEQ ID NO: 16605 - protein, 241 aa, Pyrococcus horikoshii OT3
MGRNPSESPQECNSRGLYPKERGDNARNTGGGQVIVLALDVYEGERAIKIAKSVKDYISMIKVNWPLILGSGVDIIRRLKEETGVEIIADLKLADIPNTNRLIARKVFGAGADYVIVHTFVGRDSVMAVKELGEIIMVVEMSHPGALEFINPLTDRFIEVANEIEPFGVIAPGTRPERIGYIRDRLKEGIKILAPGIGAQGGKAKDAVKAGADYIIVGRAIYNAPNPREAAKAIYDEIRGV

SEQ ID NO: 16606 - DNA, 768 bp, Agrobacterium tumefaciens str. C58
  CDS (1)..(768): transl_table=11
ttgcagcggcctcccccacatgcgactggacggcaatggaaacatggcagggataagacaatgaccgcgcgcgaaaaactcatcgtcgggctggatgttccgactgtgcagcaggcagaagacatcgtgtcgaaaatcggcgacgaggtcctgttctacaagatcggttatcagctggtattcgccgggggtcttgaattcgcgcgtgacctcgtccagagcggcaagaaggtctttctcgacatgaagctgctcgatatcgacaacaccgtcgcctcgggcgtcgaaaacatcgcccgcatgggcatgtcgatgctgacgctgcatgcctatcccaaagccatgcgtgctgccgtcaaggcggcggaaggctccggcctctgcctgctgggcgtcaccgtgctgacctccatggatgacagcgatctggtcgaggccggttacgcgtccgacgcgcgttcgctggtgctgcgccgggctgaacaggcacgcgaggccggtatgggcggcattgtctgttcggcggaagaatcgaccgctgtgcgtgaaattctcggccccgaccttgccgtggtcacccccggcattcgccccgccggcgccgatcttggcgatcagaagcgggtgatgacgccctatgacgccatcaaggccggttcgagccatctggttgtcgcccgtcccatcgtcagggcggaagacccgaaagcggcggcccgcgccattctggacgatatgctgcgcgcgagttttccggccaatcagtaa

SEQ ID NO: 16607 - protein, 255 aa, Agrobacterium tumefaciens str. C58
MQRPPPHATGRQWKHGRDKTMTAREKLIVGLDVPTVQQAEDIVSKIGDEVLFYKIGYQLVFAGGLEFARDLVQSGKKVFLDMKLLDIDNTVASGVENIARMGMSMLTLHAYPKAMRAAVKAAEGSGLCLLGVTVLTSMDDSDLVEAGYASDARSLVLRRAEQAREAGMGGIVCSAEESTAVREILGPDLAVVTPGIRPAGADLGDQKRVMTPYDAIKAGSSHLVVARPIVRAEDPKAAARAILDDMLRASFPANQ

SEQ ID NO: 16608 - DNA, 648 bp, Thermoplasma acidophilum DSM 1728
  CDS (1)..(648): transl_table=11
gtgatgtcggaatcaaggcttgtggttgcactagacctcacggacaaggatagagccctggaaatagccagatccataggaagacaggtgttcgccataaagataaactggcccctggtcctggcaggatccggatcgataataggcgagatcgcaagggtgtcgcgggttgtctgtgacttcaagatagcagatataccgaacacgaacagcataatagcaaaatttgcgagggatcagggagcatggggcataatatcgcattcattcacaggccttgaatcactgagatcggtcgtcgaagcatctggcgatactaaggtcttctcggttgtggccatgtcgcatcccggttcggatctcattaacgacaattaccggaagctgatggatatatctgagagggcaggcgtctacggctatatagcgcctggcaataaattatccgacctgtctgaaatacggaagcgcacgaaaaagaccataatgtctccaggcataggatcgcagggaggaagggcatcggatgccataaaggccggcgcggatctggttatagtcggaagatccatatacgaaagtgcagatccggtgacagcagcagaagccataaacgaggaaatagcaaaggccgttgaacaaaactag

SEQ ID NO: 16609 - protein, 215 aa, Thermoplasma acidophilum DSM 1728
MMSESRLVVALDLTDKDRALEIARSIGRQVFAIKINWPLVLAGSGSIIGEIARVSRVVCDFKIADIPNTNSIIAKFARDQGAWGIISHSFTGLESLRSVVEASGDTKVFSVVAMSHPGSDLINDNYRKLMDISERAGVYGYIAPGNKLSDLSEIRKRTKKTIMSPGIGSQGGRASDAIKAGADLVIVGRSIYESADPVTAAEAINEEIAKAVEQN

SEQ ID NO: 16610 - DNA, 1482 bp, Drosophila melanogaster
  CDS (1)..(1482)
atggttgcccagaactccgacaaaatgcgggccctggccctgaagctcttcgagatcaatgccttcaagttcggcgacttcaagatgaaagtgggcataaattcgccggtctacttcgacctccgagtgatcgtcagttatccggatgtgatgcaaaccgtatccgacctgctggtggaacacatcaaggacaagcagctgagcgccaaacacgtgtgcggtgttccctacacggcgctcccgctggccaccattgtgtccgtgcagcagggaactcccatgctggtgcggcgcaaggaggccaaggcgtacggcaccaagaagctggtcgagggcatcttcaatgctggcgacacctgtctgattgtcgaggacgtggtcacctccggctccagcatcctggacacggtgcgggatctgcaaggcgagggcattgtggtcaccgacgccgtggtcgtcgtagaccgtgagcagggcggagtggccaacatcgccaagcacggcgtgcggatgcactcgctcttcacgctctcctttctgctgaacacacttcacgaggccgggcgcatcgagaagtccacagtggaggcggtggccaagtacatcgccgccgtgcaaatcaacagcgatggtaccttcgtcggcggcgataagggcgacgttgtcagagccaacgacttgcagcgcactaaactgacctacgagaatcgcgccaatctggctaagagcgcggtggccaagcgcctcttcaacctgatagccagcaaacagacgaacctctgcttggccgccgacctgacacacgccgatgagatcctggacgtggccgacaagtgcggtccgtacatttgcctgctgaagacgcacgtagacattgtggaggatttcagtgataaattcatcgctgacctgcaagctctggcccagcggcacaatttcctgctgatggaggatcgcaagtttgcagacatcggcaacacggtgtccctgcagtacggcaagggcatctataagatttccagttgggcagatctggtcacggcccacaccttacctggacgtagtattctgcagggtctgaaggcgggccttggcgaaggaggagccggcaaggaacgcggcgtcttcctgctggcggagatgtctgccagcggcaacctgatcgacgccaagtacaaggagaacagcaacaagatcgcaaccgagggagccgatgtagatttcgttgccggtgtggtatgccaatcctccgatgcctttgccttccccggacttctgcaactgacgcccggtgtgaagatagacgagggcgtggaccaattgggccagcagtaccagagtccggagcatgtggtcaaggagcggggtgccgacatcggagtggtgggcaggggcattctgaaggccagcagcccgaagcaggcggctcagacgtaccgcgaccgcctgtgggcagcctaccaggatcgagttgccaagtag

SEQ ID NO: 16611 - protein, 493 aa, Drosophila melanogaster [sequence omitted]

SEQ ID NO: 16612 - DNA, 780 bp, Brucella melitensis 16M
  CDS (1)..(780): transl_table=11
gtgagggtcttccgtgcccggctctcttgtgcgaagagagtaaaaatcacagcggagatttccatgacgacagaattgcacgatgacgcatccgggcgcctgatcgtgggccttgacgtgccgacaattgccgaggcggaaaaggtggtcgaagaactgggcaatgctgtttccttctacaagatcggctatcagcttgtttttgccggtgggcttgatttcgccaaaagccttgtggcggcgcgcaaaaaagtcttcctcgacatgaagctgctcgatatcgacaacacgattgccaaaggcgtggaaaatgtcgcgaagatgggtgtttccatgctcacgcttcatgcctatccgaaggcaatgcgtgcggcggtggaagccgccagagggtcggacctatgccttttgggcgtgacggtcctgacctccatggacaatgccgatcttcgggaagccggttatttcgacaatgcggaaacgctggtgctgaaacgtgcccgtcaggcgcatgaggccggtatgggcggcattgtcgcctcggcggtggaggcgcaggccattcgccaggcggttggccccgatatggccatcgtcacaccgggcatccgcccggcagggagcgagaagggcgaccagaagcgcgtgatgacgccagccgatgccttgagggccggtgcgagccatctcatcgtggcgcgcccgatcgtgggcgcaccggatcgcaaggcggcagcccttgccatcctgaaggaaatgcgctcgattggaagaagttag

SEQ ID NO: 16613 - protein, 259 aa, Brucella melitensis 16M
MRVFRARLSCAKRVKITAEISMTTELHDDASGRLIVGLDVPTIAEAEKVVEELGNAVSFYKIGYQLVFAGGLDFAKSLVAARKKVFLDMKLLDIDNTIAKGVENVAKMGVSMLTLHAYPKAMRAAVEAARGSDLCLLGVTVLTSMDNADLREAGYFDNAETLVLKRARQAHEAGMGGIVASAVEAQAIRQAVGPDMAIVTPGIRPAGSEKGDQKRVMTPADALRAGASHLIVARPIVGAPDRKAAALAILKEMRSIGRS

SEQ ID NO: 16614 - DNA, 657 bp, Methanopyrus kandleri AV19
  CDS (1)..(657): transl_table=11
gtgctcgaacccgatacgcgcctgatcgttgcgctggacgtgtcaccggatcgcgcggtggagatcgcggaaacacttgacggatacgtcgacgggttcaaagtagggtacgaagtggtgctggccgaaggggcggcggggatagagcgggtcgccgaagtgctagaagaatcgttcctgctcgtggatttgaaaacggcggacattccggagatatcgcggtcgatcgtcgagcgtgtgagcgaggccggcgccaacgccgccatagttcacgggttcgtaggtccggacgtcgtcgaggaatgcgctgaggtgctaccggtgttcgtggtagctacgatgagtcacccgggggcgcgggagttctacgatcgagcttgccgggacatcgttaaagcatgcgacgacatcgacggtgttgtcgggtacgtggccccggcgacgagacccgagagagtccgggaggtccggaagatcaccgacaagctcatcgccagccccggtgtaggagctcagggagcggcgcccggtgacgcggtgcgagctggtgcggatttcgagatagtcggtcgggcgatcacggaagcgcacgaccccgtggaagcggcgaaggatttgactcgggcgatgaggacttccaggccggccgaacggtga

SEQ ID NO: 16615 - protein, 218 aa, Methanopyrus kandleri AV19
MLEPDTRLIVALDVSPDRAVEIAETLDGYVDGFKVGYEVVLAEGAAGIERVAEVLEESFLLVDLKTADIPEISRSIVERVSEAGANAAIVHGFVGPDVVEECAEVLPVFVVATMSHPGAREFYDRACRDIVKACDDIDGVVGYVAPATRPERVREVRKITDKLIASPGVGAQGAAPGDAVRAGADFEIVGRAITEAHDPVEAAKDLTRAMRTSRPAER

SEQ ID NO: 16616 - DNA, 732 bp, Methanosarcina acetivorans C2A
  CDS (1)..(732): transl_table=11
atgcaacaatcactctcccacttatcgtttccgctgtgcggacgcgcctttcaaagagatgatttgatggaaaggaatacctgtatgatccttgctctggacgtaaccgacagggaagaagcgctgaaaattgcagaagacgtctgggaattcgtggacgcaataaaggtaggctaccctctcatacttgccacagggctcgggattatcagggaacttgccgagttcgctccggtaatagccgatttcaaagttgccgatatccccaacaccaaccgccttatctgcgaccaggtctttgaagccggagccgatgcagtcatcgcacagggctttacaggcagggacagccttgatgcctgcattgaaatcgcttccgaatacagaaaggacgtcttcgttgtgagcgaaatgagccaccccggcggtgccgatttcatgcagccggttgcagaagcaattgcaaaaatggcgcttgaagcaggagctttcgggcttgtcgcccctgctacccgtcccaaaagagtgaagaaaatcaggagaatcatcggggacaaactcacaatcatctcccccggtgtgggtgcccagggcggaaaagcctcggacgttattgctgccggcgcagactgggtgatagtgggtaggagcatctacaaggcagaatccccaaaagaagctgccaggcagattgccgaggaaattcaggctgagctccggggagaatactga

SEQ ID NO: 16617 - protein, 243 aa, Methanosarcina acetivorans C2A
MQQSLSHLSFPLCGRAFQRDDLMERNTCMILALDVTDREEALKIAEDVWEFVDAIKVGYPLILATGLGIIRELAEFAPVIADFKVADIPNTNRLICDQVFEAGADAVIAQGFTGRDSLDACIEIASEYRKDVFVVSEMSHPGGADFMQPVAEAIAKMALEAGAFGLVAPATRPKRVKKIRRIIGDKLTIISPGVGAQGGKASDVIAAGADWVIVGRSIYKAESPKEAARQIAEEIQAELRGEY

SEQ ID NO: 16618 - DNA, 666 bp, Thermosynechococcus elongatus BP-1
  CDS (1)..(666): transl_table=11
gtggccttggatgtacccaatttggaggtggcgatcgccactatccatcggctgccccaagtgcaattttggaaagtggggctagaactcttttgcgccagtgggccgatgattcttgatgtcctcaaggatcaggggaagcgcatctttctcgatttgaagcttcatgatattcccaatacggtagcagccgcagcacgagcgatcgccccctatggcgtggactttgtcaccatccacactgccactggtttaaccggtctcaaaactgctcaggcagccctcggggaaagcgccactcaactcatcggtgtcacattgctcaccagtattggcgcagacaccctgcagcaggaactccaaattccccttgatccggctacctatgttgaatgcatggctaatcttgcccatcaagcaggactggcgggcattgtctgctcaccccaggaagccgcacgggtgaaacaacgctggggagagaatttcttgagaatttgtccggggattcgcccccttggcagcgcaacgggagatcaagcgcgatcgctgacgcctaatgctgcctttgctgctggtgcctcttaccttgtcattggccgcccgattttacaagcagcggatcccgccgccgcctttgatgacctttgctctagccttgtttaa

SEQ ID NO: 16619 - protein, 221 aa, Thermosynechococcus elongatus BP-1
MALDVPNLEVAIATIHRLPQVQFWKVGLELFCASGPMILDVLKDQGKRIFLDLKLHDIPNTVAAAARAIAPYGVDFVTIHTATGLTGLKTAQAALGESATQLIGVTLLTSIGADTLQQELQIPLDPATYVECMANLAHQAGLAGIVCSPQEAARVKQRWGENFLRICPGIRPLGSATGDQARSLTPNAAFAAGASYLVIGRPILQAADPAAAFDDLCSSLV

SEQ ID NO: 16620 - DNA, 888 bp, Escherichia coli CFT073
  CDS (1)..(888): transl_table=11
ttgatgttctattgtgcttcggcaccgacggcgcggaaaagcctgccagaggagaaatcgcaactgttaatttttatttccacgggtagaatgctcgccgtttacctgtttcgcgccacttccggtgcccatcatcaagaaggtctggtcatgacgttaactgcttcatcttcttcccgcgctgttacgaattctcctgtagttgttgcccttgattatcataatcgcgatgccgcgatggcctttgtcgacaagatcgacccacgcgattgtcgtctgaaggtcggcaaagagatgtttacattgtttgggccacagtttgtgagcgaacttcaacagcgtggttttgatatctttcttgacctgaaattccacgatattcccaacactgcagcacacgctgtcgctgctgcggctgacttaggcgtgtggatggtgaatgttcatgcctccggtggggcgcgtatgatggccgcagcgcgtgaggcactggttccgtttggcaaagatgcaccgcttttgattgctgtgacagtgttgaccagcatggaagccagcgacctggccgatcttggcgtgacactgtcacctgcagattatgcagaacgtctggcggcactgacgcaaaaatgtggccttgatggtgtggtgtgttctgctcaggaagctgtgcgctttaaacaggtattcggtcaggagttcaaactggttacgccgggcattcgtccgcaggggagtgatgctggtgaccagcgccgcattatgacgccagaacaggcgttgtcggctggtgttgattatatggtgattggtcgcccggtaacgcaatcggtagatccagcgcagacgctgaaagcgatcaacgcctctttacagcggagtgcatga

SEQ ID NO: 16621 - protein, 295 aa, Escherichia coli CFT073
MMFYCASAPTARKSLPEEKSQLLIFISTGRMLAVYLFRATSGAHHQEGLVMTLTASSSSRAVTNSPVVVALDYHNRDAAMAFVDKIDPRDCRLKVGKEMFTLFGPQFVSELQQRGFDIFLDLKFHDIPNTAAHAVAAAADLGVWMVNVHASGGARMMAAAREALVPFGKDAPLLIAVTVLTSMEASDLADLGVTLSPADYAERLAALTQKCGLDGVVCSAQEAVRFKQVFGQEFKLVTPGIRPQGSDAGDQRRIMTPEQALSAGVDYMVIGRPVTQSVDPAQTLKAINASLQRSA

SEQ ID NO: 16622 - DNA, 639 bp, Pseudomonas syringae pv. tomato str. DC3000
  CDS (1)..(639): transl_table=11
atgcgcctggctgatcagctcgaccccaagctgtgccgggtcaaggttggcaaggagctgttcaccagctgtgcgtcggacatcgtcgaggcccttcgcggcaagggcttcgatgtttttctggatctcaaatttcatgacattcccaacaccacggcgatggcggtcaaggccgctgccgagatgggcgtgtggatggtcaacgtgcattgctcgggcgggctgcgcatgatggcagcgtgccgggaagtgctggagcagcgcaccggtcctcagcctttgctgatcggcgtgaccgtactcaccagtatggagcgtgaagaccttgccggtatcggcctggatattgatccgcaagtacaggtgctgcgcctggcagcgctggctgaaaaagccggtatggatggcctggtctgttcggcgctggaagcccaggcccttaaagccgctcacccgtcactgcagctggtcaccccaggcattcgcccggcgggcagcgcacaggacgatcaacgtcgcattctgaccccgcgccaggcactggacgcgggttccgactacctcgtgatcggccggccgatcagccaggcagcggacccggccaaggcactggccgcagtggttgccgaactggcctga

SEQ ID NO: 16623 - protein, 212 aa, Pseudomonas syringae pv. tomato str. DC3000
MRLADQLDPKLCRVKVGKELFTSCASDIVEALRGKGFDVFLDLKFHDIPNTTAMAVKAAAEMGVWMVNVHCSGGLRMMAACREVLEQRTGPQPLLIGVTVLTSMEREDLAGIGLDIDPQVQVLRLAALAEKAGMDGLVCSALEAQALKAAHPSLQLVTPGIRPAGSAQDDQRRILTPRQALDAGSDYLVIGRPISQAADPAKALAAVVAELA

SEQ ID NO: 16624 - DNA, 702 bp, Helicobacter hepaticus ATCC 51449
  CDS (1)..(702): transl_table=11
atgaaattgtgtattgctcttgataatccacatttgcaagataatcttatgttgcttcaagcattagattctctttctcaatgtcaaaaacacgatatatggcttaaagttggtttaagaagctttgtgcgtgatggcataaaaggtatagaaaagcttaaaaaatacggcgattatagaatcttccttgatttaaaactttatgatattccaaatacaatgcttgagacgattatagagatgcaaaaaattggcattgatatgcttaccattcatacaagctgtggatttgaagcaatgaggactattgcaaagcttaaagaaaatcaaagtaatatgcccttaatcgtaggtgtaagtgcgctcacaagctttgataatgagagttttatggagatttacaatgcttcacttttttcccacacactcaaacttgcttctttagcatttcaggcagggattgatggggtagtgtgttcagtgcaggagagtttagcaataaaaaaggcaacttgtagcacatttttaactattacacctggcattcgtccttttggcgagagtgcgaatgaccaaaagcgagtggcaaacttgcaagaagcgagagaagcaatgagtgattttgtcgttattgggcgtccaatttataaagacgaaaatccacttagcgtagtggagagaatcttggcttttcaaagataa

SEQ ID NO: 16625 - protein, 233 aa, Helicobacter hepaticus ATCC 51449
MKLCIALDNPHLQDNLMLLQALDSLSQCQKHDIWLKVGLRSFVRDGIKGIEKLKKYGDYRIFLDLKLYDIPNTMLETIIEMQKIGIDMLTIHTSCGFEAMRTIAKLKENQSNMPLIVGVSALTSFDNESFMEIYNASLFSHTLKLASLAFQAGIDGVVCSVQESLAIKKATCSTFLTITPGIRPFGESANDQKRVANLQEAREAMSDFVVIGRPIYKDENPLSVVERILAFQR

SEQ ID NO: 16626 - DNA, 714 bp, Rhodopseudomonas palustris CGA009
  CDS (1)..(714): transl_table=11
atggcgccagtcgacatccctgaccgcgaccggctgatcgtcgcgctcgatttgcctgatctccgtgtcgccgaagcgatggtcgaccggctcggcgacagcgtcggtttctacaagatcggctatcagctcgcttatgcgggcggcctgccgctcgcccgtgctctggtcggcgccggcaagaaggtgttcgtcgatcttaagctgcacgacatcggcaacaccgtcgcgcgcggcgtcgaaagcctgagccatctcggcgcatccttcctcaccgtccatgcctacccgcagaccatgaaggccgcggtcgaggcccgtggctcctcgaaggtgaagatcctcgctgtcaccgtgctgacctcttatgacgaccgcgatctggcggacgccggctatcggttcggcgtgcgcgacctggtcgaagcgcgcgcccgccaggcgcaggcgatcggtgtcgacggcctggtctgttcgccagaggaagccgcgcatctgcgcagcattgtcggacccgaaatggatctagtgacgccgggcatccgtcccgccggtgcggccgcgggcgatcaaaagcggatcatgacgcccgctaaggcgatcgcggccggtgccagctatctggtggtcggtcggcccgtgctggacgcgccagatcccaaggccgctgcggatgcgatcgttgccgagatcgctgccgcacgcggatcataa

SEQ ID NO: 16627 - protein, 237 aa, Rhodopseudomonas palustris CGA009
MAPVDIPDRDRLIVALDLPDLRVAEAMVDRLGDSVGFYKIGYQLAYAGGLPLARALVGAGKKVFVDLKLHDIGNTVARGVESLSHLGASFLTVHAYPQTMKAAVEARGSSKVKILAVTVLTSYDDRDLADAGYRFGVRDLVEARARQAQAIGVDGLVCSPEEAAHLRSIVGPEMDLVTPGIRPAGAAAGDQKRIMTPAKAIAAGASYLVVGRPVLDAPDPKAAADAIVAEIAAARGS

SEQ ID NO: 16628 - DNA, 720 bp, Geobacter sulfurreducens PCA
  CDS (1)..(720): transl_table=11
atgacaagagatcaagcgcgggagaaggttatcttcgccctcgattccagtgaattcgcccatgtccagtactgggccgaaaccctgtccgaccgggtgggcatgttcaaggtcggcaagcagttgttcaccgcctgcgggccggccacggtccggatgatccagaaattcggcggagaggttttcctggacctcaagttccacgatattcccaacaccgttgccatggcctcccttgaggcagcccggctgggagtaaaactcttcaacctccatgccctgggagggtacgagatgatggcccgcacggtggaggcgctggacaaggagttcaaggggggggagagagcgaaggtgctggccgttaccatccttacctcctcaaccgaagagaccctgcgccaggtggggatcgaatcgccggtggaggagatggtcgtgcggctcgccaccctggccaggaaggccggcatcgacggcgtggtcgcttcaccgcgggagatcccccttatccgcgaggcatgcggtcccgatttcctcatcgtcacgccgggggtacgcccggccttcgccgctctcaacgaccagaagcgggtcatgactcctgctgaagcggtcagggcagggggggattacctcgttatcggccgcccgatcggcgacgcccctgacccggccggcgcagccgaaatgattctcgacgagatcatggccggctga

SEQ ID NO: 16629 - protein, 239 aa, Geobacter sulfurreducens PCA
MTRDQAREKVIFALDSSEFAHVQYWAETLSDRVGMFKVGKQLFTACGPATVRMIQKFGGEVFLDLKFHDIPNTVAMASLEAARLGVKLFNLHALGGYEMMARTVEALDKEFKGGERAKVLAVTILTSSTEETLRQVGIESPVEEMVVRLATLARKAGIDGVVASPREIPLIREACGPDFLIVTPGVRPAFAALNDQKRVMTPAEAVRAGGDYLVIGRPIGDAPDPAGAAEMILDEIMAG

SEQ ID NO: 16630 - DNA, 708 bp, Lactobacillus johnsonii NCC 533
  CDS (1)..(708): transl_table=11
atgagtagacctgttatcgttgccttagatttagacaatgaaaagaaattaaatgaactattaccgaaactaggtaaacctgaaaatgtttttattaagatcgggatggaactcttctttaacgaaggccctaaaatcgtaaaacaattatcagaacagggttatcaaatctttttagacttaaaaatgaacgatattcctaatacagtctataacggtgcaaaggcattagctcgtttgggtattacctacaccacggttcacgcacttggtggcagtcaaatgattaaggccgcaaaagatgggttaattgcgggaactccgattgataaaaatgttcctaaattactagctgtaactgaattaacttctatttcagacgaaattctacattatgagcaaaattgcaatttatcgatgaatgatcaagtattaagcttagctacaacagctaaaaaagcaggtgcagacggtgtgatttgttctccactcgaagttaaagacttacgtcaaaaagttggagaagactttttgtacgtaactcctggaattagaccagctggtaatgctaaagatgatcaatcacgcgtagccaccccacttcaagcaaaagaatggggttcaacagcgattgttgttggtcggccaattactttagccactgatccagaagccgcatatgaagcaattaaaaaggagttcaactaa

SEQ ID NO: 16631 - protein, 235 aa, Lactobacillus johnsonii NCC 533
MSRPVIVALDLDNEKKLNELLPKLGKPENVFIKIGMELFFNEGPKIVKQLSEQGYQIFLDLKMNDIPNTVYNGAKALARLGITYTTVHALGGSQMIKAAKDGLIAGTPIDKNVPKLLAVTELTSISDEILHYEQNCNLSMNDQVLSLATTAKKAGADGVICSPLEVKDLRQKVGEDFLYVTPGIRPAGNAKDDQSRVATPLQAKEWGSTAIVVGRPITLATDPEAAYEAIKKEFN

SEQ ID NO: 16632 - DNA, 675 bp, Wolbachia endosymbiont of Drosophila melanogaster
  CDS (1)..(675): transl_table=11
atgaacccaataatatgcgcactggatacacaagacttaaataaggctatttctctagctaatgctctgcgtggtaaagttggcatggtaaagctgggattagaattttttgctgctcaaggtctttctggagtgcaagaagttgcaaaatgcaatgtaccaatttttttagatctgaaattgcatgacattccaaacactgtagctaaaacagttgaagtaataaaagttctgaacgttgaaatgttaactctgcacatcagcggtgggacaaaaatgcttgaagaagcgctaagtgtagtgcaaggcacaaaaataaagctgattggagtgacagtgctaactagtatgagcaatgaggatttaaacgagcttggagtagcaagagaagtaaaatcacaggtaattttgcttgcaaagcttgcaaaaaagattggactctatggaatagtctgttctgcattggaagctcaggaagtgcgccgagaatgcggtgaagactttaaaattattactccaggaattcgtatagatccaggtcatgacgaccaaaaaagaacagcaacaccaaaagaagcaataaattcaggagctgattatatcgtcattggcagacccattacaaaaactacaagtagtgcggagctaatattgaaatccatgaaagaattttaa

SEQ ID NO: 16633 - protein, 224 aa, Wolbachia endosymbiont of Drosophila melanogaster
MNPIICALDTQDLNKAISLANALRGKVGMVKLGLEFFAAQGLSGVQEVAKCNVPIFLDLKLHDIPNTVAKTVEVIKVLNVEMLTLHISGGTKMLEEALSVVQGTKIKLIGVTVLTSMSNEDLNELGVAREVKSQVILLAKLAKKIGLYGIVCSALEAQEVRRECGEDFKIITPGIRIDPGHDDQKRTATPKEAINSGADYIVIGRPITKTTSSAELILKSMKEF

SEQ ID NO: 16634 - DNA, 720 bp, Bdellovibrio bacteriovorus HD100
  CDS (1)..(720): transl_table=11
atgaacaaaaatctgcgtgctcaccccatgaaaaatccgattattttggctctggatgtggatacccgcgatcaggccctgaaaattgccgacgatctttcagatatcgtcggggggatcaagctggggccgcgtctgtgcctgcgttacgggatggatttcgtcaaagaaatggcgcaacgagccccgatttttctggataacaagcacttcgacattccctccaccatggaggccgctgtgcgcgccagctttgaggcgggggcgtctttggtgacggtgcatgccctgagtggcaaagaggctctgacccgcatggcagcggtggaaaaagagctgaatcaacagcgtccgttccgcattctggcggtgacgattctgacgtcctgggatcaaaattcgctgccagtgaatatgaaatctcaaccgatcgcccagcacgtgacggagctggcttctttggtgaaggattcgggtttgtccggtgtcgtgtgttcccctcacgaattggaccttttacaaaaccgagatctttaccttgtcactccgggaattcgctttagtatgcaggattccggcgatcaaaaacgtatcatgggacccaaagaggcactgcgtgcaggtgcttccgcgctggtcgtgggtcgccctattctggaagcttccaacatcaaggaagcggccactgattttgtgatggcaatgtatgaagaaaaataa

SEQ ID NO: 16635 - protein, 239 aa, Bdellovibrio bacteriovorus HD100
MNKNLRAHPMKNPIILALDVDTRDQALKIADDLSDIVGGIKLGPRLCLRYGMDFVKEMAQRAPIFLDNKHFDIPSTMEAAVRASFEAGASLVTVHALSGKEALTRMAAVEKELNQQRPFRILAVTILTSWDQNSLPVNMKSQPIAQHVTELASLVKDSGLSGVVCSPHELDLLQNRDLYLVTPGIRFSMQDSGDQKRIMGPKEALRAGASALVVGRPILEASNIKEAATDFVMAMYEEK

SEQ ID NO: 16636 - DNA, 717 bp, Bacillus cereus ATCC 10987
  CDS (1)..(717): transl_table=11
atgtcacagtcgttaatcgttgcactagattttccagggaaacaagatgtagaacaattcttgcgccactttgaaggggaagagttatttgtcaaagttggtatggagttattttacaaagaaggccctgcaattattacgtacttaaaagaaaaaggacataagatttttctagatttaaaacttcatgatattccaaatacagtaaaaagcgctatgcgtagcctagctagtctagatgttgatatggtaaatgttcatgctgctgggggaagcagtatgatgaaagctgcgattgagggattagaggaaggtaagcaagaaggaaaagagagaccgatttgtattgcagttacacaactaacaagcacttcggaagctatgatgaaaaaagagatcggcattgagaaaacgttagaagaagcggttgctcattatgcaaaactaacgaaagaaagtggacttgatggcgttgtttgctcaacgcttgaagttccaaaactacgtgaagtatgcggaaatgaatttgtaacagtaacaccggggattcgtcttgcgagcgatgatgtaaatgaccaggtgcgcgtagcaacaccgaaacgtgcgagggaacttggctcaagctatatcgtagttggacgtagtattacaaaagcagaaaatccgcttgaagcgtataaaacagtaaaacaacagtgggaaggtgtaacagtatga

SEQ ID NO: 16637 - protein, 238 aa, Bacillus cereus ATCC 10987
MSQSLIVALDFPGKQDVEQFLRHFEGEELFVKVGMELFYKEGPAIITYLKEKGHKIFLDLKLHDIPNTVKSAMRSLASLDVDMVNVHAAGGSSMMKAAIEGLEEGKQEGKERPICIAVTQLTSTSEAMMKKEIGIEKTLEEAVAHYAKLTKESGLDGVVCSTLEVPKLREVCGNEFVTVTPGIRLASDDVNDQVRVATPKRARELGSSYIVVGRSITKAENPLEAYKTVKQQWEGVTV

SEQ ID NO: 16638 - DNA, 1407 bp, Apis mellifera
  CDS (1)..(1407)
atggatgctgaattaaaagagctagctatagcactttatgaaatagatgcatttaaatttggtgattttgtaactaaagttggtcttaaaactccaatatattttgatctaagagtattaatatcacatccaaaaataatggttcgcttggcaaaaatactatggacatttgcagaagaatgtccagatataactcaaatttgtggtgttccttatacagctttaccattagcaacattaatttctgcagactctaatgtgcccatgttaataaaacgaaaagaagcaaaagcatatggtacgaaaaagctcatagagggcaattttaagcaaggagatcattgtgtaattattgaagatgtggtcacaagtggtagcagtattttagaaacagcatttattctaagaaaagaaggtttaaaagtaacagacacatttgttgtaattgatagagaacaaaatggtaagaaaaatatagagcatcatggaattagaatgaggagtttatatacaactaccagacttatggcatatttgttagaagctaacaagattactccaaaaatagttaaaaatgtgactgattatttattaaaatttcaagcaccgatcatttctgttcaagataaacggttaaaaactccatttcatattcgtagcacaaagaccaaaaatgcaattgcttccaagttgtttaatttgatggaaacaaagcaatccactatatgtctagcagcagatttaactaaagcaaatgatattatagaaatagctgatttaataggaccacatattgtgttatttaaaacacatatagatatattagaagattttagctatgattttataaaacgtttaaaagatttagctaaaaaacatgagtttttattaatggaagatagaaaatttgccgatatcggaaatacggtatccttacaatatgagaaaggcatttataaaatatctgaatgggcagatattgttacagtgcacgcagttgcaggtccaaatatcatagatggcttgaaaaatagtttaaaaaatataaatgaacctcgtggtttgtttatattagcggaaatgtcttccaaaggagctttgacggttaatgaatatgcgcagagcgctgtatctatcgcacaaagttcagatatggtgactggaattgtttgtcaatcaaatattttctcaaatttgggacttattcaattgacaccaggcgtgaaactgtcgaaaacttctgataatttagggcaacaatacaatataccagaatctgttgtaaattctggagctgatttagctgtagttggtagaggtattactgaagctcaagataaattggctgcaactttacaatacaaaaaagaactttggacagcttatctgaaacgaatatcgaattag

SEQ ID NO: 16639 - protein, 468 aa, Apis mellifera
MDAELKELAIALYEIDAFKFGDFVTKVGLKTPIYFDLRVLISHPKIMVRLAKILWTFAEECPDITQICGVPYTALPLATLISADSNVPMLIKRKEAKAYGTKKLIEGNFKQGDHCVIIEDVVTSGSSILETAFILRKEGLKVTDTFVVIDREQNGKKNIEHHGIRMRSLYTTTRLMAYLLEANKITPKIVKNVTDYLLKFQAPIISVQDKRLKTPFHIRSTKTKNAIASKLFNLMETKQSTICLAADLTKANDIIEIADLIGPHIVLFKTHIDILEDFSYDFIKRLKDLAKKHEFLLMEDRKFADIGNTVSLQYEKGIYKISEWADIVTVHAVAGPNIIDGLKNSLKNINEPRGLFILAEMSSKGALTVNEYAQSAVSIAQSSDMVTGIVCQSNIFSNLGLIQLTPGVKLSKTSDNLGQQYNIPESVVNSGADLAVVGRGITEAQDKLAATLQYKKELWTAYLKRISN

SEQ ID NO: 16640 - DNA, 1434 bp, Oryza sativa (japonica cultivar-group)
  CDS (1)..(1434)
atggacgccgccgcgcaggaatccctcatcctggagctccacgccatcgaggccatcaagttcggcaccttcgtgctcaagtccggcatcacctccccgatctacctcgacctccgcgcgctcgtctcccacccgggcctcctctcctccatcgccaccctcctccacaccctcccggcgacccgcccctacgacctcctctgcggcgtcccctacaccgcgctccccatcgcctccgtcctctccgtccaccgctccgtccccatggtcatgcgccgcaaggaggccaaggcccacggcaccgccaagtccatcgagggcgccttccgcgccggggaggccgtgctcatcatcgaggacctcgtcaccagcggcgcctccgttctcgagaccgccgcgccgctccgcgaccaggggctcgtcgtcgccgacgccgtcgtcgtcgtcgaccgcgagcagggcgggagggagaaccttgccgccaatgggatcacgctgcactcgctcatgaccctcacggaggtgctcgccgtgctgctcaagcacgggaaggtgaccgaggagaaggcgagggaggtaaggcagtttcttgacgccaataggaaggtgaccgttcccggagcggcgggcgccgttaagcccaaagcggtcaggaaggggtttgctgagagggctggattggccaagaacccgatggggaagaggcttttcgaggtgatggaggcaaagcagagcaatttatgtgttgctgccgatgtgggaactgcaaaggagctccttgagcttgcagagaaggttggtccagagatttgcatgctgaaaactcatgtggatatcttgtctgactttactccagattttggagctaagctttgctcgattgccgagaagcacaactttttgatatttgaagaccgcaagtttgctgacattggaaacacagtgactatgcaatatgaaggaggaatatttcgcatattagactgggctgatatcgtcaatgcccatataattcctggacctggaattgtggatggtctgaagcttaagggtttgccaaaaggaagagggctgcttttgcttgctgaaatgagctcggctggcaaccttgctcatggagagtacactgctgcagctgtaaagattgctgagcaacattctgattttgtaattggatttatatccgttaatccagcatcttggtcagttgcgccatcaagtccagcatttatccatgccactcctggagtgcagatggtttctggaggagatgctcttggtcaacagtacaatacccctcattctgttataaacgacagaggcagtgacataattatagtcggacgagggattataaaggcgagtaatccagccgagaccgcgagggagtaccgcatccaagggtggggagcataccaatccagcttgccatga

SEQ ID NO: 16641 - protein, 477 aa, Oryza sativa (japonica cultivar-group)
MDAAAQESLILELHAIEAIKFGTFVLKSGITSPIYLDLRALVSHPGLLSSIATLLHTLPATRPYDLLCGVPYTALPIASVLSVHRSVPMVMRRKEAKAHGTAKSIEGAFRAGEAVLIIEDLVTSGASVLETAAPLRDQGLVVADAVVVVDREQGGRENLAANGITLHSLMTLTEVLAVLLKHGKVTEEKAREVRQFLDANRKVTVPGAAGAVKPKAVRKGFAERAGLAKNPMGKRLFEVMEAKQSNLCVAADVGTAKELLELAEKVGPEICMLKTHVDILSDFTPDFGAKLCSIAEKHNFLIFEDRKFADIGNTVTMQYEGGIFRILDWADIVNAHIIPGPGIVDGLKLKGLPKGRGLLLLAEMSSAGNLAHGEYTAAAVKIAEQHSDFVIGFISVNPASWSVAPSSPAFIHATPGVQMVSGGDALGQQYNTPHSVINDRGSDIIIVGRGIIKASNPAETAREYRIQGWGAYQSSLP

SEQ ID NO: 16642 - DNA, 1428 bp, Oryza sativa (japonica cultivar-group)
  CDS (1)..(1428)
atggacgccgccgcaatggaatccctcatcctggagctccacgccatcgaggccgtcaagttcggcgccttcgtgctcaagtccggcatcacctccccgatctacctcgacctccgcatgctcgtcgcccacccgcgcctcctctccaccgtcgcctccctcctcggctccctcccggcgacccgcccctacgacctcctctgcggcgtcccctacaccgcgctccccatcgcctccgtcctctccgccgccgcctccgtccccatgctcctccgccgctaccacgtcacgccgcacgccgccgccgaatgcctcgacgggtccttccgcgccggggacgccgtgctcatcgtcgaggacctcgtcaccacgggctcctccgtgctcgagaccgtcgcgccactccgcgaggtcgggctcgtcgtcgccgacgccgtcgtggtcatcgaccgcgagcagggcgggagggagaacctcgccgcgaacggggtcgcgctccactcgctcatgacgctcacggaggtgctcgccgtcctcgtgaagcgcgggaagctgggcgaggagaaggcccaggaggtgaagcgattcctcgacgcaaacaggaagatggctgtgccgggactgccggttaaaccgaaagtagttaggaaggcattttctgagagagctggattggcgacgaatccgatggggaggaagctgttcgagttgatggaggccaagcaaagcaacttgtgtgttgctgcagatgtcgggacagcaacagagctacttgatctcgccgataagattggtccagagatctgcatgttgaaaactcatgtggatatcttgtctgattttacaccggattttggccacaagctccgttcgattgctgagaggcacagctttttgatatttgaagaccgcaagtttgcagacattggaaacacagtaactatgcaatatgaaggaggaatattccgcatattagactgggctgatattgttaatgcacatatagtttctggacctggaattgtagaaggcttgaagctgaagggtctgccaaaaggaagagggttacttttgctttctgaaatgagttcagctggcaaccttgctcatggagattacactgctgcagccgtgaagattgctgagcaacattctgatattgtaattggatttatatcagtaaatcctgcatcttggtcagtgacgccgtcaagtccagcgttcatccatgctactcctggagttcagttggttgctgggggagactcgcttggtcaacagtacaacactccttactctgtcataaacgacagaggcagcgacataattatagtcggtcgtgggattataagggcgaacaatcctgctgagaccgcgagagagtaccgcatccaaggatggcatgcttaccaatccagcttatcatga

SEQ ID NO: 16643 - protein, 475 aa, Oryza sativa (japonica cultivar-group)
MDAAAMESLILELHAIEAVKFGAFVLKSGITSPIYLDLRMLVAHPRLLSTVASLLGSLPATRPYDLLCGVPYTALPIASVLSAAASVPMLLRRYHVTPHAAAECLDGSFRAGDAVLIVEDLVTTGSSVLETVAPLREVGLVVADAVVVIDREQGGRENLAANGVALHSLMTLTEVLAVLVKRGKLGEEKAQEVKRFLDANRKMAVPGLPVKPKVVRKAFSERAGLATNPMGRKLFELMEAKQSNLCVAADVGTATELLDLADKIGPEICMLKTHVDILSDFTPDFGHKLRSIAERHSFLIFEDRKFADIGNTVTMQYEGGIFRILDWADIVNAHIVSGPGIVEGLKLKGLPKGRGLLLLSEMSSAGNLAHGDYTAAAVKIAEQHSDIVIGFISVNPASWSVTPSSPAFIHATPGVQLVAGGDSLGQQYNTPYSVINDRGSDIIIVGRGIIRANNPAETAREYRIQGWHAYQSSLS

SEQ ID NO: 16644 - DNA, 1437 bp, Dictyostelium discoideum
  CDS (1)..(1437)
atgaatattaaagaattagtattaaaattaaatgaaattgatgcaattaaattaggagaatttaaattaaagagtggtattatttcaccaatttatattgatcttagagttacagtatcatcaccaccattgttagcagcaattgcagagatgatgtatcaaaaggtttataaatctggtaatgcacaagagacaccagcattagtatgtggtgtaccatatacagcattaccaattgcaacaggtatgtcaattgccaacaatattccaatggtagtacgtagaaaagaagccaaagcatatggtaccaaacaattgattgaaggtcgtttcaaagagggtgacaatgtattggttgttgaagatttagtaacaagtggtgcaagtgtacttgaaacagttagagatttaaattcagttggtttaaaagttacagacgtagtcgtgttattagatcgtcaacaaggtgccagacaagcacttgagaaacaaggctaccgtcttcactcagtctttacaatggaagagttaatcaacaccttaatcgaagctggtaaattaaccggccgtactttagagttggttcaatcattcttagacgccaatcgtaatgtagtagtaccattaccaccaacccttgccccaccagcaccagcaccaattgttattaataaaccatttgaagagagagctaaacttgcatcaaatccaatggcatctaaattattcacattaatgtcaagcaagaagaccaatcttgcagttgcagctgatttaactgataaacaacaacttttagatttagcagaatcaattggttcagaaatttgtgttttgaagacccatgttgatatcattgataattatgatgaagagtttattaaatcattgaaatgcatagcagcaaaacataatttcttgatttttgaagatagaaaattcgcagatattggaaacactgtgaaatatcaatttgagaatggtgtttataaaatctcaaaatgggcagacatggtcaccgtacatggtgtcgcaggttcatccattgtcgatggtttcaaatcaggtttgaaagagtatggttcaggtttattattattggctcaaatgtcatcaaaaggttctttgtgtgttggtgattatacaactcaaatgattgaaatggcaaataataacaaagaggaggttatgggtttaatttgtcaagaacgattaccatcaatgactgatggtttggttttaatgactccaggtgttcaattcaattcaactggtgatgctatgggtcaacaatataatactccagaatatatcattaaagaaaagaatactgatgttatcattgttggtagaggtatttatcaaagtaatgatccaaaatctgttgcaaataaatatagaactgctgcttgggaaacttatcaatcaaaattttaa

SEQ ID NO: 16645 - protein, 478 aa, Dictyostelium discoideum
MNIKELVLKLNEIDAIKLGEFKLKSGIISPIYIDLRVTVSSPPLLAAIAEMMYQKVYKSGNAQETPALVCGVPYTALPIATGMSIANNIPMVVRRKEAKAYGTKQLIEGRFKEGDNVLVVEDLVTSGASVLETVRDLNSVGLKVTDVVVLLDRQQGARQALEKQGYRLHSVFTMEELINTLIEAGKLTGRTLELVQSFLDANRNVVVPLPPTLAPPAPAPIVINKPFEERAKLASNPMASKLFTLMSSKKTNLAVAADLTDKQQLLDLAESIGSEICVLKTHVDIIDNYDEEFIKSLKCIAAKHNFLIFEDRKFADIGNTVKYQFENGVYKISKWADMVTVHGVAGSSIVDGFKSGLKEYGSGLLLLAQMSSKGSLCVGDYTTQMIEMANNNKEEVMGLICQERLPSMTDGLVLMTPGVQFNSTGDAMGQQYNTPEYIIKEKNTDVIIVGRGIYQSNDPKSVANKYRTAAWETYQSKF

SEQ ID NO: 16646 - DNA, 708 bp, Desulfovibrio vulgaris subsp. vulgaris str. Hildenborough
  CDS (1)..(708): transl_table=11
atggccgaactcgttgtcgcactggattttcccgccgcagacgtggcggtggacatggcaggcagactccgcggcaccgcgccgtggatgaaggtaggcctcgaactcttctgcgccgcaggtcccgatgtcgtgcgtgccgtggcagacctcggcttcagggtctttctcgacctcaagttccacgacatccccaacacggtgcgcggtgcggtgcgttcggcggtgcgttccggggcggacatggtcaacatccatctcatgggcggcgaacgtatggcccgtgccgccgtggaaggtctgcacgagggtgcccagacgacgggttccgtaccgttgctcttcggggtgaccgtgctcaccagcaccgcacagggtgaactgccgggcatttcgacggacataggcgagtacgccgcctctctcgcggcatccggtgctgcgtggggcttgaacggggtcgtctgttcggggtatgaagtggagagcatcaagaagcgttgcggcgcatcgttcctgtgcctcactccgggcatccgtcccggtggcggggcagggggtgacgaccagcgccgggtgatgacacccgcacaggcggtgtccgccggttctgactacctcgttgtgggcaggcccgtgactggggctgccgaccccgctgccgcagcgcgcgccatcatggcggagatggctgcggtcaggcgatag

SEQ ID NO: 16647 - protein, 235 aa, Desulfovibrio vulgaris subsp. vulgaris str. Hildenborough
MAELVVALDFPAADVAVDMAGRLRGTAPWMKVGLELFCAAGPDVVRAVADLGFRVFLDLKFHDIPNTVRGAVRSAVRSGADMVNIHLMGGERMARAAVEGLHEGAQTTGSVPLLFGVTVLTSTAQGELPGISTDIGEYAASLAASGAAWGLNGVVCSGYEVESIKKRCGASFLCLTPGIRPGGGAGGDDQRRVMTPAQAVSAGSDYLVVGRPVTGAADPAAAARAIMAEMAAVRR

SEQ ID NO: 16648 - DNA, 624 bp, Picrophilus torridus DSM 9790
  CDS (1)..(624): transl_table=11
atgaacaggattatatttgcgcttgatgtttatgattataatgaggctttaaatttatcaaaagaactttcaaatgatgtctttgcgataaaggtaaactggccgcttgttatgaacaatggcatatcaatagttaaagagatatcaaggtattcaaatgttatatgtgatttcaagatagcggatatagacaacacaaacaggcttataactgaaaaggccagggaaaacaatgcctggggtattataacacattcatttacaggcagaaggagtctaaaggctgttgtttctgcggccggtgacatgaaggtcttttcccttgtttcaatgtcccaggaatcattcatagataattacacggacgatcttattaaaatgtccatggaggaaaatgtttacggccttgttgctcctggaaacagaatagatattttaagacatataagatcaatgtcgggtgatcttaaaataatagcgcctggcataggcgcccagggtggaagcataaccgatgcaatcatggccggtgcagattatgtaataataggcagatcgatatacagtgatccggagccattaaaaaaggttaaaagtttaaatgaaattttaggtgatgattaa

SEQ ID NO: 16649 - protein, 207 aa, Picrophilus torridus DSM 9790
MNRIIFALDVYDYNEALNLSKELSNDVFAIKVNWPLVMNNGISIVKEISRYSNVICDFKIADIDNTNRLITEKARENNAWGIITHSFTGRRSLKAVVSAAGDMKVFSLVSMSQESFIDNYTDDLIKMSMEENVYGLVAPGNRIDILRHIRSMSGDLKIIAPGIGAQGGSITDAIMAGADYVIIGRSIYSDPEPLKKVKSLNEILGDD

SEQ ID NO: 16650 - DNA, 696 bp, Staphylococcus aureus subsp. aureus MRSA252
  CDS (1)..(696): transl_table=11
atgatgaaagatttaccaattattgcattagattttgaatcaaaagaaaaagtaaatcaatttttagatttatttgatgaatcattattcgtaaaagtaggtatggaacttttttatcaagaaggtcctcaattaattaatgagataaaagaaagaggccatgatgtatttttagatttaaaactgcatgatattcccaatacagttggtaaagcgatggaaggactagctaaattgaatgttgatctggtaaatgttcatgctgctggtggcgtaaaaatgatgtctgaggccattaaaggattaagaaaacataatcaacatacaaaaattattgcagtaacacagcttacgtcaacaacagaagacatgttacgacacgaacaaaatatacaaacatcgattgaagaggccgttttaaattatgccaagttagcaaatgcagctggtttagatggcgttgtttgttcacctcttgaaagtcgtatgttgactgaaaagttaggtacatcatttttaaaagtaacaccaggcattagacctaaaggtgcatctcaagatgaccaacaccgtattacgacaccggaagaagcaagacagcttggttcgacgcatattgtagtcggtagaccgattacacaaagtgacaatccagtcgaaagttatcataaaattaaagaaagttggttagtataa

SEQ ID NO: 16651 - protein, 231 aa, Staphylococcus aureus subsp. aureus MRSA252
MMKDLPIIALDFESKEKVNQFLDLFDESLFVKVGMELFYQEGPQLINEIKERGHDVFLDLKLHDIPNTVGKAMEGLAKLNVDLVNVHAAGGVKMMSEAIKGLRKHNQHTKIIAVTQLTSTTEDMLRHEQNIQTSIEEAVLNYAKLANAAGLDGVVCSPLESRMLTEKLGTSFLKVTPGIRPKGASQDDQHRITTPEEARQLGSTHIVVGRPITQSDNPVESYHKIKESWLV

SEQ ID NO: 16652 - DNA, 684 bp, Acinetobacter sp. ADP1
  CDS (1)..(684): transl_table=11
gtgagtattattgttgccttagacgcaaagagccaatatgacgctttgagcattgctgatcagctcgatccatcactttgtcgtgtaaaagtgggcaaagagctttttactcatgatggtccacaaacagtaagaatcttacaagatcgtggttttgagttgtttttagaccttaaatttcatgacattccaaacaccacagcacaggctgtatgtgctgcggcagacttaggtgtatggatggtcaatgttcatgcgtctggcggtcgtaaaatgatggaaacctgtgttgaacgacttaaagctggaaattaccgtactcaacttattgcggtaacggtattaacctctatggggcgtgaagatttacgtgacattggtttagatgttgaaccttttgagcaagttaaacgtctggcacagctaacgcaagaaagcggtctggatggtgtggtatgttctgctcaagaagcaaaaatgttacgtgatttactaggaacagaatttgctttggtcactccaggtattcgacctgagggtgcaaatgcagatgaccaaaaacgcattgtgacgccaaagcaggcaatgttggatggttcgactcatctagtcattggtcgtccaattacaaaatccgaacgaccaaatgaaatgttgaaacagattttatcgagtctggcttaa

SEQ ID NO: 16653 - protein, 227 aa, Acinetobacter sp. ADP1
MSIIVALDAKSQYDALSIADQLDPSLCRVKVGKELFTHDGPQTVRILQDRGFELFLDLKFHDIPNTTAQAVCAAADLGVWMVNVHASGGRKMMETCVERLKAGNYRTQLIAVTVLTSMGREDLRDIGLDVEPFEQVKRLAQLTQESGLDGVVCSAQEAKMLRDLLGTEFALVTPGIRPEGANADDQKRIVTPKQAMLDGSTHLVIGRPITKSERPNEMLKQILSSLA

SEQ ID NO: 16654 - DNA, 744 bp, Erwinia carotovora subsp. atroseptica SCRI1043
  CDS (1)..(744)
atgaaaaacgagaatctacagcaaaagaatcaaacggtatcatccccgattgttgtcgcgctggactatgccagtcaggatgcggcgctgtcgtttgttgaccgtatcgatccgcaggattgccgtttgaaggtaggcaaagagatgtttaccttatttggtccacagttcgtgcagacgttgcaacagcgcggctttgatgtgtttctcgatctgaaattccacgatattccgaacaccgtcgcgcatgctgtggcggcagccgccgatcttggcgtgtggatggtcaatgtccacgccagcggcggttcgcgtatgatggcagcggcgaaagacgcgctggtgccgtttggtaaagatgcaccgctgctgattgccgtgaccgtgttgaccagtatggacgaagaagatctacgcgggcttggcattaccgttagcccagcggagcaggcggaaaggctggctgtactaacgcataacagtgggttggatggcgtggtgtgctctgcacatgaagcgcagcggttgaagcaggtatgcggtcaggcatttaagctaatcacgccggggattcgccccgcaggtagtgacgttggcgatcagcgccgcatcatgacgcccattcaggcgcagcaggcgggtgtggattacatggtgattggacgtccgatcacccaatcgtcggatccggctcagacgctgtgtgatattcgcgcgtcgctgctaaacggtattgcatcatga

SEQ ID NO: 16655 - protein, 247 aa, Erwinia carotovora subsp. atroseptica SCRI1043
MKNENLQQKNQTVSSPIVVALDYASQDAALSFVDRIDPQDCRLKVGKEMFTLFGPQFVQTLQQRGFDVFLDLKFHDIPNTVAHAVAAAADLGVWMVNVHASGGSRMMAAAKDALVPFGKDAPLLIAVTVLTSMDEEDLRGLGITVSPAEQAERLAVLTHNSGLDGVVCSAHEAQRLKQVCGQAFKLITPGIRPAGSDVGDQRRIMTPIQAQQAGVDYMVIGRPITQSSDPAQTLCDIRASLLNGIAS

SEQ ID NO: 16656 - DNA, 711 bp, Propionibacterium acnes KPA171202
  CDS (1)..(711): transl_table=11
atggacatcacccgcccgattatcgctctcgatcttcctagcgccgaggcagctcttgacttcgtaggtcgattcgacggggagaatcttttcgtcaaagtcggcatggagttgttttacgcagcggggcctagtgtggtgaccagcctcaaggaggccgggcacgacgtcttctgtgacctcaagcttcacgacattcccaataccgtcaagggtgccgcttctagcctctccaggctgggcgcggacctactcaccgtccatgcagccggtggtaggagcatgatggaggcttcgcttgagggcctgggagatgccgccgagaccactcgtgtcatcgccattactcaactcacctccacctccccggaggcgttgaaaactgagcagctagtggatgtgccgcttgtcgagtcggtgcgcaactacgccaagctcgcccaggctgctggactggccggagtcgtctgttcggctcacgaggccgccgatatcgcctcggtaaccggtccaaacttcctgcgcgtcacgccgggaattcgtccggcagggtccgcagtaggggatcagtccagggtcgccactccgggcaacgccgcctcgatggggtcttcggcgatcgtggtcgggcggcccattaccaaagctgacgacccggtagccgcttatcacgctattcgcgatgactggaatgccgggcgtaaggcctga

SEQ ID NO: 16657 - protein, 236 aa, Propionibacterium acnes KPA171202
MDITRPIIALDLPSAEAALDFVGRFDGENLFVKVGMELFYAAGPSVVTSLKEAGHDVFCDLKLHDIPNTVKGAASSLSRLGADLLTVHAAGGRSMMEASLEGLGDAAETTRVIAITQLTSTSPEALKTEQLVDVPLVESVRNYAKLAQAAGLAGVVCSAHEAADIASVTGPNFLRVTPGIRPAGSAVGDQSRVATPGNAASMGSSAIVVGRPITKADDPVAAYHAIRDDWNAGRKA

SEQ ID NO: 16658 - DNA, 711 bp, Desulfotalea psychrophila LSv54
  CDS (1)..(711): transl_table=11
atgacaaatatcccgcttaatgaacgagtaattgtagcacttgaccttgactcacctgaagcagttaaagagatggtgaaaaagtgcgagcctgagacgaatttttttaagattggtttacaggtctttatgaatagccattttgataccgttgactggattcttgatcgaggtcataaggtaatgctcgatttgaaattttttgatattcctgaaacggtaaaactggccattgagcaggtaaatcaacggggcgtttccctggtaaccattcatggtaatgaccctattatcagggcagctgtatcggctgcccgtggcgatatgaagttgcttgccgtaactgttcttaccagctttggcgaagaggatatgcgagccatgggcatgactggaagcatagaggatctggtttatttcagggcgaaacgggcccttgaattgggttgtgatggcgttgtttcttcagggcttgaggcagcacgtatgcgtagagacttgggagagaaactcttgattgtgactcccggcattcgtcccggggcaaatatcagcgatggatcagatgatcaaacgcgcattgttaccgctggtactgccataaaaaatggtgccaaccatgttgtggttgggcgtcctattacaaaatctgctgatccggctgctgttattgccatgatgaaggctgatattgaagcatcttgcatgtag

SEQ ID NO: 16659 - protein, 236 aa, Desulfotalea psychrophila LSv54
MTNIPLNERVIVALDLDSPEAVKEMVKKCEPETNFFKIGLQVFMNSHFDTVDWILDRGHKVMLDLKFFDIPETVKLAIEQVNQRGVSLVTIHGNDPIIRAAVSAARGDMKLLAVTVLTSFGEEDMRAMGMTGSIEDLVYFRAKRALELGCDGVVSSGLEAARMRRDLGEKLLIVTPGIRPGANISDGSDDQTRIVTAGTAIKNGANHVVVGRPITKSADPAAVIAMMKADIEASCM

SEQ ID NO: 16660 - DNA, 738 bp, Yersinia pseudotuberculosis IP 32953
  CDS (1)..(738): transl_table=11
atgacgtccgcaactaaaactaataacagtggctcaatatcctccccaattgttgttgcgttggattatgccaataaagacgctgcgttagcctttgctgatcaggttagtccacaggattgccggttaaaagtgggcaaagagatgtttacgctgtacggccccgagcttatccgtgacttacatcagcgcggctttgacgtatttcttgatttgaaattccatgacatccctaatactaccgcgcgtgccgtggctgcggcagcagagttgggggtctggatggtcaatgttcatgccagtggcggtgcccgcatgatgtcggcggcgaaagaagccttattgccttatggtgcacaagcccccttactgattgccgttactgtactgaccagcatggatagcgaagatctgcgggatatcggtattactatcagtccggctgagcaggccgagcggttagcgaaactgacctgggattgcggtttggatggcgtggtgtgctcggctcatgaagcggtgcgtttgaagcaagtttgtggcgaagacttctcgctcgttaccccaggtattcgcccacaaggcagtgaagccggtgaccagcggcggatcatgacacctgaacaggcggtagctgtaggtgttgattacatggtaatcggtcgcccaattacacaatctcctgatccggaaaaaacgctgcgcgaaatattggcatcactgacgaaggtggcataa

SEQ ID NO: 16661 - protein, 245 aa, Yersinia pseudotuberculosis IP 32953
MTSATKTNNSGSISSPIVVALDYANKDAALAFADQVSPQDCRLKVGKEMFTLYGPELIRDLHQRGFDVFLDLKFHDIPNTTARAVAAAAELGVWMVNVHASGGARMMSAAKEALLPYGAQAPLLIAVTVLTSMDSEDLRDIGITISPAEQAERLAKLTWDCGLDGVVCSAHEAVRLKQVCGEDFSLVTPGIRPQGSEAGDQRRIMTPEQAVAVGVDYMVIGRPITQSPDPEKTLREILASLTKVA

SEQ ID NO: 16662 - DNA, 720 bp, Bacillus licheniformis ATCC 14580
  CDS (1)..(720): transl_table=11
atgaacaatacgccgcccatcatcgcgcttgattttgcatcagcacaggaaacatatgcgtttttggaccggtttcaaggagaagagctgttcgttaaggtgggcatggagcttttttatcaggaaggacctgccatccttgaaaatctgcaggagcgcggctgccgcattttcctcgatctaaagtgccacgacattccaacgaccgtatacaaggcgatgaaaaggctggcgggatttggcgtcagtcttgtcaatgtgcacgcagcaggcggaaagcaaatgatggagtcggcgcttgaaggccttgaagcggggactccggcaggccaaaaacgcccttcattaattgccgtgactcagctgacaagcacgtcctcagaaatgcttcagcgtgagctcctgattgaaacgccgcttctcgatacagttgtccactacagccggctggctgaagaaagcggtcttgacggcgtcgtctgctccgttcatgaagccgaacacatttaccgggctgtgtctgtagattttctgaccgtgacacccggaattcgcatggcagatgacaaaaacaacgaccaggtccgggtggcgacgcctggctacgcaagggaaaaaggcgtgtcggcgatcgttgtcggccgttcgattacccaggcggaagatcctgtgtcagcctacagaagaataggacatgagtgggagggaaccaaggcatga

SEQ ID NO: 16663 - protein, 239 aa, Bacillus licheniformis ATCC 14580
MNNTPPIIALDFASAQETYAFLDRFQGEELFVKVGMELFYQEGPAILENLQERGCRIFLDLKCHDIPTTVYKAMKRLAGFGVSLVNVHAAGGKQMMESALEGLEAGTPAGQKRPSLIAVTQLTSTSSEMLQRELLIETPLLDTVVHYSRLAEESGLDGVVCSVHEAEHIYRAVSVDFLTVTPGIRMADDKNNDQVRVATPGYAREKGVSAIVVGRSITQAEDPVSAYRRIGHEWEGTKA

SEQ ID NO: 16664 - DNA, 738 bp, Mannheimia succiniciproducens MBEL55E
  CDS (1)..(738): transl_table=11
ttgaaagccaaatttagcaaagaggaagttaatatgagtaataaaattatcgtagcattagattacgaaacggaaaaagaagcgctccaattagtggatcaaatcgatccgagtttatgccgcttaaaagtgggtaaagaaatgtttactaccttaggtacaaattttgtaaaactgctgcaagaccgtgactttgatgtgtttttggatttaaaattccacgatattccgaatacggttgcaagagcggtacgttcagccgccgatcttggagtatggatggtggatctacatgccagcggcggtttacgaatgatggaagaagcgaagaagattcttgagccttacggtaaagatgcgccgattctgattagcgttaccgttttaaccagtatggaagatttggatttgttacaaatcggtattaacgcttcaccgatggagcaagttatccgccttgctcatctaagtcaacgtgcgggtttagacggtgtggtttgttcgccgcaggaagtggaaattttacgtcaacatttaggtaaagagttcaaattaattacaccgggaattcgtcccgtgggttctgaattcggtgatcaacgccgagtcatgactcctccggcggcaattgaagccggttccgattatttagtgattgggcgcccgattacgcaagcggcaaatccggctgaagtgttgcgttcaattaatgcgtctattgcgaatttaatcgcttaa

SEQ ID NO: 16665 - protein, 245 aa, Mannheimia succiniciproducens MBEL55E
MKAKFSKEEVNMSNKIIVALDYETEKEALQLVDQIDPSLCRLKVGKEMFTTLGTNFVKLLQDRDFDVFLDLKFHDIPNTVARAVRSAADLGVWMVDLHASGGLRMMEEAKKILEPYGKDAPILISVTVLTSMEDLDLLQIGINASPMEQVIRLAHLSQRAGLDGVVCSPQEVEILRQHLGKEFKLITPGIRPVGSEFGDQRRVMTPPAAIEAGSDYLVIGRPITQAANPAEVLRSINASIANLIA

SEQ ID NO: 16666 - DNA, 690 bp, Legionella pneumophila subsp. pneumophila str. Philadelphia 1
  CDS (1)..(690): transl_table=11
atgacacctaaattaatcgttgcgttggattttgataatcaagataacgctatacagttggttgaaaaacttgatccgaatcattgcgcacttaaggttgggagtgagctttttactctattagggcctcagtttgtaaaagcattggtaagaagagagtttaaagtatttttagatttaaaatttcacgatatccctaatacagttgctaaagcatgccactccgctgcagaattaggggtatggatgataaatgttcatgccatcggcggcttaaaaatgttacaagctgccagggaatctttaaaaacgtatggtaaagacaggcctttgttgatagcagtgactgtgctgaccagttttgaagaaggggagctggccagtgttggtattagtaacacattgcctgagcaagcaacccatctggctatgcttgccagagaggctgggcttgatggtgtggtaagctctgcacatgaagttaaaattataaaacagaagtgtggtgagaattttattaccgttactcctggcataagactgccaaataatctaaaagatgatcaatcgcgagtaatgactccacaacaagccatcagagaaggaagtgattttctggttattggaagaccaattacgcaagcgagcaatccttatgaggttgtctcagcattattacgtgatctttga

SEQ ID NO: 16667 - protein, 229 aa, Legionella pneumophila subsp. pneumophila str. Philadelphia 1
MTPKLIVALDFDNQDNAIQLVEKLDPNHCALKVGSELFTLLGPQFVKALVRREFKVFLDLKFHDIPNTVAKACHSAAELGVWMINVHAIGGLKMLQAARESLKTYGKDRPLLIAVTVLTSFEEGELASVGISNTLPEQATHLAMLAREAGLDGVVSSAHEVKIIKQKCGENFITVTPGIRLPNNLKDDQSRVMTPQQAIREGSDFLVIGRPITQASNPYEVVSALLRDL

SEQ ID NO: 16668 - DNA, 729 bp, Methylococcus capsulatus str. Bath
  CDS (1)..(729): transl_table=11
atgccgaatttcctttcgaacaagcccattcccgtggccgatcgcctgatcatggcgctggacctgccggatgtctccgaagccaagaccttggtggaacgcctcggcgacgccgtgagcttctacaaggtggggctggaactgttcatgtccggcgactgtttcgctttggtggattggctcaaggccaaagacaagaaggttttcgtcgatctcaagttcttcgacgtgccggagaccgtcggccgcgcggtcaaggcgctgagccggcgcggggtggatttcgccaccgtgcacggcaacgatgcgatcatggaggcggcggcccgcaacaaggggagcctcggcattctggcggtcacggttctgaccagcctggaccagggggatctgcgtgatctcggcttccagtgcgacgtgcaggaattggtcttgtcccgtgcccggcgcgccctggcagtgggttgcgacggggtggtgtcgtccgggctcgaggtcccgctgttgcgcggtgagatcgaccacgagctaatggtcgtgtcgcccggcatccggcctgtcgaaaaccgtcctgaggacgaccagaagcgggtggttacggtcgatcaggcgttccgcaacggtgccgattacatcgtggtggggcggccgatccgcgatgcagccgatccccgcgaggctgcccagcgggcacaggctcagatccgcgacgtgttcgcggcgggctga

SEQ ID NO: 16669 - protein, 242 aa, Methylococcus capsulatus str. Bath
MPNFLSNKPIPVADRLIMALDLPDVSEAKTLVERLGDAVSFYKVGLELFMSGDCFALVDWLKAKDKKVFVDLKFFDVPETVGRAVKALSRRGVDFATVHGNDAIMEAAARNKGSLGILAVTVLTSLDQGDLRDLGFQCDVQELVLSRARRALAVGCDGVVSSGLEVPLLRGEIDHELMVVSPGIRPVENRPEDDQKRVVTVDQAFRNGADYIVVGRPIRDAADPREAAQRAQAQIRDVFAAG

SEQ ID NO: 16670 - DNA, 699 bp, Nocardia farcinica IFM 10152
  CDS (1)..(699): transl_table=11
atgcccaccaccacgaccgtcagaggccggctggctatcgcgctcgacaccagcgatctggacaccgcggtgtcgatcgcgaaggccgtgcagcccgacatcggcgtcgccaaagtcggccttcaactgttcagcgcggcggggcgcgacgccgtgcgcgctatgcaggatctcggcatggacgtcttcctcgacgtcaagctgcacgacatccccaacaccgtctacggggccagcaccgtcctcggagccctgggcgtccaatacctgaccgtccacgcaggcggtggaacggccatgctcgaagctgcggtgaggggactcggcgagggcgcgagcagcgccgggttcgcagccccgaccgtgctggcggtcaccgtgctgaccagcgcgccggacgcatcgccggaacttctcaacgaacgcctggcggcggctgtcgccgccgattgtggcggcgttgtctgcgcggccagcgacctgcccgtcattcgcgccgctgcgcccgacatcctgaccgtggttcccggcatccgtccggccggcggcgaggtgcacgaccagcagcgtgtggcgacccctgccgatgccattcgcagtggtgcaagcattctcgtcctcggtcgagcgatcaccgctgctccggaccccgccgaagccgcgcgggccatcaccgaggaagtcgcgcaagcactttga

SEQ ID NO: 16671 - protein, 232 aa, Nocardia farcinica IFM 10152
MPTTTTVRGRLAIALDTSDLDTAVSIAKAVQPDIGVAKVGLQLFSAAGRDAVRAMQDLGMDVFLDVKLHDIPNTVYGASTVLGALGVQYLTVHAGGGTAMLEAAVRGLGEGASSAGFAAPTVLAVTVLTSAPDASPELLNERLAAAVAADCGGVVCAASDLPVIRAAAPDILTVVPGIRPAGGEVHDQQRVATPADAIRSGASILVLGRAITAAPDPAEAARAITEEVAQAL

SEQ ID NO: 16672 - DNA, 690 bp, Legionella pneumophila str. Paris
  CDS (1)..(690): transl_table=11
atgacacctaaattaatcgttgcgttggattttgataatcaagataacgctttacagttggttgacaaactggatccgaatcattgcgcacttaaggttggaagtgagctttttactctattagggcctcagtttgtaaaagaattggtaagaagagagtttaaagtatttttagatttaaaatttcacgatatccctaatacagttgctaaagcatgccactccgctgcagaattaggggtatggatgataaatgttcatgccatcggtggcttaagaatgttgcaagctgccagagaatctttaaaaacgtatggtaaagacaggcctttgttgattgcagtgactgtgctgaccagttttgaagaaggggagctggccagtgttggtattagtaatacattgcctgagcaagcaacccatctggctatgcttgccagagaggctgggcttgatggtgtggtaagctctgcacatgaagttaaaattataaaacagaagtgtggtgagaattttattaccgttactcctggcataagactgccaaataatctaaaagatgatcaatcgcgagtaatgactccacaacaagccatcagagaaggaagtgattttctggttattggaagaccaattacgcaagcgagcaatcctcatgaggttgtctcagctctattgcgtgatctttga

SEQ ID NO: 16673 - protein, 229 aa, Legionella pneumophila str. Paris
MTPKLIVALDFDNQDNALQLVDKLDPNHCALKVGSELFTLLGPQFVKELVRREFKVFLDLKFHDIPNTVAKACHSAAELGVWMINVHAIGGLRMLQAARESLKTYGKDRPLLIAVTVLTSFEEGELASVGISNTLPEQATHLAMLAREAGLDGVVSSAHEVKIIKQKCGENFITVTPGIRLPNNLKDDQSRVMTPQQAIREGSDFLVIGRPITQASNPHEVVSALLRDL

SEQ ID NO: 16674 - DNA, 690 bp, Legionella pneumophila str. Lens
  CDS (1)..(690): transl_table=11
atgacacctaaattaatcgttgcgttggattttgataatcaagataacgctttacagttggttgaaaaacttgatccgaatcattgcgcacttaaggttgggagtgagctttttactctattagggcctcagtttgtaaaagaattggtaagaagagagtttaaagtatttttagatttaaaatttcacgatatccctaatacagttgctaaagcatgctactccgctgcagaattaggggtatggatgataaatgttcatgccatcggcggcttaaaaatgttgcaagctgccagggaatctttaaaaacgtatggtaaagacaggcctttgttgattgcagtgactgtgttgaccagttttgaagaaggggagctggccagtgttggtattaggaatacattgcctgagcaagcaactcatctggctatgcttgccagagaggctgggcttgatggtgtggtaagctctgcacatgaagttaaaattataaaacagaagtgtggtgagaattttattaccgttactcctggcataagactgccaaataatctaaaagatgatcaatcgcgagtaatgactccacaacaagccatcagagaaggaagtgattttctggttattggaagaccaattacgcaagcgagcaatccttatgaggttgtctcagcactattgcgtgatctttga

SEQ ID NO: 16675 - protein, 229 aa, Legionella pneumophila str. Lens
MTPKLIVALDFDNQDNALQLVEKLDPNHCALKVGSELFTLLGPQFVKELVRREFKVFLDLKFHDIPNTVAKACYSAAELGVWMINVHAIGGLKMLQAARESLKTYGKDRPLLIAVTVLTSFEEGELASVGIRNTLPEQATHLAMLAREAGLDGVVSSAHEVKIIKQKCGENFITVTPGIRLPNNLKDDQSRVMTPQQAIREGSDFLVIGRPITQASNPYEVVSALLRDL

SEQ ID NO: 16676 - DNA, 696 bp, Photobacterium profundum SS9
  CDS (1)..(696): transl_table=11
atgttagaccctaaagtgattgtcgcactcgactacccgaaccaagatgcagcattagcgtttgtcgaccgtattgagccgggaagctgccgtctaaaagtgggtaaagaaatgttcactttatatggccctgacttcgtgcgtaagttgcatgaatgtggtcactctgtatttttagacctgaaattccatgatattccaaatacttgttcgcgtgctgttgcagctgcggcagagttaggtgtttggatggtgaacgttcatgcaagtggcggtgaacgcatgatggctgcatcacgtgatattcttgagccgtatggtaaagatcgtccgctattgattgcggtaacggtattaaccagtatggaagcatcagatcttgcgggtattggtattgcctgtgcaccacaagaacaagtattaaacttggcaacattaactaaaaacagtggtctcgatggcgtagtctgttcagctcaagaatcaacgatgttgaaatcagcactgggtaaagagtttcagttaattactccaggcattcgtcctgttggtagtgctgctggcgatcagcgtcgtgttatgacaccagttgaagccgttagtgcgggatctgattacttagttatcggccgccctattacacaggcaactgatccttctgctgtattagctgaaatcaatcaatcactggcttaa

SEQ ID NO: 16677 - protein, 231 aa, Photobacterium profundum SS9
MLDPKVIVALDYPNQDAALAFVDRIEPGSCRLKVGKEMFTLYGPDFVRKLHECGHSVFLDLKFHDIPNTCSRAVAAAAELGVWMVNVHASGGERMMAASRDILEPYGKDRPLLIAVTVLTSMEASDLAGIGIACAPQEQVLNLATLTKNSGLDGVVCSAQESTMLKSALGKEFQLITPGIRPVGSAAGDQRRVMTPVEAVSAGSDYLVIGRPITQATDPSAVLAEINQSLA

SEQ ID NO: 16678 - DNA, 696 bp, Streptococcus thermophilus LMG 18311
  CDS (1)..(696): transl_table=11
atgagagaaaatcgtcctgttattgcccttgatttcccgactcttgaggatgtgaaggctttccttgctaagtttcctgctgatgaaaagctctatgtgaagattggtatggagctttactatgcggctggtcctgagattgtacgctacgttaaagagcttggccatagtgttttccttgaccttaagcttcacgatattccaaatactgtcaaatcagctatgcgtgtcttgtctaaccttggcgttgatatgacaaatgtgcatgcggctggtggtgtggagatgatgaaagctgcgcgtgaaggcttgggagatggaccaatcttgattgctgtaacccagttgacctctacgtctgaagagcagatgcgtgattttcaaaatatccaaaccacacttcaagaatcagtggttcattatgctcagaaaactgctgaagcaggtctcgatggtgttgtctgttcagcacacgaagtagccaaaatcaaagaagcaactaaccaagacttcgtttgtttgacacctggtattcgtccagcaggagcagcggttggtgaccaaaaacgggtcatgacacctgctgatgctcatcaaattggttcagactacattgttgtcggtcgcccaattacgcaagctgaagatccagtggcagcttatcacgacatcaaggcccaatggaacgatcaataa

SEQ ID NO: 16679 - protein, 231 aa, Streptococcus thermophilus LMG 18311
MRENRPVIALDFPTLEDVKAFLAKFPADEKLYVKIGMELYYAAGPEIVRYVKELGHSVFLDLKLHDIPNTVKSAMRVLSNLGVDMTNVHAAGGVEMMKAAREGLGDGPILIAVTQLTSTSEEQMRDFQNIQTTLQESVVHYAQKTAEAGLDGVVCSAHEVAKIKEATNQDFVCLTPGIRPAGAAVGDQKRVMTPADAHQIGSDYIVVGRPITQAEDPVAAYHDIKAQWNDQ

SEQ ID NO: 16680 - DNA, 696 bp, Streptococcus thermophilus CNRZ1066
  CDS (1)..(696): transl_table=11
atgagagaaaatcgtcctgttattgcccttgatttcccgactcttgaggatgtgaaggctttccttgctaagtttcctgctgatgaaaagctctatgtgaagattggtatggaactttactatgcagctggtcctgagattgtacgctacgttaaagagcttggccatagtgttttccttgaccttaagcttcacgatattccaaatactgtcaaatcagctatgcgtgtcttgtctaaccttggcgttgatatgacaaatgtgcatgcggctggtggtgtggagatgatgaaagctgcgcgtgaaggcttgggagagggaccaatcttgattgctgtaacccagttgacctctacgtctgaagagcagatgcgtgattttcaaaatatccaaaccacacttcaagaatcagtggttcattatgctcagaaaactgctgaagcaggtctcaatggtgttgtctgttcagcacacgaagtagccaaaatcaaagaagcaactaaccaagacttcgtttgtttgacacctggtattcgtccagcaggagcagcggttggtgaccaaaaacgggtcatgacacctgatgatgctcatcaaattggttcagactacattgttgtcggtcgcccaattacgcaagctgaagatccagtggcagcttatcacgacatcaaggcccaatggaacgatcaataa

SEQ ID NO: 16681 - protein, 231 aa, Streptococcus thermophilus CNRZ1066
MRENRPVIALDFPTLEDVKAFLAKFPADEKLYVKIGMELYYAAGPEIVRYVKELGHSVFLDLKLHDIPNTVKSAMRVLSNLGVDMTNVHAAGGVEMMKAAREGLGEGPILIAVTQLTSTSEEQMRDFQNIQTTLQESVVHYAQKTAEAGLNGVVCSAHEVAKIKEATNQDFVCLTPGIRPAGAAVGDQKRVMTPDDAHQIGSDYIVVGRPITQAEDPVAAYHDIKAQWNDQ

SEQ ID NO: 16682 - DNA, 735 bp, Geobacillus kaustophilus HTA426
  CDS (1)..(735): transl_table=11
gtgcacacgccgttcattgtcgcgcttgatttcccatcaaaacaagaggtggagcggtttttgcggccgtttgccggaacgccgctgttcgtcaaagtcggcatggagctgtactatcaggaaggtccagccatcgtcgcgtttctcaaagaacaaggacatgccgtctttttagacttaaaactgcacgacattccgaatacggtgaaacaggcgatgaaagggctcgcccgcgtcggcgccgatttggtgaacgtccacgccgccggcggccggcgcatgatggaagcggcgatcgaggggcttgacgccggcacgccaagcggaagaatgcggccgcgctgcatcgctgtcacccagctgacaagcacggacgagcgaatgcttcatgaggagctgtggatttcccgcccgcttgtggaaacagtcgcccattacgccgccttggcgaaagaaagcggccttgacggcgtcgtctgttcagcgaacgaagcggcgttcatcaaagaacggtgcggcgcctcgttccttgccgtcaccccgggtatccgctttgctgatgatgcggcgcacgaccaagtgcgcgtcgtcaccccaaggaaagcgcgtgcgcttggttctgactacatcgtcatcggccgcagcctcacccgcgccgccgatccgctcaggacgtatgcccgcctgcaacacgaatggaacggaggagagagagagtcaactacccccacttag

SEQ ID NO: 16683 - protein, 244 aa, Geobacillus kaustophilus HTA426
MHTPFIVALDFPSKQEVERFLRPFAGTPLFVKVGMELYYQEGPAIVAFLKEQGHAVFLDLKLHDIPNTVKQAMKGLARVGADLVNVHAAGGRRMMEAAIEGLDAGTPSGRMRPRCIAVTQLTSTDERMLHEELWISRPLVETVAHYAALAKESGLDGVVCSANEAAFIKERCGASFLAVTPGIRFADDAAHDQVRVVTPRKARALGSDYIVIGRSLTRAADPLRTYARLQHEWNGGERESTTPT

SEQ ID NO: 16684 - DNA, 738 bp, Salmonella enterica subsp. enterica serovar Paratyphi A str. ATCC
  CDS (1)..(738): transl_table=11
atgacgtttactgcttcatcttcttcctgcgctattactgaatcgcctgtcgttgtggcgttggattaccatgaacgcgataaagccctggcgtttgtcgataaaatcgatcctcgcgattgtcgcttaaaagtgggcaaagagatgttcacgctgtttggtccacagctcgttcgggatctccagcaacgtgggtttgatgtctttcttgatctaaaatttcatgatattcccaacaccacggcccgggcagtcgccgcagcggcagacctgggcgtctggatggtaaacgttcacgcgtctggcggggcgagaatgatggccgcagcgcgcgacgcgctggcgccattcggtaaagatgcgccgttgctcattgccgtgaccgtgttgaccagtatggaaaccagcgatctgcgtgatcttggcgtgacgttgtcaccggcggaacatgcggagcggctggcgcgcctgacgcagcaatgcgggctggatggcgtggtctgttccgctcaggaagcggtcagatttaaacaggtctttggcgctgcatttaagctggtgacgccgggcattcggcccgcaggcagcgaggcaggcgaccagcgacgcattatgacgcccgaacaggcattatccgccggcgtcgactatatggtgattggccgcccggttacgcaatcagtagatccggcgcaaacgctgaaggatattaacgcgtcactgaaacgggaggcataa

SEQ ID NO: 16685 - protein, 245 aa, Salmonella enterica subsp. enterica serovar Paratyphi A str. ATCC
MTFTASSSSCAITESPVVVALDYHERDKALAFVDKIDPRDCRLKVGKEMFTLFGPQLVRDLQQRGFDVFLDLKFHDIPNTTARAVAAAADLGVWMVNVHASGGARMMAAARDALAPFGKDAPLLIAVTVLTSMETSDLRDLGVTLSPAEHAERLARLTQQCGLDGVVCSAQEAVRFKQVFGAAFKLVTPGIRPAGSEAGDQRRIMTPEQALSAGVDYMVIGRPVTQSVDPAQTLKDINASLKREA

SEQ ID NO: 16686 - DNA, 720 bp, Anaplasma marginale str. St. Maries
  CDS (1)..(720): transl_table=11
ttgcactttttgacaagtgttcacgtcactacaatgcgcagtagtccgataatttgtgcgctggatatgatggatatcacccgcgcacttgaggtgactaaggcgatatccggcaaggttgccatggtaaaattggggctggagttcttcactgcatacggtattactggtgtgcggcaggtaattgagctcggcgtacccgtgtttcttgacctaaagcttcatgatatcccaaatacggtggttagggccatacattcggtcaaagacttaaatattgccatgcttaccattcacgtgagtggggggaaggacatgatgcgcgccgcggctgatgccttgtctgatacaaatatacttcttgccggggttacggttttgacgagcattggcggcgatgacttcatagatttcggaatacatgagtctttggaatctcacgtcatgaggctggtaggcctggctgtggatgccgggttgcgagctgtggtatgttctgcccatgaagtcggtgtgatacgtggcagatatccggacattacgcttgttgttcccggaattcgctttaattctggagttgatgatcaaaaacggacaaaaacacccatggatgcgctgtcagatggagcgaactatttagttgttggccgtcctgtgacccaaagccctgatccattagccgcgattgacgaaattctccgctctataggggtgcactga

SEQ ID NO: 16687 - protein, 239 aa, Anaplasma marginale str. St. Maries
MHFLTSVHVTTMRSSPIICALDMMDITRALEVTKAISGKVAMVKLGLEFFTAYGITGVRQVIELGVPVFLDLKLHDIPNTVVRAIHSVKDLNIAMLTIHVSGGKDMMRAAADALSDTNILLAGVTVLTSIGGDDFIDFGIHESLESHVMRLVGLAVDAGLRAVVCSAHEVGVIRGRYPDITLVVPGIRFNSGVDDQKRTKTPMDALSDGANYLVVGRPVTQSPDPLAAIDEILRSIGVH

SEQ ID NO: 16688 - DNA, 696 bp, Idiomarina loihiensis L2TR
  CDS (1)..(696): transl_table=11
atggcgttaccgaaaatttatgttgcattagattgccagacacaggaagccgctgacaatttagtgagtcaattaccagctggaaaagttggtcttaaagtgggtaaggaattgtttactgctattggacctgactgggtgaaaaagcaggttgagcaaggtttttcagtatttttagatttaaagtttcatgatattccaaacacagtggctaaggcggtaacctcagcagctaaaatcggtgttgatatagtgaacgtgcacgccagcggcggtaccgaaatgatgagcgcagcaagggatgcattaaagcaatttgataaaccacctttgttaattgctgtgacggtacttactagcatgagtgattcagacctaaacgaaatcggaattcaggcaactgcggaacagcaagtacttaaactggcaaaactagcgcagcaggctggcttgaacggcgtggtttgctctgctcaggaagctcgtatgctgaaacatgatttgggtacgtcatttaagcttgtaacgccgggtatccgacccgccaacagcgccactggtgaccaaaagcgggttatgacaccagaagccgcaatagaggctggagtcgattacatggttattgggcgacccattacgcaggcagctgacccaaccgccagcgttgcggagatattaacctctataggagaataa

SEQ ID NO: 16689 - protein, 231 aa, Idiomarina loihiensis L2TR
MALPKIYVALDCQTQEAADNLVSQLPAGKVGLKVGKELFTAIGPDWVKKQVEQGFSVFLDLKFHDIPNTVAKAVTSAAKIGVDIVNVHASGGTEMMSAARDALKQFDKPPLLIAVTVLTSMSDSDLNEIGIQATAEQQVLKLAKLAQQAGLNGVVCSAQEARMLKHDLGTSFKLVTPGIRPANSATGDQKRVMTPEAAIEAGVDYMVIGRPITQAADPTASVAEILTSIGE

SEQ ID NO: 16690 - DNA, 711 bp, Zymomonas mobilis subsp. mobilis ZM4
  CDS (1)..(711): transl_table=11
gtgcccaatactgactttttatccaatcccgtttttgttgccctcgatacaccagacctgaaaaaggctgaaaagctggcgacgatcctccgccctcatgttggcgggatcaagcttggtctggaattttttatggcgcatggccattacggggttgaaaaaatcgcagatcaagggctgcctatttttcttgatctcaaatttcatgatattccgaatacagtggcttctgcgattgaggctttgtttcatgcagtcaagtcgccgcctgctattttaacggttcataccgaaggcggtgaagccatgatgcgcgcggccaaaaaggccgcagacaaaggctcgaaagtggtgggtgtcactattctgaccagtctcgatcaaagtgaccttggtgtgattggcatgacgggaacgccagaatcgcaggttgaaaaactggcacgtctggcacgtagatccggtcttgatggcattgtctgttctggtgaagaagtcgaacaggtgcatgaagaatggcgcgatggcttctttgttgttcccggaatacggcctgccgatagtgtcgtcggtgaccaaaaacgggtttgcacgcctgccgatgctttggatcggggcgcttctattttagttattggccgcccgattacccgtgcagatgaacctgccgaggtggcctcggctattgccagacaattgcgccggaaataa

SEQ ID NO: 16691 - protein, 236 aa, Zymomonas mobilis subsp. mobilis ZM4
MPNTDFLSNPVFVALDTPDLKKAEKLATILRPHVGGIKLGLEFFMAHGHYGVEKIADQGLPIFLDLKFHDIPNTVASAIEALFHAVKSPPAILTVHTEGGEAMMRAAKKAADKGSKVVGVTILTSLDQSDLGVIGMTGTPESQVEKLARLARRSGLDGIVCSGEEVEQVHEEWRDGFFVVPGIRPADSVVGDQKRVCTPADALDRGASILVIGRPITRADEPAEVASAIARQLRRK

SEQ ID NO: 16692 - DNA, 735 bp, Silicibacter pomeroyi DSS-3
  CDS (1)..(735): transl_table=11
atgacagacagaatgctcgccgacgatcgcctgatcgtcgcccttgacgtgcccaatgcggtggccgggctggccctggccgaacggctgggcgacgcggtttccttttacaagatcgggctggggatgctcaccggtggcggtctcgctctggccaacgagctgaaacaggaacatggcaagcgcatcttcctggacatgaaactgttcgacatcggcaacacggtcgaggccgccgtgcggggcctgtcccagttcgatctggatttcctgaccgtgcatggcgacccgcatgtggtgcgcgccgccaaggagggcgccgccggcaaggacctcaagatcctggccgtcaccattctgacctcgctgaaccgcgacgatctggatgcgtcgctgatcaaacccggtgatgtgcacgaccttgttctggaacgtgccgcccgcgcctttgaggccggggccgatggtgtcatcgccagcccgcaggaggcggccgcgatccgcgccctacccgaggctgccgggcggctgatcgtgacccccggcatacgccccgcgggtgccgatctgggcgatcagaaacgcgtcgcgacaccggccaacgccattgccgacggggttgatcacatcgtggtggggcggcccgtcgtccacgctcccgaccctcgcgccgccgctctgtcgatccttgccgaaatgacctctccgcaagcagtggcaccaaaccggagttga

SEQ ID NO: 16693 - protein, 244 aa, Silicibacter pomeroyi DSS-3
MTDRMLADDRLIVALDVPNAVAGLALAERLGDAVSFYKIGLGMLTGGGLALANELKQEHGKRIFLDMKLFDIGNTVEAAVRGLSQFDLDFLTVHGDPHVVRAAKEGAAGKDLKILAVTILTSLNRDDLDASLIKPGDVHDLVLERAARAFEAGADGVIASPQEAAAIRALPEAAGRLIVTPGIRPAGADLGDQKRVATPANAIADGVDHIVVGRPVVHAPDPRAAALSILAEMTSPQAVAPNRS

SEQ ID NO: 16694 - DNA, 645 bp, Francisella tularensis subsp. tularensis SCHU S4
  CDS (1)..(645): transl_table=11
ttgagaaactcaatgaaaataatgttctcagcagatggtatctctaagtcagatttagagaaaacagccgctgtatcaaagtatgttgactgtgttaagattggtcatattctatgctcaacgttatcttttaaagaaattcatgagctagtaggcgacaaagatattttcctagactttaagttacacgatatcccaaatacagttaaaactgcaattgaaaattattcaaaagctattccaaattttaaatattttacatttcatggtactgctagtgatgagatgataaaagcagcccttacggcagatactcaagctataccattagctgtgattacacttagtagtgatgctaattttgataaggcagatagccttgctaaatttcaaagatgtgtggatttaggtgtggaaaactttatatgtcatccacatttagttgctgatgtcagagctaaatttggcgataaaatcaagctatatgtcccaggtgtaaggcttgagagtgatctaagtgatgatcattttaacgctttgacccctaaaaaagccaaagagcttggcgttgattacattattgtaggtaggccgctattacgcgctgaaaatatcgttgagaagctaaaagagtttgagtgctaa

SEQ ID NO: 16695 - protein, 214 aa, Francisella tularensis subsp. tularensis SCHU S4
MRNSMKIMFSADGISKSDLEKTAAVSKYVDCVKIGHILCSTLSFKEIHELVGDKDIFLDFKLHDIPNTVKTAIENYSKAIPNFKYFTFHGTASDEMIKAALTADTQAIPLAVITLSSDANFDKADSLAKFQRCVDLGVENFICHPHLVADVRAKFGDKIKLYVPGVRLESDLSDDHFNALTPKKAKELGVDYIIVGRPLLRAENIVEKLKEFEC

SEQ ID NO: 16696 - DNA, 723 bp, Synechococcus elongatus PCC 6301
  CDS (1)..(723): transl_table=11
atgactgatttggcagctcgcgatcgcatcattgtaccactggacgtaccggacgttgaagctgcgattactctgattgatcgcttgccagaagctcagttctttaaggttggactcgaactgtttgtggcaaccggatcaacggttctaacgattttaaaagagcgacagaaaaagatttttctcgaccttaagctacacgacattcccaacacgatggccggagcttgtcgcagtgcggctcgctatggcgtggacttgctgaccatccatgcgactgctggtaaacccgcgctggaagcggcgcaggcaggtgcgatcgctggtgcagcagcagcgggcgttcagcctcctaccctgctggccgtcacggtcttgactagtttgagccaacagcaactcacggaagagctgcatgtgccggaagcagtccccaactacgtccagcatttggcccgtcaagccgaagcctgtggcattggcggctgtgtctgttcaccacaggaactcgtagtactcaagaccgcctgcagtgatgactttgtccgtgtgaccccgggggtgcggcccacctgggcggcggcgggcgatcaacaacgggtaatgacgcctcagcaagcgatcgcagcaggggccacctaccttgtggttggccggccgatcacggctgccgatgatccggcggcagctttccagcgggtctgcgaggaactgaccccatga

SEQ ID NO: 16697 - protein, 240 aa, Synechococcus elongatus PCC 6301
MTDLAARDRIIVPLDVPDVEAAITLIDRLPEAQFFKVGLELFVATGSTVLTILKERQKKIFLDLKLHDIPNTMAGACRSAARYGVDLLTIHATAGKPALEAAQAGAIAGAAAAGVQPPTLLAVTVLTSLSQQQLTEELHVPEAVPNYVQHLARQAEACGIGGCVCSPQELVVLKTACSDDFVRVTPGVRPTWAAAGDQQRVMTPQQAIAAGATYLVVGRPITAADDPAAAFQRVCEELTP

SEQ ID NO: 16698 - DNA, 720 bp, Bacillus clausii KSM-K16
  CDS (1)..(720): transl_table=11
atgaataggccattttttatcgctttggattttgatgagcacgccaaacgccagcgcttcttggagtcgtttgctgccgaaacgcttgatgtaaaaatcggtatggaactgttttaccgggaagggttgtctgtagtccatgaattaaaggaagccggttatcggttgtttcttgatttaaaacttcatgatattcccaataccgttggaaggacgatgcgtgctttagccgaattggacgtcgatgtcgtcaatgtccatgctgcagggggaaaagcaatgatggaagcggctttagaagggctcgatgcagggacaagagcaggaaaacagcggccgaaactcatcgctgttacgcagctgacgagcacggacagccgtatgctcgctgaagagttgctgatcgataaggcgatggatgaagtcgtggtacggtatgcgcagcttgcccaggaaagtggattagacggtgttgtttgctcagcccatgaagtcccccttattcgggcagcatgcagcgatcggtttttgacggttacgcctggcattcgcaggcaagtcgaccaagttggcgaccaagtgcgtgtcgtcacaccaggggaagcaaaagcgctcggtagttgggcgattgtcgtcgggcgaagcattacagcagcagcagatccactagctgtttacagagaaatgaaccaagattggaaaggggcgaccgaacattga

SEQ ID NO: 16699 - protein, 239 aa, Bacillus clausii KSM-K16
MNRPFFIALDFDEHAKRQRFLESFAAETLDVKIGMELFYREGLSVVHELKEAGYRLFLDLKLHDIPNTVGRTMRALAELDVDVVNVHAAGGKAMMEAALEGLDAGTRAGKQRPKLIAVTQLTSTDSRMLAEELLIDKAMDEVVVRYAQLAQESGLDGVVCSAHEVPLIRAACSDRFLTVTPGIRRQVDQVGDQVRVVTPGEAKALGSWAIVVGRSITAAADPLAVYREMNQDWKGATEH

SEQ ID NO: 16700 - DNA, 840 bp, Campylobacter jejuni RM1221
  CDS (1)..(840): transl_table=11
atgaagctttgtgtcgcacttgatctttctacaaaagaagaatgcttacaacttgccaaagaattaaaaaatttagacatatggttaaaagtaggtttaagagcatatttaagagatggttttaaattcatagaagaacttaaaaaagttgatgattttaaaatatttcttgatcttaaaattcatgatattcccaacactatggcagatgcttgcgaagaagtatcaaaacttggtgttgatatgatcaatatccacgcaagtgctggaaaaatagccatacaagaagttatgacacggcttagcaaattttcaaaaagacctttagttttagcagtttctgctcttacgagttttgatgaagaaaatttctttagtatttatagacaaaaaattgaagaagctgtaattaatttttcaaaaatatcctatgaaaatggacttgatggtatggtatgctctgtttttgaaagcaaaaaaattaaagagcacacaagttcaaatttcttaacccttactcctggaattcgtccttttggagaaacaagtgatgatcaaaaacgtgttgctaatcttgcaatggctagagaaaatttgagtgattatatcgttgtgggaaggcctatatataaaaatgaaaatcctagggctgtatgtgaaaaaattttaaacaaaatacacagaaaaaatataagcgaaaacgatatagagcaaaattatgaagtaattcagcaaaaagaatgggatatgtgtaatcactttgaagaatggattaaaactcagcctgataaagaacatgctttaaaagaattttatgctaagtgtgggataaaatattga

SEQ ID NO: 16701 - protein, 279 aa, Campylobacter jejuni RM1221
MKLCVALDLSTKEECLQLAKELKNLDIWLKVGLRAYLRDGFKFIEELKKVDDFKIFLDLKIHDIPNTMADACEEVSKLGVDMINIHASAGKIAIQEVMTRLSKFSKRPLVLAVSALTSFDEENFFSIYRQKIEEAVINFSKISYENGLDGMVCSVFESKKIKEHTSSNFLTLTPGIRPFGETSDDQKRVANLAMARENLSDYIVVGRPIYKNENPRAVCEKILNKIHRKNISENDIEQNYEVIQQKEWDMCNHFEEWIKTQPDKEHALKEFYAKCGIKY

SEQ ID NO: 16702 - DNA, 696 bp, Ehrlichia ruminantium str. Welgevonden
  CDS (1)..(696): transl_table=11
atgaagcataatccaattatttgtgcattggatactcatgatatacataaggcattgcgattgacaaagatgttatatggaaaaatatctatggtgaaattaggattggaattctttgtagcacatggaatatctggtgtacagagaatatctgattgtggaattccaatatttcttgatttaaagttacatgatattcctaatactgtgagtcgtgctgtatcagtaattaagtcttcaaatattgctatgcttactattcatattagtggtggtcaagaaatgataaaaagaaccatggatgttatatttgatagtatgcttaagataataggtgtgactgtacttacaagtattgatgtttgtgatttaaaggaaataggtattgggaattctacagtgcaacaagttattttattatcaaaacttgctcaaaaagtaggattatatggtatagtttgttctcctcttgaagtgaaggaggttcgtgcacaatgtgataaagatctaaaaattatagttccaggtataagattaggagataatattgatgatcagaaaagaactgattctcctaaaagtgcaatattgtctggagcagattatttagtgatagggcgcccaattactgaaaatactgaccctgtaaaagtagttgatattattctttcatcaatagcggatttacacaattaa

SEQ ID NO: 16703 - protein, 231 aa, Ehrlichia ruminantium str. Welgevonden
MKHNPIICALDTHDIHKALRLTKMLYGKISMVKLGLEFFVAHGISGVQRISDCGIPIFLDLKLHDIPNTVSRAVSVIKSSNIAMLTIHISGGQEMIKRTMDVIFDSMLKIIGVTVLTSIDVCDLKEIGIGNSTVQQVILLSKLAQKVGLYGIVCSPLEVKEVRAQCDKDLKIIVPGIRLGDNIDDQKRTDSPKSAILSGADYLVIGRPITENTDPVKVVDIILSSIADLHN

SEQ ID NO: 16704 - DNA, 693 bp, Staphylococcus aureus subsp. aureus COL
  CDS (1)..(693): transl_table=11
atgaaagatttaccaattattgcattagattttgaatcaaaagaaaaagtaaatcaatttttagatttatttgatgaatcattattcgtaaaagtaggtatggaacttttttatcaagaaggtcctcaattaattaatgagataaaagaaagaggccatgatgtatttttagatttaaaactgcatgatattcctaatacagttggtaaggcgatggaaggactagctaaattgaatgttgatctggtaaatgttcatgctgctggtggcgtaaaaatgatgtctgaggccattaaaggattaagaaaacataatcaagatacaaaaattattgcagtaacacagcttacgtcaacaacagaagacatgttacgacacgaacaaaatatacaaacatcgattgaagaggccgttttaaattatgccaagttagcaaatgcagctggtttagatggcgttgtttgttcacctcttgaaagtcgtatgttgactgaaaagttaggtacatcatttttaaaagtaacaccaggtattagacctaaaggtgcatctcaaaatgaccaacaccgtattacgacaccggaagaagcaagacagcttggttcgacgcatattgtagtcggtagaccgattacacaaagtgacaatccagtcgaaagttatcataaaattaaagaaagttggttagtataa

SEQ ID NO: 16705 - protein, 230 aa, Staphylococcus aureus subsp. aureus COL
MKDLPIIALDFESKEKVNQFLDLFDESLFVKVGMELFYQEGPQLINEIKERGHDVFLDLKLHDIPNTVGKAMEGLAKLNVDLVNVHAAGGVKMMSEAIKGLRKHNQDTKIIAVTQLTSTTEDMLRHEQNIQTSIEEAVLNYAKLANAAGLDGVVCSPLESRMLTEKLGTSFLKVTPGIRPKGASQNDQHRITTPEEARQLGSTHIVVGRPITQSDNPVESYHKIKESWLV

SEQ ID NO: 16706 - DNA, 693 bp, Staphylococcus epidermidis RP62A
  CDS (1)..(693): transl_table=11
gtgagaaatctacccattatagcattagattttaaatcagcagacgaggttcatacatttttaaataagtttaatgaaccgttatgcgtcaaaattgggatggagttattttatcaaacagggccagctttaattaaatccattaaaaaaagaggtcatgatatctttttagatttaaaattacatgacatacctaatactgtgagcaaagcaatggaaggcttagcacgtttagacattgatttagtcaatgttcatgctgccggtggtattaaaatgatggaagaagctaaaaaagggttaagaaaacataatgctgatattaaaatcattgcagttactcaattaacttcaactactgaaagacaattacatgaagaacaaaatattcaaacctctatagaggaggcagttctaaattatgcgcgtcttactaaaaaagctggattagacggtgtcgtatgttctcctcttgaggctaagatgatttctaaagaactaggttctgactttttaaaagtgacaccaggtattcgcccgaaaggcgcagctcgtaatgatcaacaacgaattacaacacctgaggaagctaaaactttggggtcaacacatatcgtagtaggtcgacctatcactcaaagtgagcatccaattgacagttatcataaaataaaagaaagttggttaagttaa

SEQ ID NO: 16707 - protein, 230 aa, Staphylococcus epidermidis RP62A
MRNLPIIALDFKSADEVHTFLNKFNEPLCVKIGMELFYQTGPALIKSIKKRGHDIFLDLKLHDIPNTVSKAMEGLARLDIDLVNVHAAGGIKMMEEAKKGLRKHNADIKIIAVTQLTSTTERQLHEEQNIQTSIEEAVLNYARLTKKAGLDGVVCSPLEAKMISKELGSDFLKVTPGIRPKGAARNDQQRITTPEEAKTLGSTHIVVGRPITQSEHPIDSYHKIKESWLS

SEQ ID NO: 16708 - DNA, 711 bp, Gluconobacter oxydans 621H
  CDS (1)..(711): transl_table=11
atgtccaggcgcacacgactgatcgcagccctcgataccgcatcccgctccacagcccaggactgggccgacagcctgaaaaatgacgtcgacgccatcaagctgggtctcgagtttacctatgcctgcggactggatgcggtaaaaaccgtatcggccgggcacgaactgtttctggacctgaagctgcacgacattccccataccgtcgcatcaggtctgactgccctcgccccgctcaggccagccctgacgacaatccatgccagtggcggttccgaaatgatcgcccggtcccgggaagctcttgagagcgcttttcccgctgacacaaaacgcccgaaactgcttgccgttacggttctgacgagcatgaacgctgagggtctgttggacatcggcgtcaacgccacgccccaggaacaggtgctcagacttggaaaactggctatcagcgctggtgccgacggtctggtctgttcggcgcatgagattgcgcctctacgcgatgcattgggtgacgagcccgttctggtcgtgccgggcatccgtcctgctggcagcgcgtccgacgaccagaagcgcatcatgacgcccggacaggctgcccaagccggcgccgactggatcgtcgtagggcgccccatcacgaaagccgcagatccagttctggccgccagagccatcatggaggaactggccagcgcatga

SEQ ID NO: 16709 - protein, 236 aa, Gluconobacter oxydans 621H
MSRRTRLIAALDTASRSTAQDWADSLKNDVDAIKLGLEFTYACGLDAVKTVSAGHELFLDLKLHDIPHTVASGLTALAPLRPALTTIHASGGSEMIARSREALESAFPADTKRPKLLAVTVLTSMNAEGLLDIGVNATPQEQVLRLGKLAISAGADGLVCSAHEIAPLRDALGDEPVLVVPGIRPAGSASDDQKRIMTPGQAAQAGADWIVVGRPITKAADPVLAARAIMEELASA

SEQ ID NO: 16710 - DNA, 708 bp, Lactobacillus acidophilus NCFM
  CDS (1)..(708): transl_table=11
atggacagacccgtaattgttgctctagatttagataatgaagaacaactaaataagatcttaagtaaattaggcgacccgcatgatgtttttgtcaaagttggcatggaacttttttataatgcaggcattgatgtaatcaagaagttaacgcagcaaggctataagattttcttagatttaaaaatgcatgatattccaaatactgtttataacggagctaaagctttagctaaacttggcatcacctttacaacggttcatgcacttggtggtagccaaatgattaaatccgccaaagacggtttaattgccggaacacctgctggtcatagtgtaccgaaattacttgcagttactgaattaacttcgatctcggacgatgttttgagaaatgaacaaaattgccgtttgccaatggctgaacaagtattgagcttagccaagatggctaagcattctggagccgatggggtgatctgctcaccacttgaagtaaaaaaattgcatgagaatatcggtgacgatttcttatatgtcactccaggcattcgtccagctggcaatgctaaggatgatcaatcccgtgtggctacaccaaagatggctaaagaatggggctcaagcgcaatcgtggtaggtcggcccattactttagcaagtgatcccaaggcagcatatgaagcaattaagaaggagtttaactaa

SEQ ID NO: 16711 - protein, 235 aa, Lactobacillus acidophilus NCFM
MDRPVIVALDLDNEEQLNKILSKLGDPHDVFVKVGMELFYNAGIDVIKKLTQQGYKIFLDLKMHDIPNTVYNGAKALAKLGITFTTVHALGGSQMIKSAKDGLIAGTPAGHSVPKLLAVTELTSISDDVLRNEQNCRLPMAEQVLSLAKMAKHSGADGVICSPLEVKKLHENIGDDFLYVTPGIRPAGNAKDDQSRVATPKMAKEWGSSAIVVGRPITLASDPKAAYEAIKKEFN

SEQ ID NO: 16712 - DNA, 696 bp, Ehrlichia ruminantium str. Gardel
  CDS (1)..(696): transl_table=11
atgaagcataatccaattatttgtgcattggatactcatgatatacataaggcattgcgattgacaaagatgttatatgaaaagatatctatggtgaaattaggattggaattctttgtagcacatggaatatctggtgtacagagaatatctgattgtggaattccaatatttcttgatttaaagttacatgatattcctaatactgtgagtcgtgctatatcagtaattaagtctttaaatattgctatgcttactattcatattagtggtggtcaagaaatgatgaaaagaaccatggatgttatatttgatagtatgcttaagataataggtgtgactgtacttacaagtattgatgtttgtgacttaaaggaaataggtattgggaattctacagtgcaacaagttattttattatcaaaacttgctcaaaaagtaggattatatggtatagtttgttctcctcttgaggtgaaggaggttcgtgcacaatgtgataaagatctaaaaattatagtgccaggtataagattaggagataatattgatgatcagaaaagaactgattctcctaaaagtgcaatattgtctggagcagattatttagtgatagggcgcccaattactgaaaatactgatcctgtaaaagtagttgatattattctttcatcaatagcggatttacacaattaa

SEQ ID NO: 16713 - protein, 231 aa, Ehrlichia ruminantium str. Gardel
MKHNPIICALDTHDIHKALRLTKMLYEKISMVKLGLEFFVAHGISGVQRISDCGIPIFLDLKLHDIPNTVSRAISVIKSLNIAMLTIHISGGQEMMKRTMDVIFDSMLKIIGVTVLTSIDVCDLKEIGIGNSTVQQVILLSKLAQKVGLYGIVCSPLEVKEVRAQCDKDLKIIVPGIRLGDNIDDQKRTDSPKSAILSGADYLVIGRPITENTDPVKVVDIILSSIADLHN

SEQ ID NO: 16714 - DNA, 678 bp, Wolbachia endosymbiont strain TRS of Brugia malayi
  CDS (1)..(678): transl_table=11
atgaatccaataatatgcgcactagacacgcaagacttaaatgaggccatatccttggctaatactttgcgtgacaaggttggcatgataaagctggggttagaatttttcgccgctcatggtccttctggagtgagagaagttgcaaagtgcaatgtaccaacttttttggatctgaaattgcacgacattccaaacactgtagctaaaacagttgaagcgataaaagttctgaatattgaaatattaacattacatatcagcggtggaacaaaaatgcttgaagaggctctaagtatagtgaaagacacaaaaacgaaactaattggagtaacagtattaaccagtatgagcaatgaggatttgagcgaacttggaatagcaagagaggtaaaatcacaggtaattctgtttgcaaagcttgcaaagaaggttggactacacggaatagtctgctcggcattagaagctcaagaagtgtatcaagaatgtggtaaagactttaaaattattacttcaggaattcgtgtaggttttggtcatgatgaccaaaaaaggacagcgacaccaaaagaagcaataaattcaggagctgattatattgtaattggtagacctattacaaaaagtaatagtcctgcaaacagtgcagaattaatattgaaatcacttagttaa

SEQ ID NO: 16715 - protein, 225 aa, Wolbachia endosymbiont strain TRS of Brugia malayi
MNPIICALDTQDLNEAISLANTLRDKVGMIKLGLEFFAAHGPSGVREVAKCNVPTFLDLKLHDIPNTVAKTVEAIKVLNIEILTLHISGGTKMLEEALSIVKDTKTKLIGVTVLTSMSNEDLSELGIAREVKSQVILFAKLAKKVGLHGIVCSALEAQEVYQECGKDFKIITSGIRVGFGHDDQKRTATPKEAINSGADYIVIGRPITKSNSPANSAELILKSLS

SEQ ID NO: 16716 - DNA, 732 bp, Xanthomonas oryzae pv. oryzae KACC10331
  CDS (1)..(732): transl_table=11
atgagccgggcgccgctgccgctggccgcccatgagcggctgatcttcgcgctggatgtgcccagccacgatgaggcgatcgcctgggtggaccggcttggcgattcggtggcgttctacaagatcggcatggaactgctggcctccggcgagtacttccatgtgctcgatgcgctggccaagcgcgacaagcgcgtgttcgtggatcttaaattcttcgacattcccgccaccgtggccggcaccatccgtcgcctggcacagtggccggtgagctattgcaccgtgcacggctggcacgccggcatgctgcaggctgccgccgacgccaaccacggcgccatgcgtctgctggcggtgaccgtgctgacctcgatgggccgcccggacctggcggcgatgggcatcgaccgcgaaccggtggacgtggtggtggagcgcgcgctggccgcagaggccgccggcatcgatggcgtcatcgcctccggccaggaagccggcccgatccgccgcgccaccggcccggccttttcgatcgtctgccccggcatccgccccggaggcccggtcgccgacgatcagcaacgcatagtgggcgtggcgcaggccttcaccgacggcgccgatgccatcgtcgtcggccgcccgatccgcctggccgccgatccggccgcggctgcggcggcgatccaggcagagatccttgcggcggtggggcaggaccgcagctga

SEQ ID NO: 16717 - protein, 243 aa, Xanthomonas oryzae pv. oryzae KACC10331
MSRAPLPLAAHERLIFALDVPSHDEAIAWVDRLGDSVAFYKIGMELLASGEYFHVLDALAKRDKRVFVDLKFFDIPATVAGTIRRLAQWPVSYCTVHGWHAGMLQAAADANHGAMRLLAVTVLTSMGRPDLAAMGIDREPVDVVVERALAAEAAGIDGVIASGQEAGPIRRATGPAFSIVCPGIRPGGPVADDQQRIVGVAQAFTDGADAIVVGRPIRLAADPAAAAAAIQAEILAAVGQDRS

SEQ ID NO: 16718 - DNA, 705 bp, Vibrio fischeri ES114
  CDS (1)..(705): transl_table=11
atgaaagaccaaaaggtgatcgtggcactggattatgataatcaagcagatgcgttaacgtttgttgataaaattgatccaagttcatgtcgtttaaaagtaggcaaagagatgtttactttatttgggcctgagtttgttaaagaacttcataaacgtggtttttctgtttttctagatttaaagtttcatgatattccaaatacctgttcaaaagcggtaagagcggcagcagaaatgggtgtatggatggttaacgttcatgcgagtggtggtgagcgtatgatgagtgcctcgcgtgaaatattagaaccttatggtagtgaccgtccattattaattggtgtgacggtgttaacgagcatggagcagcaagacttagctggcattggtctagacatagcaccacaagaacaagtaaaacgtttagcggcattaacgaaaaacagcggtttagatggtgtcgtatgttcagctcaagaggcatcaatgctaaaagctgatttaggtaaagagttccagttagtaacaccaggaattcgtccagcaggtgctgatgttggtgaccaaaagcgtattatgacgccagtagatgcgattacagcaggttctgactacctagttataggtcgcccgattacacaagcggagaatccatcacaggtccttaatgagattaatctttctctcgcttctgttttataa

SEQ ID NO: 16719 - protein, 234 aa, Vibrio fischeri ES114
MKDQKVIVALDYDNQADALTFVDKIDPSSCRLKVGKEMFTLFGPEFVKELHKRGFSVFLDLKFHDIPNTCSKAVRAAAEMGVWMVNVHASGGERMMSASREILEPYGSDRPLLIGVTVLTSMEQQDLAGIGLDIAPQEQVKRLAALTKNSGLDGVVCSAQEASMLKADLGKEFQLVTPGIRPAGADVGDQKRIMTPVDAITAGSDYLVIGRPITQAENPSQVLNEINLSLASVL

SEQ ID NO: 16720 - DNA, 741 bp, Neisseria gonorrhoeae FA 1090
  CDS (1)..(741): transl_table=11
atgaatcctttaatcaccgacttccaaactccgcaacaacgtacccccgtcatcgttgcccttgattttgccaacgaaaaagacacgctcggattcgtccgcaaccttgatccggcgttgtgccaaatcaaaatcggcaaagagctgtttaccgctacggggcgcagtttggcggaaagcctgattcatcagggtttcaaactctttcttgatttgaaataccacgatattccccacaccgtcgcgcaggcgtgtaaagtcgccgccgatatgggcgtgtggatggtcgatatgcacgcgtcgggcggcagacgtatgatggaagccgccgccgaagccgttgccggatacggcacgaaaccgctcttaatcggcgtaaccgtgttgaccagcatggagcaaagcgatttggcggaaatcggtttgaacaccgcccctgaagaacaagtcatccgtttggcaaaactggcacaaagttcgggcttggacggcgtggtctgttccgcccaagaagccgcgccgctgcgccgcgaattgggacgggattttgtcttggttacaccgggtatccgcttggacgttgccggcaacaacgacgaccaacgccgcattatgacacccgccgaagccttggcggcgggttcgacttatctggtgatgggccgccccgttacccgagccgccgatccggtcgccgtattgcgcgaagtgaaccgcgtggcaaaccttgaagcaaactga

SEQ ID NO: 16721 - protein, 246 aa, Neisseria gonorrhoeae FA 1090
MNPLITDFQTPQQRTPVIVALDFANEKDTLGFVRNLDPALCQIKIGKELFTATGRSLAESLIHQGFKLFLDLKYHDIPHTVAQACKVAADMGVWMVDMHASGGRRMMEAAAEAVAGYGTKPLLIGVTVLTSMEQSDLAEIGLNTAPEEQVIRLAKLAQSSGLDGVVCSAQEAAPLRRELGRDFVLVTPGIRLDVAGNNDDQRRIMTPAEALAAGSTYLVMGRPVTRAADPVAVLREVNRVANLEAN

SEQ ID NO: 16722 - DNA, 738 bp, Salmonella enterica subsp. enterica serovar Choleraesuis str
  CDS (1)..(738): transl_table=11
atgacgtttactgcttcatcttcttcctgcgctattactgaatcgcctgtcgttgtggcgttggattaccatgaacgcgataaagccctggcgtttgtcgataaaatcgatcctcgcgattgtcgcttaaaagtgggcaaagagatgttcacgctgtttggtccacaactcgttcgggatctccagcagcgtgggtttgatgtctttcttgatctaaaatttcatgatattcccaacaccacggcccgggcggtcgctgcagcggcagacctgggcgtctggatggtaaacgttcatgcgtctggcggggcgagaatgatggccgcagcgcgcgacgcgctggcgccattcggtaaagatgcgccgttgctcattgccgtgaccgtgttgaccagtatggaaaccagcgatctgcgcgatctgggcgtgacgttgtcaccggcggaacatgcggagcggttggtgcgcctgacgcagcaatgcgggctggatggcgtggtctgttccgctcaggaagcggtcagatttaaacaggtctttggcgctgcatttaagctggtgacgccgggcattcggcccgcaggcagcgaggcaggcgaccagcgacgcattatgacgcccgaacaggcattatccgctggcgtcgactatatggtgattggccgcccggttacgcaatcggtagatccggcgcaaacgctgaaggatattaacgcgtcactgaaacgggaggcataa

SEQ ID NO: 16723 - protein, 245 aa, Salmonella enterica subsp. enterica serovar Choleraesuis str
MTFTASSSSCAITESPVVVALDYHERDKALAFVDKIDPRDCRLKVGKEMFTLFGPQLVRDLQQRGFDVFLDLKFHDIPNTTARAVAAAADLGVWMVNVHASGGARMMAAARDALAPFGKDAPLLIAVTVLTSMETSDLRDLGVTLSPAEHAERLVRLTQQCGLDGVVCSAQEAVRFKQVFGAAFKLVTPGIRPAGSEAGDQRRIMTPEQALSAGVDYMVIGRPVTQSVDPAQTLKDINASLKREA

SEQ ID NO: 16724 - DNA, 717 bp, Brucella abortus biovar 1 str. 9-941
  CDS (1)..(717): transl_table=11
atgacgacagaattgcacgatgacgcatccgggcgcctgatcgtgggccttgacgtgccgacaattgccgaggcggaaaaggtggtcgaagaactgggcaatgctgtttccttctacaagatcggctatcagcttgtttttgccggtgggcttgatttcgccaaaagccttgtggcggcgcgcaaaaaagtcttcctcgacatgaagctgctcgatatcgacaacacgattgccaaaggcgtggaaaatgtcgcgaagatgggtgtttccatgctcacgcttcatgcctatccgaaggcaatgcgtgcggcggtggaagccgccagagggtcggacctatgccttttgggcgtgacggtcctgacctccatggacaatgccgatcttcgggaagccggttatttcgacaatgcggaaacgctggtgctgaaacgtgcccgtcaggcgcatgaggccggtatgggcggcattgtcgcctcggcggtggaggcgcaggccattcgccaggcggttcgccccgatatggccatcgtcacaccgggcatccgcccggcagggagcgagaagggcgaccagaagcgcgtgatgacgccagccgatgccttgagggccggtgcgagccatctcatcgtggcgcgcccgatcgtgggcgcaccggatcgcaaggcggcagcccttgccatcctgaaggaaatgcgctcgattggaagaagttag

SEQ ID NO: 16725 - protein, 238 aa, Brucella abortus biovar 1 str. 9-941
MTTELHDDASGRLIVGLDVPTIAEAEKVVEELGNAVSFYKIGYQLVFAGGLDFAKSLVAARKKVFLDMKLLDIDNTIAKGVENVAKMGVSMLTLHAYPKAMRAAVEAARGSDLCLLGVTVLTSMDNADLREAGYFDNAETLVLKRARQAHEAGMGGIVASAVEAQAIRQAVRPDMAIVTPGIRPAGSEKGDQKRVMTPADALRAGASHLIVARPIVGAPDRKAAALAILKEMRSIGRS

SEQ ID NO: 16726 - DNA, 735 bp, Pseudomonas syringae pv. syringae B728a
  CDS (1)..(735)
atgcgcgccgatttcgacttacctgagaccacgctcatgtccgcctgccagactcctgtcatcgtcgccctggattttccgacccgcgaagccgccttgcgcctggctgatcagctcgaccccaaactgtgcagggtcaaggtcggcaaggaactgttcaccagttgcgcggccgacatcgtcgagaccctgcgccacaggggcttcgaagtgtttctggatctcaaattccacgacatccccaacaccacggcgatggcggtcaaggcggcggccgagatgggcgtgtggatggtcaatgtgcactgctcgggcggcttgcgcatgatggcggcctgtcgggaagtgcttgagcagcgcaccggtccacagccgttgctgatcggcgtgaccgttctgaccagcatggaacgtgaagacctggccggtatcggcctggacatcgacccgcaggtacaggtgctgcgccttgcggctctggccgggaaggccggaatggatggtctggtctgctcggcactggaagcgcaggccctgaaagccgctcacccgtcgttgcaactggtgacgcccggcatccgtccggcgggcagtgcgcaggacgatcagcgccgtatcctgacccctcgtcaggcactggatgcaggctctgactacctcgtcatcggccgcccgatcagccaggcggctgatccggcgaaggccctggcggcggtggttgccgagctggcttga

SEQ ID NO: 16727 - protein, 244 aa, Pseudomonas syringae pv. syringae B728a
MRADFDLPETTLMSACQTPVIVALDFPTREAALRLADQLDPKLCRVKVGKELFTSCAADIVETLRHRGFEVFLDLKFHDIPNTTAMAVKAAAEMGVWMVNVHCSGGLRMMAACREVLEQRTGPQPLLIGVTVLTSMEREDLAGIGLDIDPQVQVLRLAALAGKAGMDGLVCSALEAQALKAAHPSLQLVTPGIRPAGSAQDDQRRILTPRQALDAGSDYLVIGRPISQAADPAKALAAVVAELA

SEQ ID NO: 16728 - DNA, 693 bp, Haemophilus influenzae 86-028NP
  CDS (1)..(693): transl_table=11
atgacaagcaaaattattgtggcattggattatgagaaagaagcagaggctcttgctttagttgatcaaattgatccaagtttgtgtcgattaaaagtgggtaaagaaatgtttactacacttggtattaattttgtaaaacaattacatcaacgtaactttgatgtttttttggatcttaaatatcacgatattccaaatacggtagcaagagcagttcgttctgctgctgatttaggcgtatggatggtggatttacacgcaagtggtggtttgcgtatgatggaagaggcgaagaaaattcttgaaccttatgggaaagatgcaccattgcttattgccgtgacggtattaaccagtatggaagatttggatttattacaaattgggattaatgcatcgccaatggaacaagttttacgcttagctcatttaacccaacgggcgggtttagatggtgtagtctgttcccctcaagaagttgaaattttacgtaatacttgtggtaaagagtttaaattagttacaccggggattcgtccaataggaactgattttggtgatcaacgacgtgtgatgacgcctactgcagcaattcgtgcaggttcagattatttagttattggacgccctataactcaagcggataatcctgcggaggttctccgttctattaatgtatctattgggtaa

SEQ ID NO: 16729 - protein, 230 aa, Haemophilus influenzae 86-028NP
MTSKIIVALDYEKEAEALALVDQIDPSLCRLKVGKEMFTTLGINFVKQLHQRNFDVFLDLKYHDIPNTVARAVRSAADLGVWMVDLHASGGLRMMEEAKKILEPYGKDAPLLIAVTVLTSMEDLDLLQIGINASPMEQVLRLAHLTQRAGLDGVVCSPQEVEILRNTCGKEFKLVTPGIRPIGTDFGDQRRVMTPTAAIRAGSDYLVIGRPITQADNPAEVLRSINVSIG

SEQ ID NO: 16730 - DNA, 768 bp, Rhodobacter sphaeroides 2.4.1
  CDS (1)..(768)
atggcccggcttgacacgcagcagccctcgtcccatcacccgcccgacctcagcagcaaggagcttcccatggccgacgaccgtctgatcgtggcactcgatgtgccgaacgtcgtgcaggggctggatctcgcggagcggctcggcgatgcggtctcgttctacaagatcggcttgggcatgctgaccggcggcggcctcgcgctggccaacgagctgaagcaggaacggggcaagcgcatcttcctcgacatgaagctcttcgacatcggcgcgaccgtcgaggccgccgtgcggggcttcgcgagctacgatctcgatttcctgacggtccatggcgatccgcaggtggtgcgggccgcggtgcagggcgcctcgggcagcgggctgcgcatcctcgcggtgacggtgctgacctcgctcgaccgggcggatctcgatgcgaacatgatccgggcgggcgatctggccgagatcacgctcgagcgggcggcacgggcgctggatgcgggcgcgcatggggtgatcgcgagcccgcaggaggcggcggcgatccgggccctgccgcaggcggcggggcggctgatcgtgacgccgggcgtgcggcccacgggcgccgcgctcggagatcagaagcgggtggcgacccccgcccgcgcgatcgcggacggggcggaccatatcgtcgtcggccggccgatctggcaggccggggatccgcgggccgcggctctcgccgttcaggcagagcttccgacccgcggctga

SEQ ID NO: 16731 - protein, 255 aa, Rhodobacter sphaeroides 2.4.1
MARLDTQQPSSHHPPDLSSKELPMADDRLIVALDVPNVVQGLDLAERLGDAVSFYKIGLGMLTGGGLALANELKQERGKRIFLDMKLFDIGATVEAAVRGFASYDLDFLTVHGDPQVVRAAVQGASGSGLRILAVTVLTSLDRADLDANMIRAGDLAEITLERAARALDAGAHGVIASPQEAAAIRALPQAAGRLIVTPGVRPTGAALGDQKRVATPARAIADGADHIVVGRPIWQAGDPRAAALAVQAELPTRG

SEQ ID NO: 16732 - DNA, 708 bp, Lactobacillus gasseri
  CDS (1)..(708)
atgacaagaccagttatcgttgccttagatttagacaatgaaaagaaattaaatgaactcttacctaagctaggtaaaccagaaaatgtttttattaaaattggaatggaactcttttttaatgaaggtcctgcaattgttagaaacttatctagacaaggctaccaaatttttttagatttaaagatgagtgatatacctaataccgtctacaatggtgctaaagccttagctcaattaggaatcacttatactactgtccatgctcttggtggtagtcaaatgattaaagcagcaaaagaaggtttaattgctggcaccccggtcggtaaaaatatccctaaattattagctgttacagaattaacttcaatttctgatgatattttgcacgaagaacaaaattgtaacttatcaatgaaccagcaagttttaagtctagctgaaactgccaaaaaggctggagctgatggagtaatttgttcaccattagaagttaagaatttgcgtcaaaatgttggcgatgactttttatacgtaactcctggcattcgcccagcaggaaatgccaaagatgatcaatctagagtagctaccccagcccaagcaaaagaatggggttcaaccgctatcgtcgtaggacgaccgattaccctagcaactaatccagaagcagcatacgaagcaattaagaaggagttcaactaa

SEQ ID NO: 16733 - protein, 235 aa, Lactobacillus gasseri
MTRPVIVALDLDNEKKLNELLPKLGKPENVFIKIGMELFFNEGPAIVRNLSRQGYQIFLDLKMSDIPNTVYNGAKALAQLGITYTTVHALGGSQMIKAAKEGLIAGTPVGKNIPKLLAVTELTSISDDILHEEQNCNLSMNQQVLSLAETAKKAGADGVICSPLEVKNLRQNVGDDFLYVTPGIRPAGNAKDDQSRVATPAQAKEWGSTAIVVGRPITLATNPEAAYEAIKKEFN

SEQ ID NO: 16734 - DNA, 708 bp, Magnetospirillum magnetotacticum MS-1
  CDS (1)..(708)
ttgatcaatcccgtctatgtcgccatcgataccaccgaggccgcccgcgccatctcccttgccgaacgcctgaaggggcaggtcggcggtttcaagctgggcctggaatacttcaccgccaacggccccgccggtatggaggcggtgtcgggtctgggcatgccgctcttcgtcgatctcaagctgcatgacattcccaataccgtggccgccgccatgaagggcgtggtccgtctgggcgccgccatcaccaccattcatgcctcgggcggcgccgccatgatccgcgccgccgtcgatgccgccaatgacgaggcggccaagttgggcatcgccccgcccgccgtggtggcggtgaccgtgctgaccagcctggatcaggccggggccgagcaggtgggtttcgatcgtccggtgctcgatcaggtcaagcgcctcgccgccctggcccaggacagcggcgcagccggtatcgtctgttcgcccctggaagtggaggcggtgcgcgcgctctgcggtcccgatttcaagctggtcattccgggcatccgcccggcctggagcgaagcgggtgaccagaagcgctttcttacccccgccgaggcccgcgccaagggcgccgatgtcctggtgatcgggcggcccatcaccggcgccgccgatccggccgaggccgccgcgcggatcaaggccgaactggggctttaa

SEQ ID NO: 16735 - protein, 235 aa, Magnetospirillum magnetotacticum MS-1
MINPVYVAIDTTEAARAISLAERLKGQVGGFKLGLEYFTANGPAGMEAVSGLGMPLFVDLKLHDIPNTVAAAMKGVVRLGAAITTIHASGGAAMIRAAVDAANDEAAKLGIAPPAVVAVTVLTSLDQAGAEQVGFDRPVLDQVKRLAALAQDSGAAGIVCSPLEVEAVRALCGPDFKLVIPGIRPAWSEAGDQKRFLTPAEARAKGADVLVIGRPITGAADPAEAAARIKAELGL

SEQ ID NO: 16736 - DNA, 696 bp, Leuconostoc mesenteroides subsp. mesenteroides ATCC 8293
  CDS (1)..(696)
atgacagaacagccagtttttattgctttggactttcctgatgcaactactacttacaaatttttgaagcctttttcagatttagtagaaaagccagcattgaaagttggtatggaacttttttatcgtacgggaccagagttcatcacagaactacgtgcattgggctatacgattttcttagatttaaaactttacgatattccaaacactgttggtcgtgcagtcgctaatatatcaaaactagatgtacaatatttaactctgcatgcagctggagggaaaaaaatgctagaagcagctgttgccaataaaagtgaagcgttaaaattacttgcagtgacgcagctaacttctttttctgaagctgagatacaagagatacaattaaccacagcaactattgaagaaagtgttgcacatttggctgagcttgcttactcggtgggcatagacgggacaattagttcacccttagaggctggtttaattaagtcacacacgaatgatcgatttttacgtatcacacctggtattcgtttagctggtgatgaagctggagatcaagtgcgtgtaactacgccagcggaagccaagaaattgaattcaactggattagttgttggtcgatcaattacacaatcgaccaacccagtggctgcatatcaatgtgttgtcaatgaatggagaaaataa

SEQ ID NO: 16737 - protein, 231 aa, Leuconostoc mesenteroides subsp. mesenteroides ATCC 8293
MTEQPVFIALDFPDATTTYKFLKPFSDLVEKPALKVGMELFYRTGPEFITELRALGYTIFLDLKLYDIPNTVGRAVANISKLDVQYLTLHAAGGKKMLEAAVANKSEALKLLAVTQLTSFSEAEIQEIQLTTATIEESVAHLAELAYSVGIDGTISSPLEAGLIKSHTNDRFLRITPGIRLAGDEAGDQVRVTTPAEAKKLNSTGLVVGRSITQSTNPVAAYQCVVNEWRK

SEQ ID NO: 16738 - DNA, 732 bp, Nostoc punctiforme PCC 73102
  CDS (1)..(732)
atggggaatggtggacaggcagaacaacgagttattgtggcattggatgtgccagatgaacaaagtgcgatcgctcttatagatcaactcccgcaagtcggtttttggaaagtcggcttagagttgtttaccagcactggccccaaaattctggaagtcctaaagtctaaggaaaagcgcattttcttagatttaaagtttgatgatatccccaacaccgttgctggtgcttgccggagtgcagctagatacggagtggatttgctgacgattcatgctacctgtggtagagatgccctgaaagccgcaattgaggcggcacacgaaggggctgtaaaagcaggtgtacaaccaccaaagttaattgctattaccctgctgacgagcatttctgctaggcagttggcgtttgatttaaaaatacctctggaattgccagaatatgctctagaaatggccctgctggctcaagaatgtggtttggatggggtagtttgttcgcctcaagaagtggcacagctacgagagacttgtggagatcgctttttgctagtttgtcccggcgttagaccaacttgggcagataatgcagatcaaaagcgatcgctcactccagcacaagccatgaaagctggtgcagattatttagtaattggccgtcccattactactgctactgagccagagttagcctggaaaaggatttctgaggagttaaccacagtggcatga

SEQ ID NO: 16739 - protein, 243 aa, Nostoc punctiforme PCC 73102
MGNGGQAEQRVIVALDVPDEQSAIALIDQLPQVGFWKVGLELFTSTGPKILEVLKSKEKRIFLDLKFDDIPNTVAGACRSAARYGVDLLTIHATCGRDALKAAIEAAHEGAVKAGVQPPKLIAITLLTSISARQLAFDLKIPLELPEYALEMALLAQECGLDGVVCSPQEVAQLRETCGDRFLLVCPGVRPTWADNADQKRSLTPAQAMKAGADYLVIGRPITTATEPELAWKRISEELTTVA

SEQ ID NO: 16740 - DNA, 525 bp, Pseudomonas syringae pv. syringae B728a
  CDS (1)..(525)
atgtttctggatctcaaattccacgacatccccaacaccacggcgatggcggtcaaggcggcggccgagatgggcgtgtggatggtcaatgtgcactgctcgggcggcttgcgcatgatggcggcctgtcgggaagtgcttgagcagcgcaccggtccacagccgttgctgatcggcgtgaccgttctgaccagcatggaacgtgaagacctggccggtatcggcctggacatcgacccgcaggtacaggtgctgcgccttgcggctctggccgggaaggccggaatggatggtctggtctgctcggcactggaagcgcaggccctgaaagccgctcacccgtcgttgcaactggtgacgcccggcatccgtccggcgggcagtgcgcaggacgatcagcgccgtatcctgacccctcgtcaggcactggatgcaggctctgactacctcgtcatcggccgcccgatcagccaggcggctgatccggcgaaggccctggcggcggtggttgccgagctggcttga

SEQ ID NO: 16741 - protein, 174 aa, Pseudomonas syringae pv. syringae B728a
MFLDLKFHDIPNTTAMAVKAAAEMGVWMVNVHCSGGLRMMAACREVLEQRTGPQPLLIGVTVLTSMEREDLAGIGLDIDPQVQVLRLAALAGKAGMDGLVCSALEAQALKAAHPSLQLVTPGIRPAGSAQDDQRRILTPRQALDAGSDYLVIGRPISQAADPAKALAAVVAELA

SEQ ID NO: 16742 - DNA, 708 bp, Desulfovibrio desulfuricans G20
  CDS (1)..(708)
atgatgccggaacttgtggttgctcttgattatcctgaaagcgaacaggctgttgccatggctgcacggctgcaaggaagctgcccctgggtcaaggtggggcttgaactgtacacggccgccgggccggacatcctgcgccgtctcaaagacatggggttttctgtttttctcgatctgaagtttttcgacattcccaataccgtccgcggtgcggtgcgttcatcggtctgcgccggtgcggacatggtcaacattcatctgctggggggcgcccgtatggcgcaggccgccgtgcaggggctgcaggaaggctgtgaatgcaaggggcttgctgcgccgccggtgctgctgggcgtgacagtgcttaccagtatggcccagcaggatctgcctgccggtcttgacctgccgctggacagcgtggtggatgtgctggcgcgctccggcagagagtggggcttgaacggtgtcgtgtgttcggggtatgaagttgaaagcatcaaaaaaagctgtggtacagactacatctgtcttactccgggcatccggcccgccgcggcggatgacgaccagcgcagaaccatgaccccgcagcaggctgcgcgggccggttccgactatctggttgtgggcagacccgttaccggagccgctgacccggccggggccgcgtacagcatcatggaatctgtccggcaggcgtag

SEQ ID NO: 16743 - protein, 235 aa, Desulfovibrio desulfuricans G20
MMPELVVALDYPESEQAVAMAARLQGSCPWVKVGLELYTAAGPDILRRLKDMGFSVFLDLKFFDIPNTVRGAVRSSVCAGADMVNIHLLGGARMAQAAVQGLQEGCECKGLAAPPVLLGVTVLTSMAQQDLPAGLDLPLDSVVDVLARSGREWGLNGVVCSGYEVESIKKSCGTDYICLTPGIRPAAADDDQRRTMTPQQAARAGSDYLVVGRPVTGAADPAGAAYSIMESVRQA

SEQ ID NO: 16744 - DNA, 693 bp, Actinobacillus pleuropneumoniae serovar 1 str. 4074
  CDS (1)..(693)
atggataataaaattattgttgctttagactatgaaacagaatatgaagcattgagttttgtagatcaagttgatccgtctctttgtcgtgtgaaagtgggcaaagaaatgtttacgacgttaggcacgaattttgttaaacaattacacgaacgtaaatttgatgttttccttgatttaaaatatcacgatattccgaataccgtggctcgtgcggtacgttccgctgcggatttaggcgtgtggatggtggatttgcacgcttcgggcggcttaaccatgatggaggaagcgaaaaaaatcttagagccgtacggtaaagatgcgccgttacttattgcggtaacggttttaaccagtatggaagatttagacttattacaaatcggtattaacgcttcgccgatggaacaggtgattcgtttggcgcaccttgcgcaacgtgccggcttagacggtgtggtttgttctccgcaagaagtagaagtgcttcgtacgcattgtggtaaagattttaaattagtgacgccgggtattcgtccggagggttctgatgtcggcgatcaacgtcgaattatgacgcctaaacaagcgattgaaaccggatccgattatttggttatcggtcgtccgattacacaggctcaagacccgttatcggtattaaaatcaattaacgcctctattcgttaa

SEQ ID NO: 16745 - protein, 230 aa, Actinobacillus pleuropneumoniae serovar 1 str. 4074
MDNKIIVALDYETEYEALSFVDQVDPSLCRVKVGKEMFTTLGTNFVKQLHERKFDVFLDLKYHDIPNTVARAVRSAADLGVWMVDLHASGGLTMMEEAKKILEPYGKDAPLLIAVTVLTSMEDLDLLQIGINASPMEQVIRLAHLAQRAGLDGVVCSPQEVEVLRTHCGKDFKLVTPGIRPEGSDVGDQRRIMTPKQAIETGSDYLVIGRPITQAQDPLSVLKSINASIR

SEQ ID NO: 16746 - DNA, 714 bp, Fusobacterium nucleatum subsp. vincentii ATCC 49256
  CDS (1)..(714): transl_table=11
atgaaaaaagaaattataatagcacttgattttcctactttggaaaaaacactagactttttagataagttcaaagaggaaaaattatttgtaaaagttggaatggaactatatttacaaaatggaccaatagtaatagatgaaatcaaaaaaagaggacataaaattttcttagatttaaaattacatgatattccaaatactgtttactctgctgcaaaaggtttagctaaatttaatattgatatcttaactgttcatgcagctggtggttctgaaatgttaaaaggagctaaaagagctatgacagaagcaggagtaaatacaaaggttattgctataactcaacttacttctacaagtgaagaagatatgagaaaagaacaaaatatacaaacaagtatagaagaatctgttttaaactatgcaagacttgcaaaagaaagtggagttgatggggttgtatcttctgtccttgaaacaaagaaaattaggggacaaagtggagaagatttcattataataaatccaggaataagattagcagaagattcaaaaggtgaccaaaagagagtagctactccaatagacgctagtagagatggagcaagttatattgttgttggaagatcaataactggaaatgcaaatccagaagagagatatagacttataaaaaatatgtttgaaatgggggataaatatgttggatag

SEQ ID NO: 16747 - protein, 237 aa, Fusobacterium nucleatum subsp. vincentii ATCC 49256
MKKEIIIALDFPTLEKTLDFLDKFKEEKLFVKVGMELYLQNGPIVIDEIKKRGHKIFLDLKLHDIPNTVYSAAKGLAKFNIDILTVHAAGGSEMLKGAKRAMTEAGVNTKVIAITQLTSTSEEDMRKEQNIQTSIEESVLNYARLAKESGVDGVVSSVLETKKIRGQSGEDFIIINPGIRLAEDSKGDQKRVATPIDASRDGASYIVVGRSITGNANPEERYRLIKNMFEMGDKYVG

SEQ ID NO: 16748 - DNA, 699 bp, Psychrobacter sp. 273-4
  CDS (1)..(699)
atgaacaacgcaatcaattctcctgtcatcgttgcattagacaatatgacaaagaatgcctctcttgcgttagctgaccaattagatccggcgttatgccgattaaaagtaggtaaagagctgtatacccggtgtggtcctgagatagtcaaagcactacatcaacgccaatttgaagtttttttagacttaaaatttcatgatatcccgaataccaccgcacaagcagtattggctgccgctgagcttggtatatggatggtcaacgtccatgccagtgcagggctagaagcgatggcattggcaaagcagcgcttactagatagtgattttgacacgctactgattgcagtgactgtcttaacgtctatggacaatgaagcactcatgcaaactggtatcaccgacggcttagatgcacaagttagccgcttagcacaattgaccaagcaagcaggtcttgatggcgtggtatgctcagcgcaagaagcaaagacactaaaggcattatgtggtcaagactttaagctaataacccctggtattcgcttgctagacgacaacgctgatgatcaaaagcgtatttgcacgccgaaacaggcattaaacgatggctctgattatctggtcattgggcgctcaattacccaagcagcagatcctgcggctaagttgcagttaatacttcaaagcctttaa

SEQ ID NO: 16749 - protein, 232 aa, Psychrobacter sp. 273-4
MNNAINSPVIVALDNMTKNASLALADQLDPALCRLKVGKELYTRCGPEIVKALHQRQFEVFLDLKFHDIPNTTAQAVLAAAELGIWMVNVHASAGLEAMALAKQRLLDSDFDTLLIAVTVLTSMDNEALMQTGITDGLDAQVSRLAQLTKQAGLDGVVCSAQEAKTLKALCGQDFKLITPGIRLLDDNADDQKRICTPKQALNDGSDYLVIGRSITQAADPAAKLQLILQSL

SEQ ID NO: 16750 - DNA, 693 bp, Haemophilus influenzae R2846
  CDS (1)..(693)
atgacaagtaaaattattgtggcattggattatgagaaagaagcagaggctcttgctttagttgatcaaattgatccaagtttgtgtcgattaaaagtgggtaaagaaatgtttactacacttggtattaattttgtaaaacaattacatcaacgtaattttgatgtttttttggatctgaaatatcacgatattccaaatacggtagcaagagcagttcgttctgctgctgatttaggcgtatggatggtggatttacacgcaagtggtggcttgcgtatgatggaagaagcgaagaaaattcttgaaccttatgggaaagatgcaccattgcttattgctgtgacggtattaaccagtatggaagacttggatttattacaaattgggattaatgcatcgccaatggaacaagttttacgcttagctcatttaacccaacgggcgggtttagatggtgtagtctgttcccctcaagaagttgaaattttacgtaacgcttgtggagaagattttaaattagtgaccccagggattcgtccaataggaactgattttggcgatcaaagacgtgtaatgacgcctactgcagcaattcgtgcaggttcagattatttagttattggacgcccaataactcaagcggataatcctgcggaggttctccgttctattaatgtatctattgggtaa

SEQ ID NO: 16751 - protein, 230 aa, Haemophilus influenzae R2846
MTSKIIVALDYEKEAEALALVDQIDPSLCRLKVGKEMFTTLGINFVKQLHQRNFDVFLDLKYHDIPNTVARAVRSAADLGVWMVDLHASGGLRMMEEAKKILEPYGKDAPLLIAVTVLTSMEDLDLLQIGINASPMEQVLRLAHLTQRAGLDGVVCSPQEVEILRNACGEDFKLVTPGIRPIGTDFGDQRRVMTPTAAIRAGSDYLVIGRPITQADNPAEVLRSINVSIG

SEQ ID NO: 16752 - DNA, 717 bp, Anabaena variabilis ATCC 29413
  CDS (1)..(717)
atgactaataacaaaataattgtggctttggatgtgccggatacggagagtgcgatcgctctcattgataagttagagtcggtgactttctggaaggttggcttggaattgtttactagttccgggccgagaattctagaagtgctgaaatctagacaaaagcgtatctttctcgatttaaaatttcacgacattcctaataccgtggctggggcttgccgtggtgcagcccgctacggggtggatttgatgacaattcatgctacctctggcagagatgccctcaaggctgcgaaagaggcggtagaggaaggggctgcacaagctggggtgaaaccgtctaagttaattgctgtgacggtgttaaccagtatttctgctagacagttggcgttagatttgaaaattcctgtagagttgccagaatatgctttagatatggcgttgatggcgcaagaagtaggattagatggggctgtttgttcaccccaggaagtggcgcagttgcggcaaatttgcggtgatgactttgtgctggtttgtccgggagtacgtccaacatgggcagaagcaaaagaccaaaagcgatcgctcaccccctcccaagccatccaagccggggctgattatttagtaattggtcgtcccattactgctgctgctgaacctgagttagcctggaaacgaattgctcaagagttaactacagtggcatga

SEQ ID NO: 16753 - protein, 238 aa, Anabaena variabilis ATCC 29413
MTNNKIIVALDVPDTESAIALIDKLESVTFWKVGLELFTSSGPRILEVLKSRQKRIFLDLKFHDIPNTVAGACRGAARYGVDLMTIHATSGRDALKAAKEAVEEGAAQAGVKPSKLIAVTVLTSISARQLALDLKIPVELPEYALDMALMAQEVGLDGAVCSPQEVAQLRQICGDDFVLVCPGVRPTWAEAKDQKRSLTPSQAIQAGADYLVIGRPITAAAEPELAWKRIAQELTTVA

SEQ ID NO: 16754 - DNA, 687 bp, Ehrlichia canis str. Jake
  CDS (1)..(687)
atgtggtgtaatccaattatttgtgctttagacacttatgatattaatcatgcattgcggttgacaaaaatgctttatggtaaaatatcaatggtaaaattaggattggaattttttactgcacatgggttatctggtgtgcaagcagtctctgattgtggtattccaatatttcttgacttaaaattacatgatattcctaatactgttggtaaggctatatcagtgattaaatctttaaatattgctatgcttactattcatattagtggtggtagagatatgatgctaagtgctatagatagtatatttggtagtatgataaaattaataggtgtcactgtgttaacaagtattgatgattctgatttaaaagacatcggtattgatagatcatctattcaacatgtaatgctgttgtctaaagtggctcaagaaattggattatatggcatagtttgttctgcttttgaggtacaggaagtacgtaatcagtgtggcaaagattttaaacttgtagttcctggtataagatttgaagatgattatagtgatcaaaagagagtgaaaaatcccaaagatgcgattctagctggtgcagattatttagtaattggtcgtccaattactatgagtagtgatcctatacaaacagttgatgcaattttatcttcaattaatttataa

SEQ ID NO: 16755 - protein, 228 aa, Ehrlichia canis str. Jake
MWCNPIICALDTYDINHALRLTKMLYGKISMVKLGLEFFTAHGLSGVQAVSDCGIPIFLDLKLHDIPNTVGKAISVIKSLNIAMLTIHISGGRDMMLSAIDSIFGSMIKLIGVTVLTSIDDSDLKDIGIDRSSIQHVMLLSKVAQEIGLYGIVCSAFEVQEVRNQCGKDFKLVVPGIRFEDDYSDQKRVKNPKDAILAGADYLVIGRPITMSSDPIQTVDAILSSINL

SEQ ID NO: 16756 - DNA, 717 bp, Bacillus cereus G9241
  CDS (1)..(717): transl_table=11
atgtcacagtcgttaatcgttgcattagattttccagggaaacaagatgtagaacaattcttgcgccactttgaaggggaagagttatttgtcaaagttggtatggagttattttacaaagaaggccctgcgattattacgtacttaaaagaaaaaggacataagatttttctagatttaaaacttcatgatattccaaatacagtaaaaagcgctatgcgtagcctagctagtctagatgttgatatggtaaatgttcatgctgctgggggaagcagtatgatgaaagctgcaattgagggattagaggaaggtaagcaagaaggaaaagagagaccgatttgtattgcagttacacaactaacaagcacttcggaagctatgatgaaaaaagagatcggcattgagaaaacgttagaagaagcggttgctcattatgcaaaactaacaaaggaaagtggacttgatggcgttgtttgttcaacacttgaagttccgaaattacgtgaagtatgcggaaatgaatttgtaacagtaacaccggggattcgtcttacaagcgatgatgtaaatgaccaggtgcgcgtagcaacaccgaaacgtgcgagggaacttggctcaagctacatcgtagttggacgtagtattacaaaagcagaaaatccgcttgaagcgtataaaacagtaaaacaacagtgggaaggtgtaacagtatga

SEQ ID NO: 16757 - protein, 238 aa, Bacillus cereus G9241
MSQSLIVALDFPGKQDVEQFLRHFEGEELFVKVGMELFYKEGPAIITYLKEKGHKIFLDLKLHDIPNTVKSAMRSLASLDVDMVNVHAAGGSSMMKAAIEGLEEGKQEGKERPICIAVTQLTSTSEAMMKKEIGIEKTLEEAVAHYAKLTKESGLDGVVCSTLEVPKLREVCGNEFVTVTPGIRLTSDDVNDQVRVATPKRARELGSSYIVVGRSITKAENPLEAYKTVKQQWEGVTV

SEQ ID NO: 16758 - DNA, 735 bp, Pseudomonas fluorescens PfO-1
  CDS (1)..(735)
atgcgcgccgatttcgacttgcctgagagcccacccatgtccgcctgccagactcctatcatcgtcgccctggatttccctacccgtgacgccgcactgaagctggccgaccagttggacccgaagctgtgccgggtcaaagtgggcaaggaactgttcaccagttgcgccgcggaaatcgtcggcaccctgcgtgacaagggttttgaagtattcctcgacctgaaattccacgacattcccaacaccacggcgatggcggtcaaggctgcggccgagatgggcgtgtggatggtcaacgttcactgctccggcggcctgcgcatgatggcggcctgccgtgaagagctggacaagcgcagcggcccgcagccgttgctgattggcgtgaccgtgctgaccagcatggagcgtgaggatctggcaggtatcggtctggacatcgagccgcaggagcaggtgctgcgtctggcggcactggccgagaaggccgggatggacggtctggtgtgctcggcgctggaagccaccgcgctgaaaaccgcgcacccgtcgctgcaactggtgaccccggggatccgtccggcgggcagtgcgcaggacgaccagcgtcgcatcctgactccgcgtcaggcgctggatgccggctccgactatctggtgatcggccgtccgatcagtcaggcggcggatccggccaaggccctggcctcggtggttgccgaactggcctga

SEQ ID NO: 16759 - protein, 244 aa, Pseudomonas fluorescens PfO-1
MRADFDLPESPPMSACQTPIIVALDFPTRDAALKLADQLDPKLCRVKVGKELFTSCAAEIVGTLRDKGFEVFLDLKFHDIPNTTAMAVKAAAEMGVWMVNVHCSGGLRMMAACREELDKRSGPQPLLIGVTVLTSMEREDLAGIGLDIEPQEQVLRLAALAEKAGMDGLVCSALEATALKTAHPSLQLVTPGIRPAGSAQDDQRRILTPRQALDAGSDYLVIGRPISQAADPAKALASVVAELA

SEQ ID NO: 16760 - DNA, 744 bp, Rhodospirillum rubrum
  CDS (1)..(744)
atgcccatggcacagatgacgcaaaatccggttttcgtcgcgatcgacaccaccgttgtcggcgatgcgaccacccttgccgcccgcctccatgacgaggtcggcggcatcaagcttggactcgagtttttcgcccgcaatgggcacaagggcgtcaaggaggtgtgcagggccggcgccctgccgctgttccttgatctcaagttccatgacatccccaatacggtggccggggcggtgcgcgcggtgatgccgctggcgccggccttgctcaatgtccacgcctgtggcgggcgggcgatgatgatcgccgcgcgcgaggccgcgcaaagcgaggccctggccctggggatcgcgccgcccaagatgatcgccgtgaccgtgctgaccagcatggacgacgacgatctgggcggaaccggcgtcgccggcggcgtgcttgatcaggtgcggcgtttggccgccctgacccgcgacgccgggcttgatggcgtggtctgctcggcccgcgaggcccgggtgctgcgcgccgatttgggcgatgatttcttgctggtgacgccgggggtgcggccgctgtggtcgaccaccaacgaccagaagcgggtggtcaccccgcaagaggcgatggccgagggggccgatgtgctggtgatcggccggccgatcaccggggcgaccgatcccgcccaggcggcgcggctgatcgccggggaaatcgtgggatgggacgtcgggatatga

SEQ ID NO: 16761 - protein, 247 aa, Rhodospirillum rubrum
MPMAQMTQNPVFVAIDTTVVGDATTLAARLHDEVGGIKLGLEFFARNGHKGVKEVCRAGALPLFLDLKFHDIPNTVAGAVRAVMPLAPALLNVHACGGRAMMIAAREAAQSEALALGIAPPKMIAVTVLTSMDDDDLGGTGVAGGVLDQVRRLAALTRDAGLDGVVCSAREARVLRADLGDDFLLVTPGVRPLWSTTNDQKRVVTPQEAMAEGADVLVIGRPITGATDPAQAARLIAGEIVGWDVGI

SEQ ID NO: 16762 - DNA, 702 bp, Thermobifida fusca
  CDS (1)..(702)
ttggccgcacccatcgccgtcgcgctcgacgccccggatgtggagaccgcttcccgctgggccgccgcggtcgccccgcacgtcagcaccctgaaagtcgggctggagctgtacctgcgctacgggcccgcggttgtggaggccgtgcgcggtgcgcgggagaccgcgctgttcctcgacctgaaactgcacgacatccccgccacggtcgcgggcgctgcccgatcggtggccgggcttgctccggcgttcctcaccgtgcatgcggccggaggcgccgacatggtccgcgccgcggtggaggcggcacccgagacgcggatcgccgcggtgaccgtgctgacgtcgctggacgaggccgcgctcggcgcggtggggatgcgcggcccggcgagggacgcggtgcgccggcttgcggtgctcgcagtggaggcgggggcccgggccttggtgtgctccccgcaggaggcggctatggtccgcgccgaggtcggcccggacgtcacgctcatcaccccgggggtgcggccggccggggccgcccagggggaccaggcgcgggtggcgactcccgaggcggcgctggcggccggggcggacctgctggtcatcggacggcccattacccgcgcaccggatccgggggcggcggctgcggcgctcgccgcagagctccaaaaaaccggggcgtccccctcctga

SEQ ID NO: 16763 - protein, 233 aa, Thermobifida fusca
MAAPIAVALDAPDVETASRWAAAVAPHVSTLKVGLELYLRYGPAVVEAVRGARETALFLDLKLHDIPATVAGAARSVAGLAPAFLTVHAAGGADMVRAAVEAAPETRIAAVTVLTSLDEAALGAVGMRGPARDAVRRLAVLAVEAGARALVCSPQEAAMVRAEVGPDVTLITPGVRPAGAAQGDQARVATPEAALAAGADLLVIGRPITRAPDPGAAAAALAAELQKTGASPS

SEQ ID NO: 16764 - DNA, 675 bp, Novosphingobium aromaticivorans DSM 12444
  CDS (1)..(675)
atgagcaacccgatctacctcgccctcgaccttccccgcctcgacgcggccgtcgcgctcgcccagaaggtcaagggccatgtcggaggcctcaagctcggcctcgaattcttctgcgcccatggccaccacggcgtccacgaagtcgccaaggtcggcctgccgatcttcctcgacctgaaactgcacgacattcccaacaccgtcgcgggcgccatgcagtcgatccacgtcctcgagcccgccatcgtcaccattcacgccggtggtggccgcgcgatgatggaagacgccaaggccgccgcgggcgagcataccaaggtcgtcgcagtcaccgtcctcaccagcctcgacgatgccgacatgagcacgatgggcgtcggcggctctgcctacgaccaggccatacgccttgccgacctggcccaggaggccgggctcgacggtatcgtctgttccggccacgaagtcggcgcgatccacaagcgctggaagaacggcttcttcgtcgtgccgggcctgcgccccgccgaaggcaagctgggcgaccagaagcgtgccgtcacgccgcgcgccgcgcgcgatgcgggggccagcgttctcgtcatcggccggccgatcagccgcgccgaagatccggtcgctgcggcccgcgcgatcgaagccacgctctga

SEQ ID NO: 16765 - protein, 224 aa, Novosphingobium aromaticivorans DSM 12444
MSNPIYLALDLPRLDAAVALAQKVKGHVGGLKLGLEFFCAHGHHGVHEVAKVGLPIFLDLKLHDIPNTVAGAMQSIHVLEPAIVTIHAGGGRAMMEDAKAAAGEHTKVVAVTVLTSLDDADMSTMGVGGSAYDQAIRLADLAQEAGLDGIVCSGHEVGAIHKRWKNGFFVVPGLRPAEGKLGDQKRAVTPRAARDAGASVLVIGRPISRAEDPVAAARAIEATL

SEQ ID NO: 16766 - DNA, 717 bp, Microbulbifer degradans 2-40
  CDS (1)..(717)
atgaacattccagatcctcaactcgttattgcactcgattttgacacccaagagtcctgcttggagcttgtagaccaactagacccaacgctttgccgtttaaaaattggtaaagagctgtttacttcctgtgggcctaaaattgtcgaaaagatacagtggaaagggtttgacgtattcctcgatttgaaatttcacgatatacccaataccgtagcaaaagcggttaaggctgcagccgagttgggcgtatggatggtgaacgtacacgcgagtggcggcgaaaaaatgatgctagccgcaagagaagcgttagaaggttatcaagttaagcctttgttaattgcagttaccgtactaaccagtatgagcgacgaagacttaaaagcgcttggcattactgtaaccgctgccgagcaagttcagcgtttagctgcgttagctaagcaggcgcaaatggatggcgttgtatgctcggcgcaagaggttgttcagcttaaagcatccctcggcgaagagtttaaaatgataacccccggtattcgcccatcttttgcgggtaatgacgaccaaacgcgtattatgaccccagagcaagcacttaaagcgggtagcgattacctagttgttggtcgcccagtaacccaagcggacgaccctttgcgtgcgctagagcaaattgccgcagaaatggctcgtgcatcactaggtagctag

SEQ ID NO: 16767 - protein, 238 aa, Microbulbifer degradans 2-40
MNIPDPQLVIALDFDTQESCLELVDQLDPTLCRLKIGKELFTSCGPKIVEKIQWKGFDVFLDLKFHDIPNTVAKAVKAAAELGVWMVNVHASGGEKMMLAAREALEGYQVKPLLIAVTVLTSMSDEDLKALGITVTAAEQVQRLAALAKQAQMDGVVCSAQEVVQLKASLGEEFKMITPGIRPSFAGNDDQTRIMTPEQALKAGSDYLVVGRPVTQADDPLRALEQIAAEMARASLGS

SEQ ID NO: 16768 - DNA, 687 bp, Oenococcus oeni PSU-1
  CDS (1)..(687)
atgaacaaacccgtttttatcgctttggattttcctaatttaaaaactgctttcgattttctgaacaaatttcctagtcatgaaaaaccagctgttaaagtcggcatggaacttttttatgccgaaggaccgaaaattattcaacagttaaggcaaaaaggctacaaagttttccttgatttaaaactatacgatattcctcatacagtggccgcagcggttaggtctttgctggctttggatgttcagtacttaacgatccatagtcttggcggattaaaaatgatggaagcagctgtcgatgccgctgaggggaaaataaaattattagctgtcactcaattgacttctataagtgcaaacgaaatgcgtggtactcaattaaccagtgcaacaattgaacaatccgtcaaacatttgacgcaattggctttattggcgggggttgacggaacgatttcttcgcctctggaagcaaatataatcaagcaaataacgccggatgattttctgaaaattacaccgggaatccgcttgttcaatgatcaaaatggcgatcaaattagaattacgacgcctaagaaagctaaagagttcggagcaagtggattggttgtcgggcgatcaataactcaggcagcagaccccttgtctgtctatcgaaaaattttggaggaatttgaataa

SEQ ID NO: 16769 - protein, 228 aa, Oenococcus oeni PSU-1
MNKPVFIALDFPNLKTAFDFLNKFPSHEKPAVKVGMELFYAEGPKIIQQLRQKGYKVFLDLKLYDIPHTVAAAVRSLLALDVQYLTIHSLGGLKMMEAAVDAAEGKIKLLAVTQLTSISANEMRGTQLTSATIEQSVKHLTQLALLAGVDGTISSPLEANIIKQITPDDFLKITPGIRLFNDQNGDQIRITTPKKAKEFGASGLVVGRSITQAADPLSVYRKILEEFE

SEQ ID NO: 16770 - DNA, 741 bp, Pediococcus pentosaceus ATCC 25745
  CDS (1)..(741)
atgttaagagcggttcagaatggagtttttatggaaaaaccagttatgattgcgctagattttaaggatcggggagaacttaaccaattcttggagcaatttccggaacatttgaagttaaccattaaattgggaatggaactcttctacggaatgggtcccgaaatcgttcgagatatgcgtcaaaaagggcatgacatctttcttgatttaaaattgaacgatattcctaatacggtagaaaaagcaatgatgcaattaggtcgaatgggggttcaatacacaacaatccatgcgatgggtggttctgatatgattcgagcggctaaacgaggattggttgctggagctagagaagtagacttaccaacgcctaaactattagcagtaacggaattaacttctatttcagaaaagcaactaagtgaagaacagaatgttagtttaccaatggcagatcaagtacttagcctagcaaaattgactagtacggctggcggagatggtgtaatttgttctccaaacgaagttagttatttaaaaccccaacttccagaagattttctgtttgtgacacctggaattcgacctgccggagcagcaaagggtgatcaaaaacggacgatgactgctgcggaagctgccaaagcaggaagctcagctattgtggtaggtagaccaattactcaatctgaggacccggttgtggcgtaccaagcaattttaagtgaatttaactaa

SEQ ID NO: 16771 - protein, 246 aa, Pediococcus pentosaceus ATCC 25745
MLRAVQNGVFMEKPVMIALDFKDRGELNQFLEQFPEHLKLTIKLGMELFYGMGPEIVRDMRQKGHDIFLDLKLNDIPNTVEKAMMQLGRMGVQYTTIHAMGGSDMIRAAKRGLVAGAREVDLPTPKLLAVTELTSISEKQLSEEQNVSLPMADQVLSLAKLTSTAGGDGVICSPNEVSYLKPQLPEDFLFVTPGIRPAGAAKGDQKRTMTAAEAAKAGSSAIVVGRPITQSEDPVVAYQAILSEFN

SEQ ID NO: 16772 - DNA, 738 bp, Thiobacillus denitrificans ATCC 25259
  CDS (1)..(738)
atgacgcacaagattatcgtcgcgctggattttccggcgggtgccccggcgctggcactggcggatcggctcgatcccgcacgatgccggctcaaggtcggcaaggagttgttcacggcagccggacccgatctcgtgcgcgcgctggtcgcgcgcggcttcgaggtctttctcgatctcaagtttcacgatatcccgaataccgtcgccgccgcgtgccgcgcggccgcgggactcggcgtgtggatgctcaacgtccacgccgcgggcggtcggcgcatgatggacgccgcccgcgaggcgctcgaatccctgcccccgggggatggcgccgcggatacgccgcaacgccctttgctgatcgcggtcactgtgttgacgagcatgagcgccggcgacctcgccgagaccggcgtcgccgacacgccggccgagcaggtgatgcggctcgcccgcctcgcacacgcctgcgcgctcgacggcgtcgtctgctccgcgcaggaggccgcaggtctgcgtgccgcgctcggcgcggacttccgtctggtcaccccggggattcgcccggcgggcgccgcagcggcggaccagcgccgcgtgatgacgccggtcgaggcgctgcgcgccggagccaccgatctggtgatcggccgccccatcaccggcgcgggcgatccgctcgcggcgctcgcggcgattcaagcggacattgaagaaaatctagggagagcgttttga

SEQ ID NO: 16773 - protein, 245 aa, Thiobacillus denitrificans ATCC 25259
MTHKIIVALDFPAGAPALALADRLDPARCRLKVGKELFTAAGPDLVRALVARGFEVFLDLKFHDIPNTVAAACRAAAGLGVWMLNVHAAGGRRMMDAAREALESLPPGDGAADTPQRPLLIAVTVLTSMSAGDLAETGVADTPAEQVMRLARLAHACALDGVVCSAQEAAGLRAALGADFRLVTPGIRPAGAAAADQRRVMTPVEALRAGATDLVIGRPITGAGDPLAALAAIQADIEENLGRAF

SEQ ID NO: 16774 - DNA, 729 bp, Chloroflexus aurantiacus
  CDS (1)..(729)
atgagtctcgcgccacgcgaacggatactggttgcgctcgatacacccgatctggatgcagcagttgctttagcaacccggttgcgcgggcaggttggcggctataaagtcggcctggaaatctgctctgcggtcggcgtaccccagattgtatccgccatgactgcggttggcggaagtgtctttctcgatctcaaactgcacgacattccgaacacggtcgccggtgcagtccgcgccgtctgcaacctcggcccggcagtccagatgttgacactccactgtagtggaggtagcgcaatgctccgcgccgcagtcaatgcagcccaaagcatgccctaccgtccactgctgttgggcgttaccgtgctcaccagtctcgatgccacagcactcgccggcgaactgcgtgtcacgtcggacatcaccgactacgtagttcatctggctcgcatggcgcaggattgtggtctcgacggcgtggtagcttcgccgcacgaagtgagtgccattcgtactgcctgccctcacgtgcggatagtcacccccggtattcgcccacagtgggccgcagaaggtgaccagcgtcgcgtcatgacaccggcagccgccctacgcgctggtgccgactatctggtcatcggacgaccaattactgcgccaccggcaatcatcggcgatccggtcaccgcagtcgcacggattcttgcagaattggaacaggaatga

SEQ ID NO: 16775 - protein, 242 aa, Chloroflexus aurantiacus
MSLAPRERILVALDTPDLDAAVALATRLRGQVGGYKVGLEICSAVGVPQIVSAMTAVGGSVFLDLKLHDIPNTVAGAVRAVCNLGPAVQMLTLHCSGGSAMLRAAVNAAQSMPYRPLLLGVTVLTSLDATALAGELRVTSDITDYVVHLARMAQDCGLDGVVASPHEVSAIRTACPHVRIVTPGIRPQWAAEGDQRRVMTPAAALRAGADYLVIGRPITAPPAIIGDPVTAVARILAELEQE

SEQ ID NO: 16776 - DNA, 672 bp, Streptococcus pyogenes M49 591
  CDS (1)..(672)
atgaaagaagaacgcccaattattgctttagacttttcatcatttgaggagactaaagcatttttagacttatttccagcagaagaaaaactatacgtgaaaattggtatggaattatattatgcgcaaggaccagatattgttcggtatatcaaatcgttagggcataatgtatttttggatttaaaattacatgatattccaaatactgttcgtgctgctatggcagttcttaaagaattagatattgatatggcaactgttcatgcagctggtggtgtagagatgctaaaagcagctcgagaaggactaggtcaaggccctaccttaattgcggtaacacagctaacttcaaccagtgaagaccaaatgcgtggtgatcaaaatattcaaacgagtcttttagagtctgttttgcattacagcaagggggcagctaaagctcagctagatggggtggtttgttcggcacaagaagtagaagctatcaaggcggtgacgcctacaggatttaattgcttaactcctggcattcgtcctaaaggcagtaatattggcgatcaaaaacgagtgatgactccaaaccaagcaagacgcattggaagtgattatattgtggtagggcgaccaaaattaccaggcaaagacccagtggctacttacaagctataa

SEQ ID NO: 16777 - protein, 223 aa, Streptococcus pyogenes M49 591
MKEERPIIALDFSSFEETKAFLDLFPAEEKLYVKIGMELYYAQGPDIVRYIKSLGHNVFLDLKLHDIPNTVRAAMAVLKELDIDMATVHAAGGVEMLKAAREGLGQGPTLIAVTQLTSTSEDQMRGDQNIQTSLLESVLHYSKGAAKAQLDGVVCSAQEVEAIKAVTPTGFNCLTPGIRPKGSNIGDQKRVMTPNQARRIGSDYIVVGRPKLPGKDPVATYKL

SEQ ID NO: 16778 - DNA, 840 bp, Campylobacter coli RM2228
  CDS (1)..(840): transl_table=11
atgaaactctgcgtagctcttgatcttgccaccaaagaagagtgcttaaggcttgctaaagaattaaaaggtttagatctttggctaaaagtgggtttaagagcctatttaagagatggctttaaattcatagaagaacttaaaaaaatcgatgaatataaaatttttctcgatcttaaaattcatgatattcctaataccatggcagatgcttgcgaggaaatttcaaaacttggcgttgatatgattaatatccatgcaagtgctggaaaagtcgctatgcaagaagtgatgtctagactcaatcgcttcaataaaagacccttggtgttagcagtttcagcacttactagctttgatgaagaaaatttttacagcatttataagcaaaacatcgatgaagctgtgattcatttttcaaaaatgtcttatcaaaatggacttgatggtatggtatgttcggtttttgaaagtaaaaaaattaaagaacatacaaattcaaatttcttaaccctcactcctggaattcgtccttttggggaagcaagtgatgatcaaaaacgcgttgctaatcttacaatggctagagaaaatttaagtgattatatcgttgtgggaagacctatatataaaaatgaaaatcctagagctgtatgtgaaaaaattttagacaaaatacacagaaaaaatataagcgaaaatgatatagagcaaaattatgaagcaatgcagcaaaaagaatgggatatgtgcaatcattttgaagaatggatcaaaactcagcctgataaagaacaagctttgaaagaattttatactaagtgcgggataaaatattga

SEQ ID NO: 16779 - protein, 279 aa, Campylobacter coli RM2228
MKLCVALDLATKEECLRLAKELKGLDLWLKVGLRAYLRDGFKFIEELKKIDEYKIFLDLKIHDIPNTMADACEEISKLGVDMINIHASAGKVAMQEVMSRLNRFNKRPLVLAVSALTSFDEENFYSIYKQNIDEAVIHFSKMSYQNGLDGMVCSVFESKKIKEHTNSNFLTLTPGIRPFGEASDDQKRVANLTMARENLSDYIVVGRPIYKNENPRAVCEKILDKIHRKNISENDIEQNYEAMQQKEWDMCNHFEEWIKTQPDKEQALKEFYTKCGIKY

SEQ ID NO: 16780 - DNA, 684 bp, Campylobacter lari RM2100
  CDS (1)..(684): transl_table=11
atgaaactttgcgtggcttttgatgtggcaagctatgatgagtgtataaatttagccaaagaattaaaaggtttagatctttgggttaaaatagggcttagatcgtatttaagagatggagtaaagcttttagaagcgattaaaaaagtggataattttaaaatctttttagatttaaagctttatgatataccaaatactatggcagatgcttgtgaagaacttgctaagcttgatgtaaatatgtttaatatccatgcaagtgcaggtaaaagtgctatgtgtatgattatggagcgcttaaatgctttaagtaaaagacctttggtgcttgctgtatctgctttaactagctttgatgagcaagaattttttagtgtatataaacaagatattaaacaagctgttaaggatttttctaaaattagttatgaaagcggtcttgatggtatggtttgttcagtatatgaaagcttactgattaaagaaaatacaagtgcaaattttattacattaacgcctggaatccgtccgtttaaagaaaattcagatgatcaaaaaagagtagctgatatacagtgtgctaaggataatttgtcagattttatcgtggttggaagacctatttataaagcaaaagaacctagaaggatttgcgagaatatattagagcatttaaaataa

SEQ ID NO: 16781 - protein, 227 aa, Campylobacter lari RM2100
MKLCVAFDVASYDECINLAKELKGLDLWVKIGLRSYLRDGVKLLEAIKKVDNFKIFLDLKLYDIPNTMADACEELAKLDVNMFNIHASAGKSAMCMIMERLNALSKRPLVLAVSALTSFDEQEFFSVYKQDIKQAVKDFSKISYESGLDGMVCSVYESLLIKENTSANFITLTPGIRPFKENSDDQKRVADIQCAKDNLSDFIVVGRPIYKAKEPRRICENILEHLK

SEQ ID NO: 16782 - DNA, 681 bp, Campylobacter upsaliensis RM3195
  CDS (1)..(681): transl_table=11
atgaaactttgcgtagccttagatttagaaaataaagagcgttgtttagagcttgtaagggaactaaaagaccttgatatatggcttaaaataggacttagagcctatataagagatggctttaaatttatagaagagcttaaaaaattaagcacacagcccctttttttagacctaaaaatttatgatatcccaaacactatgagtgatgcttgtgaggagtgtgcgaaacttggggttaatatgataaatcttcacgcaagtgctgggaaaaaggctatgcaaagcgttatgcaaagattgcaaaatttacaaaaacgccccttagtgcttggtgtttcggctcttactagctttgatgaagaagaattttatagcatttataggcaaaatttaaaagaagcagtaataaatttgtcaaaacttgcctatgaaagtgggcttgatggtatggtttgctctgtgtttgaaagccttttgattaaacaaaatacaagcgaaaattttctcacccttacccctgctatccgcccctttaaagaggaagcaaacgatcaaaaaagagtggcaaatttagaaagtgcgaaagaaagtaagagcgattttatagtcgttgggcgtcctatttatgaggctttaaaccctaaagaagtctgcgaaaaaattcttgcaagtttataa

SEQ ID NO: 16783 - protein, 226 aa, Campylobacter upsaliensis RM3195
MKLCVALDLENKERCLELVRELKDLDIWLKIGLRAYIRDGFKFIEELKKLSTQPLFLDLKIYDIPNTMSDACEECAKLGVNMINLHASAGKKAMQSVMQRLQNLQKRPLVLGVSALTSFDEEEFYSIYRQNLKEAVINLSKLAYESGLDGMVCSVFESLLIKQNTSENFLTLTPAIRPFKEEANDQKRVANLESAKESKSDFIVVGRPIYEALNPKEVCEKILASL

SEQ ID NO: 16784 - DNA, 675 bp, Wolbachia endosymbiont of Drosophila ananassae
  CDS (1)..(675): transl_table=11
atgaacccaataatatgcgcactggatacacaagacttaaataaggctatttctctagctaatgctctgcgtggtaaagttggcatggtaaagctgggattagaattttttgctgctcaaggtctttctggagtgcaagaagttgcaaaatgcaatgtaccaatttttttagatctgaaattgcatgacattccaaacactgtagccaaaacagttgaagtaataaaagttctgaacattgaaatgttaactctgcacatcagcggtggaacaaaaatgcttgaagaagcgctaagtgtagtgcaaggcacaaaaataaagctgattggagtgacagtgctaactagtatgagcaatgaggatttaaacgagcttggagtagcaagagaggcaaaatcacaggtaattttgcttgcaaagcttgcaaaaaagattggactccatggagtagtctgttctgcactagaagctcaagaagtgcgccgagaatgcggtgaagactttaaaattattactccaggaattcgtatagatccaggtcatgacgaccaaaaaagaacagcaacaccaaaagaagcaataaattcaggagctgattatatcgtcattggcagacccattacaaaaactacaagtagtgcggagctaatattgaaatccatgaaagaattttaa

SEQ ID NO: 16785 - protein, 224 aa, Wolbachia endosymbiont of Drosophila ananassae
MNPIICALDTQDLNKAISLANALRGKVGMVKLGLEFFAAQGLSGVQEVAKCNVPIFLDLKLHDIPNTVAKTVEVIKVLNIEMLTLHISGGTKMLEEALSVVQGTKIKLIGVTVLTSMSNEDLNELGVAREAKSQVILLAKLAKKIGLHGVVCSALEAQEVRRECGEDFKIITPGIRIDPGHDDQKRTATPKEAINSGADYIVIGRPITKTTSSAELILKSMKEF

SEQ ID NO: 16786 - DNA, 675 bp, Erythrobacter litoralis HTCC2594
  CDS (1)..(675): transl_table=11
gtgagcaacccggtcttcctcgcgctcgacatcccgcggctggaagcgggcaaggcgctggtcgacaaggtcaaggcgcatatcggtggtgtgaagctcggcatggagttcttctatgcccacggccatcacggggtgcacgaaattgcgcactgtggtctgccggtcttcctcgacctcaagctgcacgacattcccaacaccgtcgccgccgcgatgcaatcgatccatgtgctggagccggccatcgtcacggtccacgcatcgggcgggcgcgcgatgatggaagacgccaaggcggcggcgggcgagaacaccaaggtcgtcggcgtaaccatgctgaccagcctggacgagcgcgacctcgaacgcaccggggtcgatggcagcccgcacgatcatgtcatgcggctggccgaactggcggagaacgccgggctcgacgggatcgtctgctccggacaggaagtcggcgcggtacacaagcaatggaaacagggcttcttcgttgttcccggcctgcgcccggcaggcagcgcaagtggtgaccagaagcgcgtcgtcaccccacgccaggcgcgtgacgacggtgccagcgtcctggtgatcggccgcccgatcagcaaggcggacgatccggaacaggctgcgcgggatatcgaggcgacgctgtga

SEQ ID NO: 16787 - protein, 224 aa, Erythrobacter litoralis HTCC2594
MSNPVFLALDIPRLEAGKALVDKVKAHIGGVKLGMEFFYAHGHHGVHEIAHCGLPVFLDLKLHDIPNTVAAAMQSIHVLEPAIVTVHASGGRAMMEDAKAAAGENTKVVGVTMLTSLDERDLERTGVDGSPHDHVMRLAELAENAGLDGIVCSGQEVGAVHKQWKQGFFVVPGLRPAGSASGDQKRVVTPRQARDDGASVLVIGRPISKADDPEQAARDIEATL

SEQ ID NO: 16788 - DNA, 714 bp, Lactococcus lactis subsp. cremoris SK11
  CDS (1)..(714)
atgcaagaaaatagacctgttattgccctagatttcccagaattctcagatgtgaaagatttccttgaaaaatttgacccgtctgaaaaactctacatcaaacttggtatggaacttttttataccgccggcccacaagtagtatattatgtgaaatcgctcggtcatagcgttttccttgatttaaaacttcatgatattccaaatacagttgaatcatccatgcgtgttttagcccgtttgggagttgatatggtcaatgttcacgctgctggcggggttgagatgatggttgcagctaaacgcggtttagaagcagggactccaactggacgtcaaagaccaaaactaattgccgttacgcaattaacctcgacttctgaggaaattatgcaaaatgaccaaaaaattatgaccagtcttgaagaatctgtcattaactacgcacaaaaaacagcccaagccggacttgatggtgtcgtttgctccgctcatgaagttgaaaaaattaaagcggcaacatcaaaagaattcatttgtttaacaccgggaattcgtccagaaggagcaagtaaaggcgaccaaaaacgagtaatgacaccaaaagaagcaagaacaattggttcagattacattgttgttggtcgaccaattacacaagcaaaagaccctgtttcagcttatcatgcgataaaggaagaatggaatcaataa

SEQ ID NO: 16789 - protein, 237 aa, Lactococcus lactis subsp. cremoris SK11
MQENRPVIALDFPEFSDVKDFLEKFDPSEKLYIKLGMELFYTAGPQVVYYVKSLGHSVFLDLKLHDIPNTVESSMRVLARLGVDMVNVHAAGGVEMMVAAKRGLEAGTPTGRQRPKLIAVTQLTSTSEEIMQNDQKIMTSLEESVINYAQKTAQAGLDGVVCSAHEVEKIKAATSKEFICLTPGIRPEGASKGDQKRVMTPKEARTIGSDYIVVGRPITQAKDPVSAYHAIKEEWNQ

SEQ ID NO: 16790 - DNA, 720 bp, Lactobacillus casei ATCC 334
  CDS (1)..(720)
atgacgcctattatcgcactggattttaaagataagaccacaactcttgattttttaagccaatttccaaaagaagaacatttgttcgttaaagttggcatggaacttttctatgctgaaggcccagcaattatcaccgagattcaacaagcccgaccggtgtcgatttttctcgatttaaaacttcacgatatccctaacaccgtggaaaaagcggcgtggcaattgggtaaactaggtgtggcgatgaccactgtccacgcagcaggcgggaaagacatgatgatcgcagccaaacgcgggctattggctggcgcaaaggcagctggtcatccagcaccaaaaatgcttgcgatcacgcagctaacttctacagatcagacgatgctgacaaatcagctttcgattgagatcccgatcagtcaagcggttcagcatcttgcagccatcgcgcaggcaagtaatgccgatggtgtggtggcaagtgctttggaaacaccactcattcgaagtgtgacgcgacctgattttctggtagtcaccccgggaattcgaccgtatggtgcggcagtcggcgaccaaaaacgagtcgtgaccccgggcagagccaagcgtttaggcagttcagcgattgttgttggccggccgattacgcaggctgatgatccggtggcggcttatcaatcagttaaggaagcgtgggaaacagcacatgactaa

SEQ ID NO: 16791 - protein, 239 aa, Lactobacillus casei ATCC 334
MTPIIALDFKDKTTTLDFLSQFPKEEHLFVKVGMELFYAEGPAIITEIQQARPVSIFLDLKLHDIPNTVEKAAWQLGKLGVAMTTVHAAGGKDMMIAAKRGLLAGAKAAGHPAPKMLAITQLTSTDQTMLTNQLSIEIPISQAVQHLAAIAQASNADGVVASALETPLIRSVTRPDFLVVTPGIRPYGAAVGDQKRVVTPGRAKRLGSSAIVVGRPITQADDPVAAYQSVKEAWETAHD

SEQ ID NO: 16792 - DNA, 240 bp, Lactobacillus delbrueckii subsp. bulgaricus ATCC BAA-365
  CDS (1)..(240)
atgcctttggaagtcaaggcgatgaagagcgaattcagcgacgacttcatgttcgtcactccgggcatccggccaaagagctaccaaaaagacgaccaggcccgggtggccaccccaggccaggcgcgggaaaacgggtcaaccgctattgttgtcggccggccaatcacccaggccgctgacccgcaaaaagcatatgaagagattttgaaggattggagcaagaacgatgcaacataa

SEQ ID NO: 16793 - protein, 79 aa, Lactobacillus delbrueckii subsp. bulgaricus ATCC BAA-365
MPLEVKAMKSEFSDDFMFVTPGIRPKSYQKDDQARVATPGQARENGSTAIVVGRPITQAADPQKAYEEILKDWSKNDAT

SEQ ID NO: 16794 - DNA, 696 bp, Streptococcus thermophilus LMD-9
  CDS (1)..(696)
atgagagaaaatcgtcctgttattgcccttgatttcccgactcttgaggatgtgaaggctttccttgctaagtttcctgctgatgaaaagctctatgtgaagattggtatggaactttactatgcggctggtcctgagattatacgctacgttaaagagcttggccatagtattttccttgaccttaagcttcacgatattccaaatactgtcaaatcagctatgcgtgtcttgtctaaccttggcgttgatatgacaaatgtgcatgcggctggtggcgtggagatgatgaaagctgcgcgtgaaggcttgggagatggaccaatcttgattgctgtaactcagttgacctctacctctgaagagcagatgcgtgattttcaaaatatccaaaccacacttcaagaatcagtggttcattatgctcagaagactgctgaagcaggtctcgatggtgttgtctgttcagcacacgaagtacccaaaatcaaagaagcaactaaccaagacttcatttgtttgacacctggtattcgtccagcaggagcagcggttggtgaccaaaaacgtgttatgactcctgctgatgctcatcaaattggttcagactacattgtcgttgggcgcccaattacgcaagctgaagatccagtggcagcttatcacgacatcaaggcccaatggaacgatcaataa

SEQ ID NO: 16795 - protein, 231 aa, Streptococcus thermophilus LMD-9
MRENRPVIALDFPTLEDVKAFLAKFPADEKLYVKIGMELYYAAGPEIIRYVKELGHSIFLDLKLHDIPNTVKSAMRVLSNLGVDMTNVHAAGGVEMMKAAREGLGDGPILIAVTQLTSTSEEQMRDFQNIQTTLQESVVHYAQKTAEAGLDGVVCSAHEVPKIKEATNQDFICLTPGIRPAGAAVGDQKRVMTPADAHQIGSDYIVVGRPITQAEDPVAAYHDIKAQWNDQ

SEQ ID NO: 16796 - DNA, 684 bp, Anaeromyxobacter dehalogenans 2CP-C
  CDS (1)..(684): transl_table=11
atgaagccgtcggaacggatctgcgccgcgctcgacttccccaccttcgccgcggccgagccgttcgcgcgcgcggtcgcgccggaggtcgggatcctcaaggtcggcctcgagctgttcgcggccgaggggcccgccgcggtgcgcgccgcggcgcggctgggccggccggtgttcctcgacctgaagctgcacgacatccccaacaccgtggagggcgcggcgcgaagcgcggccgcgagcggcgcggcgctgctcaccgtgcacgcggccggcggggccgagatggtgagggcggccgtgcgcggcgccggccccggcgtgcgggtgctggcggtgacggtgctcaccagcctggacgccgcggcgctcgaggccatcggcctcgccggcccgcccgaggcggcggtggtgcggctggcgcgcctcgcggtggacgccggcgccggcgggatcgtctgctcgccgcacgaggtggcggcggtgcgcgcggcggtggggcccggcccgctgctggtggtgccgggggtccgcccggcgggcgcggcgaagggcgaccaggcccgggtggcgacgcccgccgaggcggtgcgcgccggcgccgacgtcatcgtggtggggcggccgctccgcgacgcgccggacccggccgccgcggcccgcgccatcgccggcgagctctag

SEQ ID NO: 16797 - protein, 227 aa, Anaeromyxobacter dehalogenans 2CP-C
MKPSERICAALDFPTFAAAEPFARAVAPEVGILKVGLELFAAEGPAAVRAAARLGRPVFLDLKLHDIPNTVEGAARSAAASGAALLTVHAAGGAEMVRAAVRGAGPGVRVLAVTVLTSLDAAALEAIGLAGPPEAAVVRLARLAVDAGAGGIVCSPHEVAAVRAAVGPGPLLVVPGVRPAGAAKGDQARVATPAEAVRAGADVIVVGRPLRDAPDPAAAARAIAGEL

SEQ ID NO: 16798 - DNA, 732 bp, Azotobacter vinelandii AvOP
  CDS (1)..(732): transl_table=11
atgcccgccacagcgattttcccggagcccgtccccatgtcctgccagaccccgatcatcgtcgccctcgacttccccggccgcgaggcggccctggccctcgccgcccggctggaccccgcgcggtgccgggtcaaggtcggcaaggagctgttcacccgctgcggcccggatatcgtcgagacgctgcagcagcagggcttcgaggtgttcctcgacctgaaattccacgacatcccgaacaccacggcgatggcggtgaaggccgccgccgagctgggcgtgtggatggtcaacgtgcactgctccggcggtctgcgcatgctgagcgcctgtcgcgagaccctggacggcattcatggccgccggccgttgctgatcggggtgacggtgctgaccagcatggagcgcgaggacctggccggcatcggcctggatgtcgagccgcagcagcaggtcctgcgcctggccgccctggccgagcaggccgggctggacggactggtctgctcggcccaggaggcgccggcgctgaagaccgcccggccgcggctgaaactggtgacccctggcatccgtccggccggcagcgccccggacgaccagcggcgcatcctcactccgcgccaggcgctggaggccggttccgactacctggtcatcggccggccgatcagccaggccgccgacccggcccaggcactggcggctctggtcgccgaactggactga

SEQ ID NO: 16799 - protein, 243 aa, Azotobacter vinelandii AvOP
MPATAIFPEPVPMSCQTPIIVALDFPGREAALALAARLDPARCRVKVGKELFTRCGPDIVETLQQQGFEVFLDLKFHDIPNTTAMAVKAAAELGVWMVNVHCSGGLRMLSACRETLDGIHGRRPLLIGVTVLTSMEREDLAGIGLDVEPQQQVLRLAALAEQAGLDGLVCSAQEAPALKTARPRLKLVTPGIRPAGSAPDDQRRILTPRQALEAGSDYLVIGRPISQAADPAQALAALVAELD

SEQ ID NO: 16800 - DNA, 711 bp, Chromohalobacter salexigens DSM 3043
  CDS (1)..(711): transl_table=11
atgtcgccggacctcgatacgccgctgatcatcgcactcgattacccacgcctcgatcaggcactcgctatggccgagcgcctggacccatcgcggtgtcgcgtgaaggtcggcaaggaactgttcacccgcaccgggccccgggttctggaggccttgcacgggctggggttcgaggtctttctggatctcaagtttcacgatattcccaatacggtggccggcgccgtcgaggccgctgccgatcacggcgtatggatggtcaacgtgcatgccggcggcgggcgccgaatgatggaggcggcccgggagcgactggaacgtcgtcggctcggtacccatctgatcgcggtcacggtgttgaccagcatggaacgtgatgacctgatcgaagtgggcgtcgaggccgagccgctgtcacaggtcgagcgtttggcgaggttggcgcagcagagcggcatggcaggcgtggtgtgttccgcgcaggaagcggcggcgttgcgtgctacgtgcggcgacgacttcctgaaggtcacgcccggcatccggccgcgtgcgtcgagtgccgacgaccagcgccgcaccctgaccccgggcgaggcgatggcggccggcagtacgcatctggtggtgggacgcccggtcacgcaggcgccggatccgatggcggcgctggcgaccatcgaacgcgagcttgcggagccgtcgtaa

SEQ ID NO: 16801 - protein, 236 aa, Chromohalobacter salexigens DSM 3043
MSPDLDTPLIIALDYPRLDQALAMAERLDPSRCRVKVGKELFTRTGPRVLEALHGLGFEVFLDLKFHDIPNTVAGAVEAAADHGVWMVNVHAGGGRRMMEAARERLERRRLGTHLIAVTVLTSMERDDLIEVGVEAEPLSQVERLARLAQQSGMAGVVCSAQEAAALRATCGDDFLKVTPGIRPRASSADDQRRTLTPGEAMAAGSTHLVVGRPVTQAPDPMAALATIERELAEPS

SEQ ID NO: 16802 - DNA, 699 bp, Crocosphaera watsonii WH 8501
  CDS (1)..(699): transl_table=11
atgtctgttgctgatcagatcattgttcctttagatgttcctacagaagaagcagcgatcgccttattggatcgtttacctcaagttagcttttggaaagtggggttagaattattcgtggccacggggccgactattcttaaacacctcaaagagcggaaaaaaaagatttttcttgacttgaaatttcatgatattcctaacacggtaatgggagcttgccgtagtgcctctagatacgaggtagacttattaacccttcatgctactgctggcaaaaatgccctcaaagcagcgagagaagctattgcccacagtgcctcaccccctcaattattagccataaccttgctcactagcctcaatgcacgggacctggcctttgatctgaaaattcctttagaactgccagaatacgccctacagatggctttattagccaaagattgcggcataaatggggctgtgtgttctcctcaggaagtagctcaactgagagcagtttgtgggaaagattttgtcttagtttgtcctggggttcgtcctagttggggacaaacaggggatcagcaaagggtaatgacacctaaacaggccctggatgcaggggcaaattatttagtcattggtagacctattacaatgtcagatgatcctgttatggcttggaaccgtattgttgatgaagttagtagctaa

SEQ ID NO: 16803 - protein, 232 aa, Crocosphaera watsonii WH 8501
MSVADQIIVPLDVPTEEAAIALLDRLPQVSFWKVGLELFVATGPTILKHLKERKKKIFLDLKFHDIPNTVMGACRSASRYEVDLLTLHATAGKNALKAAREAIAHSASPPQLLAITLLTSLNARDLAFDLKIPLELPEYALQMALLAKDCGINGAVCSPQEVAQLRAVCGKDFVLVCPGVRPSWGQTGDQQRVMTPKQALDAGANYLVIGRPITMSDDPVMAWNRIVDEVSS

SEQ ID NO: 16804 - DNA, 756 bp, Solibacter usitatus Ellin6076
  CDS (1)..(756): transl_table=11
gtggcgcgtgggacgggtgctgccgcgcggggaaagagcaatgcgaatcatatgacgacgaaagctatgcacaacccaatcattgtcgcgctggacgtggaatcggcggcggaggcccgcgagatgatcgcgcgcatcggaccgcgagtgaacttctacaaggtcgggctggaactctatgccgcatcgggcatggaggtggtgaaggaactgctcggccagggcaaacaggttttcctggatctgaagatgtatgacatccccgaaacggtgtcgcgggcggtggctcaggtcgcgaagacgggagtcacgttcctcactgtgcatgcggtgagcagcgtgatgcgggcggcggtagcggcgcgcgaaggcagcaagctgcggatactgggagtcacggtgctcacgagcttcgggccggaagacatggacgatttggggtacgacggaaccgtcggggaactggtggagcgccgcgccaacaaggccgcggaactgggcgtggatggagtggtggcgtcgccgctggaggcagcgtcggtgcggcgaattgtgggtccgcgggtggcgatcgtgactccgggcgtgcggtcggccggtgtggatgcgggcgatcagaagcggatcgcgaccccggcgcaggcgatgctcgatggcgcggattacctggtgatcgggcggcagatcacgcgcgcgaaggatccagcggcagcggtggatcaggtgctgatggagatcgccacggcgctggtgtaa

SEQ ID NO: 16805 - protein, 251 aa, Solibacter usitatus Ellin6076
MARGTGAAARGKSNANHMTTKAMHNPIIVALDVESAAEAREMIARIGPRVNFYKVGLELYAASGMEVVKELLGQGKQVFLDLKMYDIPETVSRAVAQVAKTGVTFLTVHAVSSVMRAAVAAREGSKLRILGVTVLTSFGPEDMDDLGYDGTVGELVERRANKAAELGVDGVVASPLEAASVRRIVGPRVAIVTPGVRSAGVDAGDQKRIATPAQAMLDGADYLVIGRQITRAKDPAAAVDQVLMEIATALV

SEQ ID NO: 16806 - DNA, 720 bp, Geobacter metallireducens GS-15
  CDS (1)..(720): transl_table=11
atgacgagagaccaggcccgcgaaaaggtcatttttgcccttgataccggtgaattcgcccatgtgcagtactgggccgaaacgctgtccgacaaggtcgggatgtataaaatcggcaagcaactcttcaccgcctgcggcccagccgcggtgcgaatgatccagaagttcggcggcgaggtctttctcgacctcaagttccacgacatccccaataccgttgccatggcctcggtggaggcggcccgcatgggagttaaacttttcaatctccatgccctgggtggctatgagatgatggcgaaaacagtggaggccctcgacaaggaattcaagggaggggatagggcaaaggtcctggcggtcactattctcacctcttccaccgaggagaccctcaaggatttggggattgaacacaccgtccccgacatggtggtgcggctcgcgacccttgccaggaaagccggcatcgatggcgtcgtggcttcgccccgggagattcccctcatccgcgaagcatgcgggagcgacttcctcattgtcactcctggcgttcgcccgtccttcgcggccctcaatgatcagaagcgggtcatgacgccggcggaggcggtgaaggcggggagtgattatctcgtcatcggccgccccattggtgatgcgccggacccggccgctgccgccgagctgattctcggcgagattgttgccggctga

SEQ ID NO: 16807 - protein, 239 aa, Geobacter metallireducens GS-15
MTRDQAREKVIFALDTGEFAHVQYWAETLSDKVGMYKIGKQLFTACGPAAVRMIQKFGGEVFLDLKFHDIPNTVAMASVEAARMGVKLFNLHALGGYEMMAKTVEALDKEFKGGDRAKVLAVTILTSSTEETLKDLGIEHTVPDMVVRLATLARKAGIDGVVASPREIPLIREACGSDFLIVTPGVRPSFAALNDQKRVMTPAEAVKAGSDYLVIGRPIGDAPDPAAAAELILGEIVAG

SEQ ID NO: 16808 - DNA, 699 bp, Exiguobacterium sp. 255-15
  CDS (1)..(699): transl_table=11
atggagcaactttacatcgcgcttgattttcagtcagccgatcaagtcgaacggtttttagaaaaattggcaccacaccggccggcacttaaagtcgggatggagctgtattatgcggaaggtcccgcctttgtccgtcatttggtccggcaaggacatgatgtctttctcgatttaaaagtccatgacattccggagactgcccggcggacgatgcgtgtcattggtcaactcggtgttgaactgacaaatgtccacgctgcaggcgggaaagcgatgatggaggcagcccttgccggactacgcgagacgtcgcccaagacacggctgattgccgtcacccaactgacctcaacggatcaagacatgttaaccgatctgatgattccacatgcgatggacgaagtcgttgcccattatgcccgcgaagccgaccaggccggtcttgacggagtcgtgtgctcggctctggatacgacacatatcaaagcaacctgccgctccggcttccaacttgtcacgccgggaatccggccgaacgggacggatgcgaatgaccaaaaacggattgcgacagtaacggatgcacgccggaacggggcaacggatctcgtcatcggacgtgccatcacacaggcaaaagatccgaaagtcgtttatgaaggattgctctcagaatggaaggggattaaacaatga

SEQ ID NO: 16809 - protein, 232 aa, Exiguobacterium sp. 255-15
MEQLYIALDFQSADQVERFLEKLAPHRPALKVGMELYYAEGPAFVRHLVRQGHDVFLDLKVHDIPETARRTMRVIGQLGVELTNVHAAGGKAMMEAALAGLRETSPKTRLIAVTQLTSTDQDMLTDLMIPHAMDEVVAHYAREADQAGLDGVVCSALDTTHIKATCRSGFQLVTPGIRPNGTDANDQKRIATVTDARRNGATDLVIGRAITQAKDPKVVYEGLLSEWKGIKQ

SEQ ID NO: 16810 - DNA, 666 bp, Methanosarcina barkeri str. fusaro
  CDS (1)..(666): transl_table=11
atggaaaagaaaagctgtatgattctcgcccttgatgtttccgacagggaagaagcgcttaaaattgcagaagacgtttcggaattcgtggacgctataaaggtaggctatcctctaatacttgctaccggacttggaattatcagggagcttgccgagtttgctcctataatagccgatttcaaagttgccgatattccaaataccaaccgccttatctgtgagcatgtctttgaggcaggaaccgatgcagtaattgttcagggttttacaggccgggacagccttgatgcctgcattgagattgcttccgaatacggaaaagatgtgttcgtggtaagtgaaatgagccacccaggaggagctgaattcctccagcctgtcggagaagcaatcgcaagaatggcagccgaagcaggggcttttggccttgttgcacccgcgaccagaccggaaagagtgacaacgattagaaaaattatcggtaacaaacttaccatcatctcgcctggagtcggcgctcagggaggaaaagcgtctgatgttattgccgcaggcgcagactgggtaattgtaggaagagccatttacaaagcagagtcaccaagagaagctgcccgcaagattgctgctgagattgaggctgaattcgagcaagaaaactga

SEQ ID NO: 16811 - protein, 221 aa, Methanosarcina barkeri str. fusaro
MEKKSCMILALDVSDREEALKIAEDVSEFVDAIKVGYPLILATGLGIIRELAEFAPIIADFKVADIPNTNRLICEHVFEAGTDAVIVQGFTGRDSLDACIEIASEYGKDVFVVSEMSHPGGAEFLQPVGEAIARMAAEAGAFGLVAPATRPERVTTIRKIIGNKLTIISPGVGAQGGKASDVIAAGADWVIVGRAIYKAESPREAARKIAAEIEAEFEQEN

SEQ ID NO: 16812 - DNA, 825 bp, Frankia sp. CcI3
  CDS (1)..(825): transl_table=11
atgagcgccggccggaggagctccggcgggaggagcgcggccgcgccccgcttcaccccgccgcggggccgggcgccgctggcggtcgcgctggatgccccggacgccgcgaccgcgctgcgctgggccgccgcggtcgcccccaccgtggccgtgctgaagatcggtctggagctgttctaccgggagggcccggcaatcgtgacggcgctgcgcgcggccggcgtgctcgccggggccggcggcgcggcggtcgccgcgggcggcaccgggagtgccccggagttgttcctcgatctcaaactgcacgacattcccgccacggtcgccgggggaatgcgctcaatcaccccgttgggccctcgtttcgtgaccgtgcatgcggctgggggggcggcgatgatacgtgcggcgatcgaggcggccccggatgtcgaggtagccgtcgtgaccgtactcacctcgctggatgtggcggcgctcagcgcgatcgggctcgccggacccccttccgacgccgtccgcaggctcgccgtgcttgcggtcgaagccggtgcgcgcaccctggtgtgcagtccgcgggaggttcgaatggtccgtatggagcttggtagcaatgtgactctcatcactccaggcgtgcgaccggcggggtcggaaaccggcgatcaggcccgaaccgcgacgccggaagctgcccttgtggggggttctgacctggtcgtggtgggtcgcccgatcaccggtgcgcccgaccccggggtcgccgcgagggccatcgccgcaggtctcagcgctgccggcagggctgctgacctgctgtga

SEQ ID NO: 16813 - protein, 274 aa, Frankia sp. CcI3
MSAGRRSSGGRSAAAPRFTPPRGRAPLAVALDAPDAATALRWAAAVAPTVAVLKIGLELFYREGPAIVTALRAAGVLAGAGGAAVAAGGTGSAPELFLDLKLHDIPATVAGGMRSITPLGPRFVTVHAAGGAAMIRAAIEAAPDVEVAVVTVLTSLDVAALSAIGLAGPPSDAVRRLAVLAVEAGARTLVCSPREVRMVRMELGSNVTLITPGVRPAGSETGDQARTATPEAALVGGSDLVVVGRPITGAPDPGVAARAIAAGLSAAGRAADLL

SEQ ID NO: 16814 - DNA, 717 bp, Desulfuromonas acetoxidans DSM 684
  CDS (1)..(717): transl_table=11
atgaaagatcggttgatttttgcgctggatgtcgacagttatgatgaagctcggcagtgggtacgcattctcgctgatgaggtagggatgttcaaggtcggcaagcagttgtttacccggtgtggtccccagattgtggatatgattcgccaggccgggggcggcgtttttcttgaccttaaatatcatgatatccccaatactgttgccaaggccggtattgaagcggcacgtatgggtgtgcagatgttcaatgttcatgcgctgggcggcggcaagatgatgcggacgatggttgatgaagttcgggaggccgccgtcaaggagggttttcctgtgccgatcacgttggcggtaaccattctcacctcgtcgtctgaagaagatctgcgtcaggtggggatcgaccttcctgtgacgcagatggtgcctcggcttgcaacgttagccagggaaagtggactgcatggtgtggtggcctcggctcaagaattgccgctgattcgtcaggcctgcggtggtgactttgtcgttgtgacccctggtgtgcgcccggcaacggcggcacgtgatgatcaacaacgggtgatgacaccgggggaagcgattgccgccggctcagattatctggttgtcggtcggccgatttccaaggcagatgacccggttctagcggcacgctctattgttgcggagatgaccgaggctggcgcgtga

SEQ ID NO: 16815 - protein, 238 aa, Desulfuromonas acetoxidans DSM 684
MKDRLIFALDVDSYDEARQWVRILADEVGMFKVGKQLFTRCGPQIVDMIRQAGGGVFLDLKYHDIPNTVAKAGIEAARMGVQMFNVHALGGGKMMRTMVDEVREAAVKEGFPVPITLAVTILTSSSEEDLRQVGIDLPVTQMVPRLATLARESGLHGVVASAQELPLIRQACGGDFVVVTPGVRPATAARDDQQRVMTPGEAIAAGSDYLVVGRPISKADDPVLAARSIVAEMTEAGA

SEQ ID NO: 16816 - DNA, 690 bp, Jannaschia sp. CCS1
  CDS (1)..(690): transl_table=11
atgtcggacgaccgtttgatcgtggcgctggatgtgcccaacgtggtgcagggcctggcgctggccgaaaaactcggcgacgccgtttcattctacaaaatcggactggggatgctgaccggcggtggcctggcgctcgccaatgagctgaagcaggaccacggcaagcgcattttccttgatatgaagttgttcgatatttccgccacggtcgaggccgcggtgcgggggctggcgcaattcaacctggatttcctgaccgtccatggcgatccccacgtggtgcgcgccgccaaggaaggagcggcgggcagcgacacgaagatccttgcggtgacgatcctgacctctctggatcggaccgatctggacgattgcctgatccgggatggagagatgcttgatctggtggccgagcgggcgggccgcgcgtttgaggcgggcgccgatggcgtcatctcttccccgcacgaagcgaccatgatccgcgccctgcccgaggccaagggccgcctgatcgtgacccccggcgtccgcccaacgggcagcgcgtccggcgaccagaaacgcatcgcgacgccgcgccaggccatcgcggacggggccgaccacatcgtcgtgggccgcccgatctggcagcatcaggacccgcgtgcggcggcgcagatggtggtggcggacctgccttaa

SEQ ID NO: 16817 - protein, 229 aa, Jannaschia sp. CCS1
MSDDRLIVALDVPNVVQGLALAEKLGDAVSFYKIGLGMLTGGGLALANELKQDHGKRIFLDMKLFDISATVEAAVRGLAQFNLDFLTVHGDPHVVRAAKEGAAGSDTKILAVTILTSLDRTDLDDCLIRDGEMLDLVAERAGRAFEAGADGVISSPHEATMIRALPEAKGRLIVTPGVRPTGSASGDQKRIATPRQAIADGADHIVVGRPIWQHQDPRAAAQMVVADLP

SEQ ID NO: 16818 - DNA, 729 bp, Desulfitobacterium hafniense DCB-2
  CDS (1)..(729): transl_table=11
atggagctggaaagaacagtgtcggagaacaataaaaaggtcatggtggctatggatgtgaatagccgggagaaggctttagccctggctgaccaacttcaggggagcggctgctggcttaaagtggggatggagctctataatgctgcaggtgccggcattatccgagaactgaaggacaaagggttccccatcttcctggacctgaagcttcatgatatccccaatacggtggaaagtgcggtacgggttctggccggatatggcgccgatgtgctcactattcactgcagcggcggtcatgatatgatggcccgggcggtccaggctacccatgaagtgaaaaagcaaaagaatgctgaggagcggatgaagattatcggcatcacggtactgaccagccttgatgaagagaggctgcagcaggatctgggagtgggcagaaccctgccggagcaggtggttgccctggccgaactgggtcaaaaggcaggtattgacggggtggtggcctcggctcaagaaagcgccatcctccgccggcatgtaggaccggattttgtggtcattacgccggggattcgccccaaaggcagtgaaacccatgatcaagcccgtacacttactcccaaagaagccctggaagcggggagctcttatctggtggtaggcagacccattacccaggcggccaatccaaggcaggctttggagcagctttgggattaa

SEQ ID NO: 16819 - protein, 242 aa, Desulfitobacterium hafniense DCB-2
MELERTVSENNKKVMVAMDVNSREKALALADQLQGSGCWLKVGMELYNAAGAGIIRELKDKGFPIFLDLKLHDIPNTVESAVRVLAGYGADVLTIHCSGGHDMMARAVQATHEVKKQKNAEERMKIIGITVLTSLDEERLQQDLGVGRTLPEQVVALAELGQKAGIDGVVASAQESAILRRHVGPDFVVITPGIRPKGSETHDQARTLTPKEALEAGSSYLVVGRPITQAANPRQALEQLWD

SEQ ID NO: 16820 - DNA, 648 bp, Methanococcoides burtonii DSM 6242
  CDS (1)..(648): transl_table=11
atggaaaaaaagaaccgactcatccttgctctggatgtaactgacagagagaatgcccttcgtatcgctaatgaagtttccgactatgtggattctataaaggtaggatatccgctggtccttggggaaggccttagtatagtcaaggaacttgtggaaattgcaccagttatcgctgatttcaaggttgctgacataccaaatactgaccgacttatctgtgaacacgtgttcaatgccggagctgccgggataatcacccacggattcacaggtcgcgacagccttgattcctgtgtaaaggttgctaatgaatttgggactgacgtttatgtggtcacagagatgagccacccgggtggtgtggagttcttccgcccggttgccgaggatattgccagtatggcagtggaagcaggagcctccggagttgtagcgcctgcaacaagacctgaaagagtaaaagacatacgcaagatcatcggagaggaacttagcattatctcacccggcgtgggagctcagggaggcagtgctgccgatgttataagagcaggtgctgactgggtgatagtcggacgaagcatctataattccgattctccggcagaagctgcaaagaagatatgcgatgaaatgaattgttga

SEQ ID NO: 16821 - protein, 215 aa, Methanococcoides burtonii DSM 6242
MEKKNRLILALDVTDRENALRIANEVSDYVDSIKVGYPLVLGEGLSIVKELVEIAPVIADFKVADIPNTDRLICEHVFNAGAAGIITHGFTGRDSLDSCVKVANEFGTDVYVVTEMSHPGGVEFFRPVAEDIASMAVEAGASGVVAPATRPERVKDIRKIIGEELSIISPGVGAQGGSAADVIRAGADWVIVGRSIYNSDSPAEAAKKICDEMNC

SEQ ID NO: 16822 - DNA, 747 bp, Methylobacillus flagellatus KT
  CDS (1)..(747): transl_table=11
atgcaacgcgtgggaatctctctctcccgaaaccaaagaatccgccgtatgaccgacccaaagatcattgtcgcccttgattaccctgatgctgcacacgccctggggctagcccgccagcttgatccagcattgtgccgggtcaaggtagggaaggaattgttcaccgctgctggtccgcagctagtggaggcattaatcaagctcggctttggcgtgttcctagacctcaagtttcacgacatccccaatacggtcgccaaggcttgcgaagcagcaagcaagctgggcgtatggatgctcaatgtgcatgcttctggcggtagccagatgatgcaggctgcacgcgagggcgtagcgcggagtggccacgctccattgctaattgcagtgacggtattgaccagcatgaaccaggaggagctgtccgagctgggagtgaatgccccgatcgagcagcatgtattacacttggcaagactcagccagcaggcaggcctggatggtgtcgtctgttctgcccaggaggctccagcactgcgccgggcactgggtcatgatttttgcctggtgacgcctggtatccgccctgcggacgccgcgctcgacgaccaatcccgcgtggtgacgcccgccagggcgcttgccatgggctccaactacctggtgatgggccgtcccatcaccagggcagccgacccactagccacactggatcaaattcgggaatcaatcctaggaaaataa

SEQ ID NO: 16823 - protein, 248 aa, Methylobacillus flagellatus KT
MQRVGISLSRNQRIRRMTDPKIIVALDYPDAAHALGLARQLDPALCRVKVGKELFTAAGPQLVEALIKLGFGVFLDLKFHDIPNTVAKACEAASKLGVWMLNVHASGGSQMMQAAREGVARSGHAPLLIAVTVLTSMNQEELSELGVNAPIEQHVLHLARLSQQAGLDGVVCSAQEAPALRRALGHDFCLVTPGIRPADAALDDQSRVVTPARALAMGSNYLVMGRPITRAADPLATLDQIRESILGK

SEQ ID NO: 16824 - DNA, 1164 bp, Frankia sp. EAN1pec
  CDS (1)..(1164): transl_table=11
gtggggtgtcgggccacggctggacggatacgagatccgcaccgcctgtgtcagcgccggggtgccctgcatcaccaccattcagggcgccgccgcgtgcgtgcagggtatcgagtcgctcgtaaggggcgaactgggggtgcggccgctgcaggagtaccacgcggccctgcggtcgacctgggggacgacccccgagggactgccgggtgcgacctccggctcgggctcccgggcgccgggggcgcggccgggacccgcgccgggcgccgggtcgggatccggctcggccggcggggcgcccgcctcgaccgtggcggaccggtgacctcatcgggcgccccccgccggtggacgccaccggcgggccgcgccccgatcgcggtcgcgctcgacgctccggacgccgccaccgcgctgggctgggcccgcgaggtggcgccgcacgtcgccgtgctgaagatcggtctggagctcttctaccgggccgggccgacgatcgtgactgcgctgcgtgacgaagggctgctcgctccggctcggccggcggagcctgcggcgcctgctcgggtggtgagttccgtcacggggggtgatgtgacggacggctggggtgagtcgcacggctccgcggcgcccgagctcttcctcgacctgaagctccacgacataccggcgaccgtggccggcgggatgcgctcgctggccacgctggcacctcgcttcgtgaccgtgcatgcggccggcggcgcggccatggtgcgcgccgcggtcgacgccgggcccgatgttcatgtaaccgcggtcacggtgctgacgtcgctggacgccgccacgctcgccgccgtcgggctgtccggaccgccctcggacgccgtccgcaggctcgcggtgctcgctgtggaggccggtgcgcgggcgctcgtctgcagcccgaaagaggtctccatggtccgcgcggagcttggtgaaactgtgactctggtcacgcctggagtgcgtccagaggggtctgagcgggctgaccaggcccgggtcgccaccccggaacgggcactcgctgacggttcggacctcctcgtgatcggccgtccgatcacctccgcggccgatcgggccgtggccgccgccactatcgccaccagggttactccactccggtag

SEQ ID NO: 16825 - protein, 387 aa, Frankia sp. EAN1pec
MGCRATAGRIRDPHRLCQRRGALHHHHSGRRRVRAGYRVARKGRTGGAAAAGVPRGPAVDLGDDPRGTAGCDLRLGLPGAGGAAGTRAGRRVGIRLGRRGARLDRGGPVTSSGAPRRWTPPAGRAPIAVALDAPDAATALGWAREVAPHVAVLKIGLELFYRAGPTIVTALRDEGLLAPARPAEPAAPARVVSSVTGGDVTDGWGESHGSAAPELFLDLKLHDIPATVAGGMRSLATLAPRFVTVHAAGGAAMVRAAVDAGPDVHVTAVTVLTSLDAATLAAVGLSGPPSDAVRRLAVLAVEAGARALVCSPKEVSMVRAELGETVTLVTPGVRPEGSERADQARVATPERALADGSDLLVIGRPITSAADRAVAAATIATRVTPLR

SEQ ID NO: 16826 - DNA, 759 bp, Moorella thermoacetica ATCC 39073
  CDS (1)..(759): transl_table=11
ttgccaacactaatgtacctgcaggagatgatccgcatgcatgccaaggacaaaataatcgtcgccctggatgttcccgacctggctgccggggaaaagctggtggaccggctttccccctacgccggcatgtttaaagtcggcctggagtttttcaccgccgccgggccggcggccgtccggatggtaaaggagcgtggtggccgggtatttgccgacctgaagttccacgacatccccaacaccgtggccggagcggcgcgggccctggtgcgcctgggcgtggatatgctcaacgttcacgccgccggcggcaaggccatgctgcaggctgccgccgccgccgtccgggaggaggccgcggccttaaaccgcccggcgccggtaataatcgcggtcactgttttgaccagcctggacagggaagctctacgctgcgaggtgggtatcgagcgagaggtagaagaacaggtggcccgctgggcgctcctggcccgggaggccggcctggacggcgtagtagcctcgccccgggagatccgggccatccgggaggcctgcgggccggagttcgtcatcgtgaccccgggcgtgcgcccggctgggtccgaccggggcgaccagcgccgggtcatgaccccggccgaggccctgcgggagggcgcctcctacctggtcatcggccggcccatcaccgcggcccccgaccccgtcgccgccgcccgggccatcgcggcggaaatagagatggtgaaataa

SEQ ID NO: 16827 - protein, 252 aa, Moorella thermoacetica ATCC 39073
MPTLMYLQEMIRMHAKDKIIVALDVPDLAAGEKLVDRLSPYAGMFKVGLEFFTAAGPAAVRMVKERGGRVFADLKFHDIPNTVAGAARALVRLGVDMLNVHAAGGKAMLQAAAAAVREEAAALNRPAPVIIAVTVLTSLDREALRCEVGIEREVEEQVARWALLAREAGLDGVVASPREIRAIREACGPEFVIVTPGVRPAGSDRGDQRRVMTPAEALREGASYLVIGRPITAAPDPVAAARAIAAEIEMVK

SEQ ID NO: 16828 - DNA, 675 bp, Sphingopyxis alaskensis RB2256
  CDS (1)..(675): transl_table=11
atgacttcgcccatctatctcgccatcgacaccccgcatctcgacgccgctctgacgctggcgcaaaaggtgcggcatcatgtcggcgggctgaagctggggctcgagtttttctgcgccaacggccatcatggcgtccatgaaatggcgaagctcggcctgccgatcttcctcgacctgaagctgcacgacattccgaatacggtggcaaaggcgatccaggcgctgcgcccgctcgaacccgcgatcctgacggttcacgccgcgggcggccgcgcgatgctcgaagaagcgaaagcggttgcgggcaaggataccagagtgatcgccgtcaccgtgctcaccagcctcgacgcgcccgatcttgaagacatcggcctcaccggcacgccgcacgatcaggtcgtacgccttgccgcgctggcgcgtgaggccgggctcgacggcattgtctgttcgggtcaggaagtgaaatcggcgcgcaaggcgtggcccggcggcttcttcgtcgtccccggcgtgcgccccgcaaacggccggatcggcgaccagaaacgcatcgtcacgcccgcgcaggcgatgtccgacggcgcctcgatcctcgtcgtcggccgcccgatcacccagtcgtccgaccccgaccttgcggcgcgcgagattgaagcgacgctctga

SEQ ID NO: 16829 - protein, 224 aa, Sphingopyxis alaskensis RB2256
MTSPIYLAIDTPHLDAALTLAQKVRHHVGGLKLGLEFFCANGHHGVHEMAKLGLPIFLDLKLHDIPNTVAKAIQALRPLEPAILTVHAAGGRAMLEEAKAVAGKDTRVIAVTVLTSLDAPDLEDIGLTGTPHDQVVRLAALAREAGLDGIVCSGQEVKSARKAWPGGFFVVPGVRPANGRIGDQKRIVTPAQAMSDGASILVVGRPITQSSDPDLAAREIEATL

SEQ ID NO: 16830 - DNA, 702 bp, Shewanella amazonensis SB2B
  CDS (1)..(702): transl_table=11
atgagagacaagcccattctggttgcccttgattttgacaacaagtattcagcgttgcagttggttgataagctcgatcccgccatgtgccgcctcaaggtgggcaaggagatgttcactctgtttgggccagagctggtaaaagacatccaaaatcgtggtttcgacttattccttgaccttaaatttcacgatattcccaacaccgtggccaaggcggttgccgcagcggctgagcttggggtctggatggtcaacgtccacgcatcaggtggttttgccatgatggaagcggcgcgcaaagccttgctgccatacggcgacaatgcgccgctgttgattgccgtgactgtgcttacctccatgagcgatgaagatcttaagcttttgggaatcgacgttggtgctgctgagcacgtgaagcgtcttgccaaattaacccgtgacgcgggcctcgatggtgtggtgtgctcggcacaggaagccactatgcttaaagaactgtgtgggcgcgattttaaactcattaccccgggtatacgccctgaggggagtgaggccggcgatcagcatcgcatcatgacgcccgctcaggctctgcaagcaggctcggattatctggtgattggtcgtccgatcaccaagtccgcagatccactcaagactctgacggaaattcaccagtcaatccgcggaatataa

SEQ ID NO: 16831 - protein, 233 aa, Shewanella amazonensis SB2B
MRDKPILVALDFDNKYSALQLVDKLDPAMCRLKVGKEMFTLFGPELVKDIQNRGFDLFLDLKFHDIPNTVAKAVAAAAELGVWMVNVHASGGFAMMEAARKALLPYGDNAPLLIAVTVLTSMSDEDLKLLGIDVGAAEHVKRLAKLTRDAGLDGVVCSAQEATMLKELCGRDFKLITPGIRPEGSEAGDQHRIMTPAQALQAGSDYLVIGRPITKSADPLKTLTEIHQSIRGI

SEQ ID NO: 16832 - DNA, 717 bp, Enterococcus faecium DO
  CDS (1)..(717): transl_table=11
atgaatcaactagaccaacgaccaattattgcattagatttttcaactaggcaagaggtagaagactttcttcgatttttcccgaaagaagaaaaattgtttgtgaaaatcggaatggaattgttctaccaagaaggacctgaaatcgtacgttatctaaaagaggctggtcataatgtatttttagatctgaaacttcacgatattccgaatacggtcgaaaaagcaatgcggggattggcaaagcttggtgttgatctcacctgtgttcatgccgctggcggtattcgtatgatggaggcggcaatgcgaggattagaagaggggactccagaaggtggaaaacgtccgctacttctagctatcactcagcttacttctacaagtgaagaagaaatgcatgccgatcaactaatcgaagtttctttagaaaaaagtgtgatccattatgctagctgtgccaaaaaagcaggattagatggtgtggtttcttctgcttgggaagtagaagcgatcaaagaaatggcaggagacgaatttgtttgcttaactccgggtataagaccagaaggaacagtcgcaggagatcagacaagagtagtcacaccttctcaggcaaaaaagatcggctcaacttttatcgttataggtcgaccaatcactcagtcaactaatccttataaagcatatcaaacgattcaaacagaatggagctaa

SEQ ID NO: 16833 - protein, 238 aa, Enterococcus faecium DO
MNQLDQRPIIALDFSTRQEVEDFLRFFPKEEKLFVKIGMELFYQEGPEIVRYLKEAGHNVFLDLKLHDIPNTVEKAMRGLAKLGVDLTCVHAAGGIRMMEAAMRGLEEGTPEGGKRPLLLAITQLTSTSEEEMHADQLIEVSLEKSVIHYASCAKKAGLDGVVSSAWEVEAIKEMAGDEFVCLTPGIRPEGTVAGDQTRVVTPSQAKKIGSTFIVIGRPITQSTNPYKAYQTIQTEWS

SEQ ID NO: 16834 - DNA, 732 bp, Magnetococcus sp. MC-1
  CDS (1)..(732): transl_table=11
atgtccaagcaaccacccatctctgctataaaaaatatcccgtcgcgggatcgtttgatgtttgccatggatgtgcccgatagtgccacagccaaaaacctggcagaaaggctgggtggctctgtcacggtctataagctggggttggagctgtttctttcgggggactattttgagctggtggagtggatgctcaagcgggataaaaaggtttttgcggatctaaaactgtttgatattcccaagaccgtggagcgggccacccggcagttggcggggcgggggatccactatctcacggtgcatggtaatgatggcattttgcaggcggcggcctcggccaaaggggatatgaaaatcctgggtgtgacctcgttaaccagcctggaccggggggatttggatgacctaggctttcagtgtgatgtggaagcgttggttgcctcgcgggccaaacgggcgttgctgcatggctgtgatggggtgatctcgtcgggcttggaagcggcgagattgcgtgcggagttggaccacaaactgctggtgattacgccgggcattcggcctgtggaaaaccgtcccagtgatgaccaaaaacgggtggtcagcgtggagcaggcgtttgcgtttggtgccgaccatattgtggtgggtcgacctatccgggatgcggaagagcccgctaaagccgccgaggcgatccaacaaaccattgccgatctgtttagctaa

SEQ ID NO: 16835 - protein, 243 aa, Magnetococcus sp. MC-1
MSKQPPISAIKNIPSRDRLMFAMDVPDSATAKNLAERLGGSVTVYKLGLELFLSGDYFELVEWMLKRDKKVFADLKLFDIPKTVERATRQLAGRGIHYLTVHGNDGILQAAASAKGDMKILGVTSLTSLDRGDLDDLGFQCDVEALVASRAKRALLHGCDGVISSGLEAARLRAELDHKLLVITPGIRPVENRPSDDQKRVVSVEQAFAFGADHIVVGRPIRDAEEPAKAAEAIQQTIADLFS

SEQ ID NO: 16836 - DNA, 684 bp, Ferroplasma acidarmanus Fer1
  CDS (1)..(684): transl_table=11
atgcttgccttcgcatatctattatatacgcataataaatatacaacaatggaaagtaagattatatttgcgctggatgtttatgattacaatacagctatggaactggccagaactgttggagaaaaggtatttgcaataaaaattaactggcccgtaattctagaaaatgggataaaaattgtccgggacctttctaaatatgcaaatataatatgtgattttaaacttgctgatatagataatactgtgagcatgattacaacaaaggtaaaagaatatggcgggtatggtataatcagccattcatttaccgggttaaattcattgaaagctgtcgttaaaagcgctggaaatatgaaagtattttccgttgtttcaatgtcacaggagtcatatcttgacaatattacggaggaactcataaaaatatcaagggaggccggtgtttacgggctggttgcaccgggaaaccgcccctattaccttaaaaaagtcaaagaactttcagaaggattaaaaataatttccccgggtgtaggtgcccagggcggcgatatagtaaatgcaatgcttttagggtctgactatgtaataatcgggagatctatttacaactcccttgacccgctgggaacccttgaaggtttttccagcagtattaacaataaattaaataaatag

SEQ ID NO: 16837 - protein, 227 aa, Ferroplasma acidarmanus Fer1
MLAFAYLLYTHNKYTTMESKIIFALDVYDYNTAMELARTVGEKVFAIKINWPVILENGIKIVRDLSKYANIICDFKLADIDNTVSMITTKVKEYGGYGIISHSFTGLNSLKAVVKSAGNMKVFSVVSMSQESYLDNITEELIKISREAGVYGLVAPGNRPYYLKKVKELSEGLKIISPGVGAQGGDIVNAMLLGSDYVIIGRSIYNSLDPLGTLEGFSSSINNKLNK

SEQ ID NO: 16838 - DNA, 708 bp, Mesorhizobium sp. BNC1
  CDS (1)..(708): transl_table=11
atgccggctgacgaaatgcgcgggcgcctgatcgtcggcctcgacgtgccgacccttgcagaagccgagaaggtggtaagtgccctcggcgatacggtgtccttctacaagatcggttatcagctcgcttttgcgggcgggctcgatttcgccggcgacctgatccgatccggccggcaggtcttcctggacatgaagctgctcgacatcgacaacacggtggcaaagggcgtggaaaacatcgcccgaatgggcgtggcgatgctcaccttgcacgcctatcccaaagcgatgcgcgccgcggtggcagccgcggaaggctccggcctgtgcctgcttggggtcaccgtcctcacatccatggatgcgcaggatctgatcgatgcgggttacgaacacgacccgcagacactggtgctgcgccgtgccgagcaggcgcgggcggcgggcatgggcggcgtggtctgttcggcggtcgaggccgctttggtgcgcagcgtggttggtcccgatatggcggtggtaacgccaggcatcaggcccgccggtgctgatcacggcgaccagaagcgcgttgtcacgcccgccgatgcgattcgcgccggcgccagccatctcgtcgtcgcacgaccgatcgtcgctgcggatgatcccaaatccgccgccgaggccattttgcgggaaatgcatcgcgctgttggaaactag

SEQ ID NO: 16839 - protein, 235 aa, Mesorhizobium sp. BNC1
MPADEMRGRLIVGLDVPTLAEAEKVVSALGDTVSFYKIGYQLAFAGGLDFAGDLIRSGRQVFLDMKLLDIDNTVAKGVENIARMGVAMLTLHAYPKAMRAAVAAAEGSGLCLLGVTVLTSMDAQDLIDAGYEHDPQTLVLRRAEQARAAGMGGVVCSAVEAALVRSVVGPDMAVVTPGIRPAGADHGDQKRVVTPADAIRAGASHLVVARPIVAADDPKSAAEAILREMHRAVGN

SEQ ID NO: 16840 - DNA, 726 bp, Silicibacter sp. TM1040
  CDS (1)..(726): transl_table=11
atgaccagccccctcgcagatgaccgcctgatcgttgccatggatgttcccaacgcccttgaagggctcaaactggcggaacagctgggtgacgcggtctcattctacaaaatcggccttgggatgctcaccgggggcgggctggccctcgcaaatgagttgaagcaagagttaggtaaaaagatcttcctcgacatgaagctctttgacatcggggccaccgtggaaaacgcggtgcgcggattggcgcagttcgatctcgacttcctgaccgtgcacggcgacccctatgtggtgcgcgccgcaaaagaaggggctgcgggcaaggatctgaagatcctcgccgtgacaatccttacgtcgctggatcgcgacgatctggatggggcgatgatcaaatccggtgagatcaaagatctggtgcaagagcgcgccggcaaggcgttctcggctggcgcagatggcgtcattgcaagcccgcaggaagccgccatgatccgctccctgcccgaagcagaaggcaagctgatcgtcactcctggtgtgcgcccggtgggcgctgaccttggcgaccagaagcgcgttacaaccccggcgcaggctcttgcttccggcgttgaccacatcgttgtcggtcgcccgatctggcaggcggaagcaccccgggtagcggcagagtcaattctgcaagagatgaacagcccgcaggcgaaagcgccgaactga

SEQ ID NO: 16841 - protein, 241 aa, Silicibacter sp. TM1040
MTSPLADDRLIVAMDVPNALEGLKLAEQLGDAVSFYKIGLGMLTGGGLALANELKQELGKKIFLDMKLFDIGATVENAVRGLAQFDLDFLTVHGDPYVVRAAKEGAAGKDLKILAVTILTSLDRDDLDGAMIKSGEIKDLVQERAGKAFSAGADGVIASPQEAAMIRSLPEAEGKLIVTPGVRPVGADLGDQKRVTTPAQALASGVDHIVVGRPIWQAEAPRVAAESILQEMNSPQAKAPN

SEQ ID NO: 16842 - DNA, 723 bp, Nitrobacter hamburgensis X14
  CDS (1)..(723): transl_table=11
atgaccgattcgcattatctcgaccgcgctcgtgaaaagctgattgtggctctcgatttttgggaggttgaggacgccaggaagcttgttcggaagctgggtgacgaggtctctttttacaaagtcggtctgggtctccagctcgttggcggaaacgagtttgccaaggagcttattgtcgagggcaagcgggtcttcctagattacaagtactacgacatcgaagagaccgttcaacgcgcggtcgcacaagcagccgaattgaaaatcacgttcctgaccgtgcacggcgtcgcgagcatcatgaaagccgccgtcgccggccgcggcaactccgacatgaagattctcggcgtcaccgtgctgacgagcatggatgccgaggacatcaaggagatgggcttcgacggcaaagtcgaagaccttgtcattgcccgcgcgaagaaagcgcttgaggttggggtcgacggcgtcgtcgcgtcggcgctggaagccgccgagcttcgaaaacagacgagcaacaagctgatgatcgtgtcgcccggtatccgcccgagcggcggcgccaggcacgatcagaagcgggtggccacaccgtttgaagccatacgggcgggagccgattatctggtgttgggcagacccatttacgcggcggacgatccgaaagccgccgcgcaagcgatcatccaggagatggcggacgcgctgcgcccggattga

SEQ ID NO: 16843 - protein, 240 aa, Nitrobacter hamburgensis X14
MTDSHYLDRAREKLIVALDFWEVEDARKLVRKLGDEVSFYKVGLGLQLVGGNEFAKELIVEGKRVFLDYKYYDIEETVQRAVAQAAELKITFLTVHGVASIMKAAVAGRGNSDMKILGVTVLTSMDAEDIKEMGFDGKVEDLVIARAKKALEVGVDGVVASALEAAELRKQTSNKLMIVSPGIRPSGGARHDQKRVATPFEAIRAGADYLVLGRPIYAADDPKAAAQAIIQEMADALRPD

SEQ ID NO: 16844 - DNA, 705 bp, Paracoccus denitrificans PD1222
  CDS (1)..(705): transl_table=11
atgacccaaacccccgatgaacgcctgatcgtggcgctggacgtgccgaacgcgctggccgggcttgagctggccgaaaagatcggcgatgccgccggcttctacaagatcggcctgggcatgctgaccggcggcgggctggcgctggccaacgagctgaagcaggaacacggcaagcgcatcttcctggacatgaagttcttcgacatcggcgccacggtcgaggcggcggtccgcggcatcgcgcaatacgacctcgatttcctgaccgtgcatggcgatccgcatgtggtgcgggcggcaaagcagggggcaagcggttcggggctgaagatcctggcggtgacgatcctgacctcgctggaccgcgccgacctcgatgccgggctgatcgtgccgggcgacgtggccgagatcgtggccacccgcgccgcccgcgccttcgaggccggggccgatgggatcatcgccagcccgcgcgaggccgcggcgatccgcgcgctgcccgaggcggcgggccggctgatcgtgacccccggcgtgcgcccggcgggcagcgatgccggcgaccagaagcggatcgagacccccgccaccgccatcgccaacggcgccgaccatatcgtcgtcggccggccgatctggcaggcggcggacccgcgcgccgcggcacaggcgatcgcggcggaactggccgggctctga

SEQ ID NO: 16845 - protein, 234 aa, Paracoccus denitrificans PD1222
MTQTPDERLIVALDVPNALAGLELAEKIGDAAGFYKIGLGMLTGGGLALANELKQEHGKRIFLDMKFFDIGATVEAAVRGIAQYDLDFLTVHGDPHVVRAAKQGASGSGLKILAVTILTSLDRADLDAGLIVPGDVAEIVATRAARAFEAGADGIIASPREAAAIRALPEAAGRLIVTPGVRPAGSDAGDQKRIETPATAIANGADHIVVGRPIWQAADPRAAAQAIAAELAGL

SEQ ID NO: 16846 - DNA, 696 bp, Shewanella denitrificans OS-217
  CDS (1)..(696): transl_table=11
atgaacaccaacccaattttagtcgccctagattttgatgataaagccgctgcactgcgcttaattgaccagttagatcctagtctttgccgtttaaaggttggtaaagaaatgtttaccctgtttggtcctcagttagtgcgtgatatccatgatcgaggttttgatttgtttctggaccttaaatttcatgacattcctaataccgtggccaaagccgtgagcgccgcagcagaacttggggtgtggatgactaatgtgcatgccagcggtggacttgccatgatgcaggcggctaaaaaagccctcgagccctatggcgataaagcccccttgttgattgcagttactgtgctgacgtccatgagtgatgaagacttagccttgcttgggattaatgtgcccacagttgagcatgtgctgagacttgcaaaactcagccaagatgcaggtcttgatggcgtagtatgttcggctcaagaagccaagctgcttaagcacaattttggcgccgattttaccttagtgaccccaggtattcgccctgttggcagcgaaatcggcgaccaacacagagtgatgacgccgcctcaagcactgcaagcaggttctgattttctggtgataggcagacccattactcaggcaagcgatcccttagcggcactaaaagcaatccatgaatcattggtttaa

SEQ ID NO: 16847 - protein, 231 aa, Shewanella denitrificans OS-217
MNTNPILVALDFDDKAAALRLIDQLDPSLCRLKVGKEMFTLFGPQLVRDIHDRGFDLFLDLKFHDIPNTVAKAVSAAAELGVWMTNVHASGGLAMMQAAKKALEPYGDKAPLLIAVTVLTSMSDEDLALLGINVPTVEHVLRLAKLSQDAGLDGVVCSAQEAKLLKHNFGADFTLVTPGIRPVGSEIGDQHRVMTPPQALQAGSDFLVIGRPITQASDPLAALKAIHESLV

SEQ ID NO: 16848 - DNA, 834 bp, Aspergillus oryzae
  CDS (1)..(834)
atgtcttccaagtcgcaattgacctacagcgcacgcgctagcaagcaccccaatgcgctcgtaaagaagctcttcgaggttgccgaggccaagaaaaccaatgtcaccgtttccgccgacgtgacaaccaccaaagagctgctggatttggctgaccgactcggtccgtacattgccgtgatcaaaactcacatcgatatcctctccgatttcagcgaagaaaccatcaccggtctgaaggcccttgcagagaagcacaatttcctcatcttcgaagatcgcaagttcatcgatatcggaaacacagtccaaaagcagtaccatggcggcactctgcgtatctctgagtgggcccacatcatcaactgcagtattctgcccggtgagggtatcgtcgaggctctggcccagactgcttcggccgaggacttcccctacggctccgagaggggccttttgatccttgcggagatgacctccaagggatctttggctaccggtcagtatactacttcttctgttgactatgctcggaagtataagaagtttgtgatgggattcgtctcgacacgtcaccttggcgaggttcagtctgaagttagctcgccttcggaggaggaagattttgtcgtcttcacgacaggtgtcaacctctcctcgaagggtgacaagctgggacagcagtaccaaactcctgagtcggctgttggacgcggtgccgactttattattgctggccgtggaatttatgctgctcctgatcccgtggaggcggcgaaccagtaccagaaggagggatgggatgcatacctgaagcgtgttggtgcgcaataa

SEQ ID NO: 16849 - protein, 277 aa, Aspergillus oryzae
MSSKSQLTYSARASKHPNALVKKLFEVAEAKKTNVTVSADVTTTKELLDLADRLGPYIAVIKTHIDILSDFSEETITGLKALAEKHNFLIFEDRKFIDIGNTVQKQYHGGTLRISEWAHIINCSILPGEGIVEALAQTASAEDFPYGSERGLLILAEMTSKGSLATGQYTTSSVDYARKYKKFVMGFVSTRHLGEVQSEVSSPSEEEDFVVFTTGVNLSSKGDKLGQQYQTPESAVGRGADFIIAGRGIYAAPDPVEAANQYQKEGWDAYLKRVGAQ

SEQ ID NO: 16850 - DNA, 1263 bp, Candida tropicalis
  CDS (299)..(1099)
ttgactttcttcaattttggttccattatattattttcggtctattatcttttgattatcttttattattatttttaaatacttttttttttttagttttgcgtttttgattccgtatatattttttatttagattataatatactttcaaaaatatttttataacagttttcttttgtgtaacattcacaaataatccgcacatttctccattcagacaaactaactaagcaaaaaaaagaaaatttttttttacgaaggttcaaaccaaaaccatatacatcacatcatcatcacaatggtatcaaccaaaacatacaccacaagagcatcgactcacccatcaccagtcgcacaacgtcttttccacttaatggacaccaaaaagaccaatctctgtgcatcagtcgacgttcaaaccacatccgaattcctttccttaatcgacaaactcggtccatatatctgtttagtcaagacccacatcgacataatcgacgacttcacctacgaggggaccattgttccattattggaattggcacggaagcataactttatgattttcgaagatcgtaagtttgcagatatcggaaacacggttaagcatcagtacacttccggggtgtacaagatcagttcctggagtgacattaccaatgcgcatggtgtcactggtgctggtgtcgttgatggtttgaaacagggtgcgttagaaacaacgaaggaaccaaggggtttgttgatgttggctgagttgtcttcgaaagggtcattggcgtatggtgagtatactgagaagacggttgagattgctaagctggataaggagttcgtgattgggtttattgctcaacatgatatgggtggacatgatgaagggtttgattggattgttatgactccaggggttggtttggacgataaaggtgatggattgggtcaacagtatagaacagttgatgaggttgtgagtactggtactgatgtgattattgttggaagagggttgtttggtaaaggaagagatccagaagttgaaggtaagagatatagagatgctggttggaatgcttatttgaaaagaaccggacaataaataaaataaataaataattttgcttttctataaacagtttataataaaaagtgtttaagagtctaaaacttcatcataatcttcgaaattatctgcaagtttcgttctcatgatttcaaataccaataatgcaatcgaagtagcggggattgtggttaatgcat

SEQ ID NO: 16851 - protein, 266 aa, Candida tropicalis
MVSTKTYTTRASTHPSPVAQRLFHLMDTKKTNLCASVDVQTTSEFLSLIDKLGPYICLVKTHIDIIDDFTYEGTIVPLLELARKHNFMIFEDRKFADIGNTVKHQYTSGVYKISSWSDITNAHGVTGAGVVDGLKQGALETTKEPRGLLMLAELSSKGSLAYGEYTEKTVEIAKLDKEFVIGFIAQHDMGGHDEGFDWIVMTPGVGLDDKGDGLGQQYRTVDEVVSTGTDVIIVGRGLFGKGRDPEVEGKRYRDAGWNAYLKRTGQ

SEQ ID NO: 16852 - DNA, 693 bp, Candidatus Pelagibacter ubique HTCC1062
  CDS (1)..(693): transl_table=11
atgatgaataaaaatatctttgttgcttgtgatacatcaagcttaaaagaaataaaaaaaataattagcgatacgaaaactaataaacttcaaataattccaaaatttggcttacagttcttttattcaaaaagtgggagagcttttcttcaaaattttaagagagattatttcttagatttaaaaataaatgatattccacaaactgctttatctgcaatggatagtttaaaagatttaaagaaatgtaaatatattacagttcatgtaagcggtggccttgaaatgcttaaagctattacaaaaaaagctaaatcaattaacaaaaatttaaaagtattaggagttacaattttaacaagccttaacaaaaaatctcttgaagaaattggtcacaccaagaccgtagagcagctagtattaaaacaagctggtcttataaaaaaatcaggtgcagctggaattgtgtgttctgcacaagaagcaaaaatagttaggaaaaaatacaaaaatttatttattgttacgccaggaataaggctacctggagatgatgcaaatgatcaatctagagtaatgactcctaatgatgcttttaaaaataaagtttctggtattgtaatgggaaggtcattaataaagggtaatatcaaaaacaacattaaaagattaattaatcacttaaatcaatga

SEQ ID NO: 16853 - protein, 230 aa, Candidatus Pelagibacter ubique HTCC1062
MMNKNIFVACDTSSLKEIKKIISDTKTNKLQIIPKFGLQFFYSKSGRAFLQNFKRDYFLDLKINDIPQTALSAMDSLKDLKKCKYITVHVSGGLEMLKAITKKAKSINKNLKVLGVTILTSLNKKSLEEIGHTKTVEQLVLKQAGLIKKSGAAGIVCSAQEAKIVRKKYKNLFIVTPGIRLPGDDANDQSRVMTPNDAFKNKVSGIVMGRSLIKGNIKNNIKRLINHLNQ

SEQ ID NO: 16854 - DNA, 702 bp, Pseudomonas fluorescens
  CDS (1)..(702): transl_table=11
atgtccgcctgccagactcctatcatcgtcgccctggatttccccacccgtgacgccgcactgaaactggccgatcaactggaccccaaactgtgccgggtcaaggtcggcaaggagctgttcaccagctgcgccgccgagattgtcgggaccctgcgggacaagggtttcgaagtgttcctggacctgaagttccacgatattcccaacaccaccgccatggcggtcaaggccgccgcagaaatgggcgtgtggatggtcaatgtgcactgctccggcggcctgcgcatgatggctgcctgccgcgaagtgctggaccagcgcagcggccccaagccgttgctgatcggcgtcaccgtgcttaccagcatggagcgtgaagacctggccggtatcggcctggacatcgagccccaggagcaggtgctgcgcctggctgccctggcgcagaaagccggcatggacggcctggtgtgctcggccctggaagcccaggccctgaagagcgcccatccgtccctgcaactggtgaccccggggattcgaccggcgggcagcgcccaggacgaccagcggcggatcctcaccccgcgccaggccctggatgccggctccgattacctggtgatcggtcgccccatcagccaggcggcagatccggccaaggccctggccgacgtcgtggccgaactggccctgtaa

SEQ ID NO: 16855 - protein, 233 aa, Pseudomonas fluorescens
MSACQTPIIVALDFPTRDAALKLADQLDPKLCRVKVGKELFTSCAAEIVGTLRDKGFEVFLDLKFHDIPNTTAMAVKAAAEMGVWMVNVHCSGGLRMMAACREVLDQRSGPKPLLIGVTVLTSMEREDLAGIGLDIEPQEQVLRLAALAQKAGMDGLVCSALEAQALKSAHPSLQLVTPGIRPAGSAQDDQRRILTPRQALDAGSDYLVIGRPISQAADPAKALADVVAELAL

SEQ ID NO: 16856 - DNA, 693 bp, Staphylococcus haemolyticus
  CDS (1)..(693): transl_table=11
atgaaagatttacctatcatagcattagatttcgaatcggcaactaaagttaatacattcttggaccaatttgatgaaccacttttcgtgaaaattggaatggaacttttctatcaagcgggccccgatttgattaaatcgattaaatctcgtggccatgacatattcttagatttgaagctacatgatattccaaacacggttgaaaaagcaatggaaggcttaggaaagttagatgtagacttagttaatgtgcatgcagctggaggtacagacatgatgaaagctgcagtaaggggtttgcacaaatatagtaatgatacaaagatcattgctgtgacgcaattaacatctacaacagaagaaatgctacgtaatgaacaaaacattcagacgacgattgaagaagcagtgttaaactatgctactttaacacaacaagcaggtctagatggtgtggtttgttctccacttgaagcagaattgctaacaaacaaattaggttctaatttcttaaaagttacaccaggcattagaccacagggggcagctgtagatgatcaaaaacgtattactacacctgaagatgctaaacaattaggggcaacacatatcgtagttgggcgacctatcacccaaagcgagaatcctgtggaaagttatcatactattaaagaaagttggttaggttaa

SEQ ID NO: 16857 - protein, 230 aa, Staphylococcus haemolyticus
MKDLPIIALDFESATKVNTFLDQFDEPLFVKIGMELFYQAGPDLIKSIKSRGHDIFLDLKLHDIPNTVEKAMEGLGKLDVDLVNVHAAGGTDMMKAAVRGLHKYSNDTKIIAVTQLTSTTEEMLRNEQNIQTTIEEAVLNYATLTQQAGLDGVVCSPLEAELLTNKLGSNFLKVTPGIRPQGAAVDDQKRITTPEDAKQLGATHIVVGRPITQSENPVESYHTIKESWLG

SEQ ID NO: 16858 - DNA, 825 bp, Coccidioides posadasii
  CDS (1)..(825)
atggcctccaaatcacaattcccgtacgaagaccgtgcgcgcgaccatcccaatccacttgcacgacgattattccagattgcgaccgagaaacagtcaaatgtcgtggtctcggccgatgtcacaactacaaaggagctccttgacctggctgacagactcggcccctacatggtcgttctaaaaactcacatcgatatcctcgccgacttctccgccgaaaccataaccggactccaatccctttcccagaagcacaacttcctgatctttgaggaccggaaattcgttgatattggcaacacagtgcaaaaacaataccatgggggcgcactccacatttcggaatgggctcatatcgttaatgcaaccgtgcttccgggcccaggtatcatagatgccctagcgcaagttgcttctgcaccagacttcccccacgcttcagacagagggctcctgatcttggcgacgatgacatcaaagggtagtcttgctactggtcagtatactgagttgtcggttgagctggcgcggaagtacaagggctttgtcctaggcttcgtggccagcaggtccttagaaggagttgaaacggctggaaaggcggatgatgaggattttgtcctcttcacgacaggtgttaaccttgcttccaagggtgatgcattgggacagcagtatcagacccctgaatcagccattggaggcggtgcggactttattatcagtggacgcgggatctatgcggctcctgacccggttgatgccgctaggcggtatcaaaaagcgggctgggatgcttatttgaaaagagtgggcagataa

SEQ ID NO: 16859 - protein, 274 aa, Coccidioides posadasii
MASKSQFPYEDRARDHPNPLARRLFQIATEKQSNVVVSADVTTTKELLDLADRLGPYMVVLKTHIDILADFSAETITGLQSLSQKHNFLIFEDRKFVDIGNTVQKQYHGGALHISEWAHIVNATVLPGPGIIDALAQVASAPDFPHASDRGLLILATMTSKGSLATGQYTELSVELARKYKGFVLGFVASRSLEGVETAGKADDEDFVLFTTGVNLASKGDALGQQYQTPESAIGGGADFIISGRGIYAAPDPVDAARRYQKAGWDAYLKRVGR

SEQ ID NO: 16860 - DNA, 753 bp, Desulfovibrio vulgaris
  CDS (1)..(753): transl_table=11
atggccgaacttgtcattgcgctggactacccgaccatggatgcggccctggccacggcccgcgcgctgcgcggcgcgaccgatacggcgggcgacgcagggggccgcctgtggatgaaggtggggctggagctgttcaccgccagcgggcccgaggtggtggcccgactgaaggacatgggctttcccgtgttcctggacctgaagtttcacgacattcccaacacggtgcgcggggcggtgcgttccgccgtggccaccggggcggacatgtgcaacatccacctgcccggcggcgagcgcatgtgccgcgcggcggtggagggcctggccgagggcgcggcggcgcgcggacacggggcggccccgatcctgctgggggtcaccgtgctgaccagcgtggccccgggcgagttgcccggcggggccgatccttccgcagaggcggcccgcctggccgtgtgcggccgggagtggggcctgggcggcgtggtctgttcggggtacgaagccgcgggcatcaagcagcgttgcgggcgcgatttcatctgcctgacgccgggcatccggcctgccgccccccagaggagcggttccggcgatgacgaccagcgccgggtgatgaccccggcggaggccgtgcgggccggttccgactatctggtggtggggcgcccggtgaccggcgcggcaggacctgacggcccggcggaagcggcgcggcgcatccttgcggagatgcgcggggcctga

SEQ ID NO: 16861 - protein, 250 aa, Desulfovibrio vulgaris
MAELVIALDYPTMDAALATARALRGATDTAGDAGGRLWMKVGLELFTASGPEVVARLKDMGFPVFLDLKFHDIPNTVRGAVRSAVATGADMCNIHLPGGERMCRAAVEGLAEGAAARGHGAAPILLGVTVLTSVAPGELPGGADPSAEAARLAVCGREWGLGGVVCSGYEAAGIKQRCGRDFICLTPGIRPAAPQRSGSGDDDQRRVMTPAEAVRAGSDYLVVGRPVTGAAGPDGPAEAARRILAEMRGA

SEQ ID NO: 16862 - DNA, 789 bp, Mortierella alpina
  CDS (1)..(789)
atgtccgcctcaaagtcatacctcgagcgctcgaagctccactccaaccctacagccaaggccttcttggagctcatggagcgcaagaagtccaacctgtcggtggctgctgatctcacctccaaggctgcattgattgaattggccgacaaagtcgggccttacatttgtctgctcaagactcacatcgatgttgttgacgatttcgatcaggatttggtggatcagctcacggcgttggctaagaagcacgactttatgatctttgaggaccgcaagtttgctgatatcggcaacacggtcaagcttcagtacagctcgggagtgtacaagattgcctcttggtccgatattaccaatgcgcacactgttcctggcgagggcatcatccagggacttcgcgaggttggattgcccctgaaccgctgcttgctcctgttggcagagatgtcgtctgcaggaacattggctaagggcgactacaccacgacgacggttgagctggcgcgcaagtacaaggattttgtggttggattcattgccatgtcaagatatgaggacaaggagggcgacgactttatctacatgacacccggcgttggactggaccagacctcggatgggttgggtcagcagtggaagcacccacgggaggttgtttatgatcgcggatgcgatgtcatcattgttggacgtggcatctacgggaagggcagagaccccgccaaggaggccaagcggtatcaggaggctggctggaacgcctatttggagaggatctccaagtaa

SEQ ID NO: 16863 - protein, 262 aa, Mortierella alpina
MSASKSYLERSKLHSNPTAKAFLELMERKKSNLSVAADLTSKAALIELADKVGPYICLLKTHIDVVDDFDQDLVDQLTALAKKHDFMIFEDRKFADIGNTVKLQYSSGVYKIASWSDITNAHTVPGEGIIQGLREVGLPLNRCLLLLAEMSSAGTLAKGDYTTTTVELARKYKDFVVGFIAMSRYEDKEGDDFIYMTPGVGLDQTSDGLGQQWKHPREVVYDRGCDVIIVGRGIYGKGRDPAKEAKRYQEAGWNAYLERISK

SEQ ID NO: 16864 - DNA, 1392 bp, Cyanidioschyzon merolae
  CDS (1)..(1392)
atggagcagcttgccaaggatctttttgagataggtgcggtcaagtttggcacgttcaaactcaagtctgggatagcgtctccattctatgtcgatctgcgcgttgctgtctcgtatcctcgagttctgagaagcattgcggctctgtacctagagtgcttgcaggacttttctggcgctttcgacgttatttgcggggttccatacactgcgctcccttttgcgacagcaatggctgtgcagggagacttacctatggttatgtgtcgaaaggaggtcaaagaccatggaacacggcgagttgttgaaggtgctttcacacaaggctctcgttgcttaataatcgaggacgttgttacaagtggttcaagtattctggaagttgtgggcgcattgcgcgcagagggtctcaaagtggatcacgcgatcgtcttgcttgatagggagcaaggcgggtgtgaggcgcttctcggccagggaatagggctccgatctgttttccgcatcagcgacctcgttgggacgctgcggaatttgaacttgcttgagccggggaaggtggatatgattctagattttattcgcacggcccgcgcagcatcagatgttaagcgccccgaaacaaacgttccatccgcattgccagtcgccgcatcaagttcttccccggtgcgagatcaactttactcaatcgcagaaaaaaagagaagcatattatgcgttgcggcagacgtacaatcgactaaggagcttcttggaattgcagatgcagtaggcccccacatctgtgttctgaagttgcacgccgatattatccaggactggacgacggacacatcaagacgccttcgagagctcgcggacaaacacagtttcatgctttttgaggatcgaaaattcgctgacataggaaacacggttgttgcacagttcagcgcaggcgtacatcggatctcttcctgggcggacattgtcaatgcacacgccatcccgggccctggactgattgagggcctgcgccacgcttgcgcaatttccggcagaatgattggcctcctgttagtcgcacaaatgtccagcaaagggaacttgattgacgagagatacactgctacatgcctgcggatggcccgcgaagcgtttccgttctgtatcggcttcattgcccaggagcgtctggacccgacagggaagctctttgtgatggcgcctggtgtgcaactggattcaaagggcgatcaattaggccaacagtacaattcaccacagtatctgctgaagcgcaagggtgtcgacttccttatcgttggccgcggtatctacgggagtgaagagccagcaaaggcggcccagatgtacaaagagttgtcgtggagcgtccttcacggctaa

SEQ ID NO: 16865 - protein, 463 aa, Cyanidioschyzon merolae
MEQLAKDLFEIGAVKFGTFKLKSGIASPFYVDLRVAVSYPRVLRSIAALYLECLQDFSGAFDVICGVPYTALPFATAMAVQGDLPMVMCRKEVKDHGTRRVVEGAFTQGSRCLIIEDVVTSGSSILEVVGALRAEGLKVDHAIVLLDREQGGCEALLGQGIGLRSVFRISDLVGTLRNLNLLEPGKVDMILDFIRTARAASDVKRPETNVPSALPVAASSSSPVRDQLYSIAEKKRSILCVAADVQSTKELLGIADAVGPHICVLKLHADIIQDWTTDTSRRLRELADKHSFMLFEDRKFADIGNTVVAQFSAGVHRISSWADIVNAHAIPGPGLIEGLRHACAISGRMIGLLLVAQMSSKGNLIDERYTATCLRMAREAFPFCIGFIAQERLDPTGKLFVMAPGVQLDSKGDQLGQQYNSPQYLLKRKGVDFLIVGRGIYGSEEPAKAAQMYKELSWSVLHG

SEQ ID NO: 16866 - DNA, 810 bp, Cryptococcus humicola
  CDS (1)..(810)
atggccccgcaccccgtcaccaccaagacgtacgcctcgcgcgcggcgtcgcaccccaaccccaccgcccgccgcgtcctcgagacgatggagcgcaaaaagacaaacctctgcgtgtcggtcgacgtgacaaagtcggccgagatcctcgacattgtccgccaggtcgcgccctacgtctgcatggtcaagacccacatcgacattgtcgaggacttcaccatcgacctcgccaacgagctcaagcgcctcgccgacgagctcgactttgtcattttcgaggaccgcaagtttgccgacattggcaacacggtcgagcttcagtacagcgccggtgtgcacaagatcgcctcgtggtctcacctcaccaacgcccacgtcgtccccggccccggcatcatcaccggcctcggagccgtcggcaagccgctcggcaacgccctcatcctgctcgccgagatgagctcggccggcaacctcgccagcggcgagtacactgagaaggccgtccagatggcccgtgaggccggccttgactgggtcgtcggctttatcgccatgcaccgtgtcgacaaggccgacgaccccgacttcctcgtcatcactcccggtgtcggtctcgacgtcaagggcgacggccgtggccagcagtaccgtaccccgcacgaggtcgtctacgactcgggctgcgatgtcatcatcgtcggccgcggcatctacaagaacaaggatgccgtcgcgtccgaggccaagaggtatcaggaggccggatggaaggcctacgaggaccgcctgcagcgtactgcttag

SEQ ID NO: 16867 - protein, 269 aa, Cryptococcus humicola
MAPHPVTTKTYASRAASHPNPTARRVLETMERKKTNLCVSVDVTKSAEILDIVRQVAPYVCMVKTHIDIVEDFTIDLANELKRLADELDFVIFEDRKFADIGNTVELQYSAGVHKIASWSHLTNAHVVPGPGIITGLGAVGKPLGNALILLAEMSSAGNLASGEYTEKAVQMAREAGLDWVVGFIAMHRVDKADDPDFLVITPGVGLDVKGDGRGQQYRTPHEVVYDSGCDVIIVGRGIYKNKDAVASEAKRYQEAGWKAYEDRLQRTA

SEQ ID NO: 16868 - DNA, 831 bp, Penicillium camembertii
  CDS (1)..(831)
atgtcgtccaagtcgcaattgacttacagcgcccgcgctcaatcgcaccccaatcctcttgcgcgcaagcttttccaagtcgctgaagaaaagaagagcaatgtgaccgtctccgctgacgtgaccacgacaaaggagctcctggacctcgccgaccgccttggcccctacatcgccgtgatcaaaacccacatcgacatcctctccgacttcagccaagaaacaatcgacggcctgaacgccctagcccaaaagcacaacttcctcatcttcgaagaccgcaaattcatcgacatcggcaacacagtccagaaacagtaccacaacggcaccctccgcatctcggaatgggcccacataatcaactgctccgtccttcctggcgagggcatcgtccaggccctcgcacaaaccgcccaggccactgacttcccctacggctccgagcgcggcctcctcatcctcgccgagatgacctccaagggatccctcgcaacaggctcctacacctccgcctccgttgacatcgcgcgcaagtaccccagctttgttctgggctttgtctccacccgctcgttgggtgaggtcgagtctactgaggcgcccgcccagggcgaggacttcgtcgtcttcaccactggtgtcaacctctcgtctaagggcgataagctcggtcagcagtaccagacaccgcagtcggctattggccgcggtgccgacttcattatctctggtcgtggtatctatgccgctgcggaccctgttgaggctgctaagcagtaccagcaacagggatgggaggcgtatctggcccgcgtgggcgcgcaatag

SEQ ID NO: 16869 - protein, 276 aa, Penicillium camembertii
MSSKSQLTYSARAQSHPNPLARKLFQVAEEKKSNVTVSADVTTTKELLDLADRLGPYIAVIKTHIDILSDFSQETIDGLNALAQKHNFLIFEDRKFIDIGNTVQKQYHNGTLRISEWAHIINCSVLPGEGIVQALAQTAQATDFPYGSERGLLILAEMTSKGSLATGSYTSASVDIARKYPSFVLGFVSTRSLGEVESTEAPAQGEDFVVFTTGVNLSSKGDKLGQQYQTPQSAIGRGADFIISGRGIYAAADPVEAAKQYQQQGWEAYLARVGAQ

SEQ ID NO: 16870 - DNA, 831 bp, Penicillium nalgiovense
  CDS (1)..(831)
atgtcgtccaagtcgcaattgacctacagcgcccgcgcccaatcgcaccccaatcccctcgcgcgcaagcttttccaagtagccgaggagaagaggagcaatgtcactgtctccgctgacgtgaccacaacaaaggagctcctggacctcgccgaccgccttggcccctacatcgccgtgattaaaacacacattgacatcctctccgacttcagccaagaaacaatcgatggcctgaacgccctagcccaaaagcacaacttcctcatcttcgaagaccgcaaattcatcgacatcggcaacacagtccagaaacagtaccacaacggcaccctccgcatctccgaatgggcccatataattaactgctccatcctacccggtgagggcatcgtcgaggccctcgcgcaaaccgcccaggctactgacttcccctacggctccgagcgcggtctcctcatcctcgccgagatgacctcgaagggatccctcgcaacaggcgcctacacctccgcctccgtcgacatcgcgcgcaagtaccccagtttcgtgctgggctttgtctcgacccggtctctcggcgaggtcgagtctacagaggcgcccgcgcagggcgaagacttcgtcgtcttcaccactggcgtcaacctctcgtctaaaggcgataagctcggtcagcagtaccagacgccgcagtcggctgttggccgcggtgctgactttattatctctggtcgtggtatctacgccgctgccgaccctgttgaggccgctaagcagtaccagcagcagggctgggaggcgtatctggcccgcgtgggtgcgcaatag

SEQ ID NO: 16871 - protein, 276 aa, Penicillium nalgiovense
MSSKSQLTYSARAQSHPNPLARKLFQVAEEKRSNVTVSADVTTTKELLDLADRLGPYIAVIKTHIDILSDFSQETIDGLNALAQKHNFLIFEDRKFIDIGNTVQKQYHNGTLRISEWAHIINCSILPGEGIVEALAQTAQATDFPYGSERGLLILAEMTSKGSLATGAYTSASVDIARKYPSFVLGFVSTRSLGEVESTEAPAQGEDFVVFTTGVNLSSKGDKLGQQYQTPQSAVGRGADFIISGRGIYAAADPVEAAKQYQQQGWEAYLARVGAQ

SEQ ID NO: 16872 - DNA, 1437 bp, Zea mays
  CDS (1)..(1437)
atggccatggacgccgcagcgctggagtcgctcatcctggacctccacgccattgaggcagtgaagctgggctccttcgtgctcaagtccggcatcacctcccccatctatctggacctccgcgcgctcgtcttccacccgcgcctgctctccgccgtctcctcgctcctccacgcgctccccgccacgcgcccctacggcctcgtctgcggcgtcccctacacggcgctccccatcgccgccgtcctctccgtcgaccgctccgtccccatgctcatgcgccgcaaggaggccaaggcccatggcaccgccaagtccatcgagggctccttccgccccggggacaccgtcctcatcatcgaggacctcgtcaccagcggcgcctccgtgctcgaaaccgccgccccgctccgcgcagagggcctccttgtcgccgacgccgtcgtagtcgtcgaccgcgagcagggcgggagggagaacctcgccgctaacgggatcactctgcactcgctcatgaccctcaccgaggtgctcgccgtgctgctcaagcacgggaaggtgaccgaggagaaggcacatgaggtgaggcagttcctcgacgccaacaggaaggtggccgtgccgggggcggcgcctgttaaacccagggtgctcaggaagccattctcggagagggcgaaacttgccaacaaccctatggggaagaagctcttcgagctgatggaggccaagcagaccaacctgtgtgtcgctgctgatgttgggaccgcaaaggaactccttgagctggctgacaaggttggccctcaaatttgtatgttgaaaactcatgtggatatattatctgattttacaccagattttggctctaagctccgctcgattgctgagaagcacaactttttgatcttcgaagaccgcaagtttgctgacattgggaatacagtaaccatgcaatatgaaggtggaatattccgcatattggactgggctgatattgttaatgcgcatatagtttctggacctggaatcgtagatggcttgaagctgaagggttcgcctaaaggaagagggctacttctgctcgctgagatgagctctgccggcaatcttgctcatggagattacactgctgctgctgtaaagatcgctgagcaacattctgactttgtgatgggatttatatcagttaatcccgcatcttggtcagtaacaccatcaagcccggcgtttatccatgccacacctggagttcagatggtcgctggaggagatgatcttgggcaacaatacaacactcctgagtctgtgataaattacaggggcagtgacataatcatagttgggcgcgggattataaaggcgagcgatcctttgaagacggcatgtgagtaccgggtgcaagggtggcaggcatacaagaacagcttgctatga

SEQ ID NO: 16873 - protein, 478 aa, Zea mays
MAMDAAALESLILDLHAIEAVKLGSFVLKSGITSPIYLDLRALVFHPRLLSAVSSLLHALPATRPYGLVCGVPYTALPIAAVLSVDRSVPMLMRRKEAKAHGTAKSIEGSFRPGDTVLIIEDLVTSGASVLETAAPLRAEGLLVADAVVVVDREQGGRENLAANGITLHSLMTLTEVLAVLLKHGKVTEEKAHEVRQFLDANRKVAVPGAAPVKPRVLRKPFSERAKLANNPMGKKLFELMEAKQTNLCVAADVGTAKELLELADKVGPQICMLKTHVDILSDFTPDFGSKLRSIAEKHNFLIFEDRKFADIGNTVTMQYEGGIFRILDWADIVNAHIVSGPGIVDGLKLKGSPKGRGLLLLAEMSSAGNLAHGDYTAAAVKIAEQHSDFVMGFISVNPASWSVTPSSPAFIHATPGVQMVAGGDDLGQQYNTPESVINYRGSDIIIVGRGIIKASDPLKTACEYRVQGWQAYKNSLL

SEQ ID NO: 16874 - DNA, 921 bp, Oryza sativa
  CDS (1)..(921)
atgacgctcacggaggtgctcgccgtcctcgtgaagcgcgggaagctgggcgaggagaaggcccaggaggtgaagcgattcctcgacgcaaacaggaagatggctgtgccgggactgccggttaaaccgaaagtagttaggaaggcattttctgagagagctggattggcgacgaatccgatggggaggaagctgttcgagttgatggaggccaagcaaagcaacttgtgtgttgctgcagatgtcgggacagcaacagagctacttgatctcgccgataagattggtccagagatctgcatgttgaaaactcatgtggatatcttgtctgattttacaccggattttggccacaagctccgttcgattgctgagaggcacagctttttgatatttgaagaccgcaagtttgcagacattggaaacacagtaactatgcaatatgaaggaggaatattccgcatattagactgggctgatattgttaatgcacatatagtttctggacctggaattgtagaaggcttgaagctgaagggtctgccaaaaggaagagggttacttttgctttctgaaatgagttcagctggcaaccttgctcatggagattacactgctgcagccgtgaagattgctgagcaacattctgatattgtaattggatttatatcagtaaatcctgcatcttggtcagtgacgccgtcaagtccagcgttcatccatgctactcctggagttcagttggttgctgggggagactcgcttggtcaacagtacaacactccttactctgtcataaacgacagaggcagcgacataattatagtcggtcgtgggattataagggcgaacaatcctgctgagaccgcgagagagtaccgcatccaaggatggcatgcttaccaatccagcttatcatga

SEQ ID NO: 16875 - protein, 306 aa, Oryza sativa
MTLTEVLAVLVKRGKLGEEKAQEVKRFLDANRKMAVPGLPVKPKVVRKAFSERAGLATNPMGRKLFELMEAKQSNLCVAADVGTATELLDLADKIGPEICMLKTHVDILSDFTPDFGHKLRSIAERHSFLIFEDRKFADIGNTVTMQYEGGIFRILDWADIVNAHIVSGPGIVEGLKLKGLPKGRGLLLLSEMSSAGNLAHGDYTAAAVKIAEQHSDIVIGFISVNPASWSVTPSSPAFIHATPGVQLVAGGDSLGQQYNTPYSVINDRGSDIIIVGRGIIRANNPAETAREYRIQGWHAYQSSLS

SEQ ID NO: 16876 - DNA, 954 bp, Oryza sativa
  CDS (1)..(954)
atgaatgggatcacgctgcactcgctcatgaccctcacggaggtgctcgccgtgctgctcaagcacgggaaggtgaccgaggagaaggcgagggaggtaaggcagtttcttgacgccaataggaaggtgaccgttcccggagcggcgggcgccgttaagcccaaagcggtcaggaaggggtttgctgagagggctggattggccaagaacccgatggggaagaggcttttcgaggtgatggaggcaaagcagagcaatttatgtgttgctgccgatgtgggaactgcaaaggagctccttgagcttgcagagaaggttggtccagagatttgcatgctgaaaactcatgtggatatcttgtctgactttactccagattttggagctaagctttgctcgattgccgagaagcacaactttttgatatttgaagaccgcaagtttgctgacattggaaacacagtgactatgcaatatgaaggaggaatatttcgcatattagactgggctgatatcgtcaatgcccatataattcctggacctggaattgtggatggtctgaagcttaagggtttgccaaaaggaagagggctgcttttgcttgctgaaatgagctcggctggcaaccttgctcatggagagtacactgctgcagctgtaaagattgctgagcaacattctgattttgtaattggatttatatccgttaatccagcatcttggtcagttgcgccatcaagtccagcatttatccatgccactcctggagtgcagatggtttctggaggagatgctcttggtcaacagtacaatacccctcattctgttataaacgacagaggcagtgacataattatagtcggacgagggattataaaggcgagtaatccagccgagaccgcgagggagtaccgcatccaagggtggggagcataccaatccagcttgccatga

SEQ ID NO: 16877 - protein, 317 aa, Oryza sativa
MNGITLHSLMTLTEVLAVLLKHGKVTEEKAREVRQFLDANRKVTVPGAAGAVKPKAVRKGFAERAGLAKNPMGKRLFEVMEAKQSNLCVAADVGTAKELLELAEKVGPEICMLKTHVDILSDFTPDFGAKLCSIAEKHNFLIFEDRKFADIGNTVTMQYEGGIFRILDWADIVNAHIIPGPGIVDGLKLKGLPKGRGLLLLAEMSSAGNLAHGEYTAAAVKIAEQHSDFVIGFISVNPASWSVAPSSPAFIHATPGVQMVSGGDALGQQYNTPHSVINDRGSDIIIVGRGIIKASNPAETAREYRIQGWGAYQSSLP

SEQ ID NO: 16878 - DNA, 1437 bp, Dictyostelium discoideum
  CDS (1)..(1437)
atgaatattaaagaattagtattaaaattaatgaaattgatggcaattaaattaggagaatttaaattaaagagtggtattatttcaccaatttatattgatcttagagttacagtatcatcaccaccattgttagcagcaattgcagagatgatgtatcaaaaggtttataaatctggtaatgcacaagagacaccagcattagtatgtggtgtaccatatacagcattaccaattgcaacaggtatgtcaattgccaacaatattccaatggtagtacgtagaaaagaagccaaagcatatggtaccaaacaattgattgaaggtcgtttcaaagagggtgacaatgtattggttgttgaagatttagtaacaagtggtgcaagtgtacttgaaacagttagagatttaaattcagttggtttaaaagttacagacgtagtcgtgttattagatcgtcaagaaggtgccagacaagcacttgagaaacaaggctaccgtcttcactcagtctttacaatggaagagttaatcaacaccttaatcgaagctggtaaattaaccggccgtactttagagttggttcaatcattcttagacgccaatcgtaatgtagtagtaccattaccaccaacccttgccccaccagcaccagcaccaattgttattaataaaccatttgaagagagagctaaacttgcatcaaatccaatggcatctaaattattcacattaatgtcaagcaagaagaccaatcttgcagttgcagctgatttaactgataaacaacaacttttagatttagcagaatcaattggttcagaaatttgtgttttgaagacccatgttgatatcattgataattatgatgaagagtttattaaatcattgaaatgcatagcagcaaaacataatttcttgatttttgaagatagaaaattcgcagatattggaaacactgtgaaatatcaatttgagaatggtgtttataaaatctcaaaatgggcagtcatggtcaccgtacatggtgtcgcaggttcatccattgtcgatggtttcaaatcaggtttgaaagagtatggttcaggtttattattattggctcaaatgtcatcaaaaggttctttgtgtgttggtgattatacaactcaaatgattgaaatggcaaataataacaaagaggaggttatgggtttaatttgtcaagaacgattaccatcaatgactgatggtttggttttaatgactccaggtgttcaattcaattcaactggtgatgctatgggtcaacaatataatactccagaatatatcattaaagaaaagaatactgatgttatcattgttggtagaggtatttatcaaagtaatgatccaaaatctgttgcaaataaatatagaactgctgcttgggaaacttatcaatcaaaattttaa

SEQ ID NO: 16879 - protein, 478 aa, Dictyostelium discoideum
MNIKELVLKLMKLMAIKLGEFKLKSGIISPIYIDLRVTVSSPPLLAAIAEMMYQKVYKSGNAQETPALVCGVPYTALPIATGMSIANNIPMVVRRKEAKAYGTKQLIEGRFKEGDNVLVVEDLVTSGASVLETVRDLNSVGLKVTDVVVLLDRQEGARQALEKQGYRLHSVFTMEELINTLIEAGKLTGRTLELVQSFLDANRNVVVPLPPTLAPPAPAPIVINKPFEERAKLASNPMASKLFTLMSSKKTNLAVAADLTDKQQLLDLAESIGSEICVLKTHVDIIDNYDEEFIKSLKCIAAKHNFLIFEDRKFADIGNTVKYQFENGVYKISKWAVMVTVHGVAGSSIVDGFKSGLKEYGSGLLLLAQMSSKGSLCVGDYTTQMIEMANNNKEEVMGLICQERLPSMTDGLVLMTPGVQFNSTGDAMGQQYNTPEYIIKEKNTDVIIVGRGIYQSNDPKSVANKYRTAAWETYQSKF

SEQ ID NO: 16880 - DNA, 708 bp, Agrobacterium tumefaciens
  CDS (1)..(708): transl_table=11
atgaccgcgcgcgaaaaactcatcgtcgggctggatgttccgactgtgcagcaggcagaagacatcgtgtcgaaaatcggcgacgaggtcctgttctacaagatcggttatcagctggtattcgccgggggtcttgaattcgcgcgtgacctcgtccagagcggcaagaaggtctttctcgacatgaagctgctcgatatcgacaacaccgtcgcctcgggcgtcgaaaacatcgcccgcatgggcatgtcgatgctgacgctgcatgcctatcccaaagccatgcgtgctgccgtcaaggcggcggaaggctccggcctctgcctgctgggcgtcaccgtgctgacctccatggatgacagcgatctggtcgaggccggttacgcgtccgacgcgcgttcgctggtgctgcgccgggctgaacaggcacgcgaggccggtatgggcggcattgtctgttcggcggaagaatcgaccgctgtgcgtgaaattctcggccccgaccttgccgtggtcacccccggcattcgccccgccggcgccgatcttggcgatcagaagcgggtgatgacgccctatgacgccatcaaggccggttcgagccatctggttgtcgcccgtcccatcgtcagggcggaagacccgaaagcggcggcccgcgccattctggacgatatgctgcgcgcgagttttccggccaatcagtaa

SEQ ID NO: 16881 - protein, 235 aa, Agrobacterium tumefaciens
MTAREKLIVGLDVPTVQQAEDIVSKIGDEVLFYKIGYQLVFAGGLEFARDLVQSGKKVFLDMKLLDIDNTVASGVENIARMGMSMLTLHAYPKAMRAAVKAAEGSGLCLLGVTVLTSMDDSDLVEAGYASDARSLVLRRAEQAREAGMGGIVCSAEESTAVREILGPDLAVVTPGIRPAGADLGDQKRVMTPYDAIKAGSSHLVVARPIVRAEDPKAAARAILDDMLRASFPANQ

SEQ ID NO: 16882 - DNA, 717 bp, Anabaena sp
  CDS (1)..(717): transl_table=11
atgagtaatgacaaaataattgtggctttggatgtgccagatacggagagtgcgatcgctctcattgataagctagagtcggtgactttttggaaggttgggttggaattgtttactagttccggccccagaattctagaagtactgaaatctagacaaaagcgcatctttctcgatttgaagtttcacgacatccccaatacggtggctggggcttgtcgtgcggcggctggttacggggtggatttgatgacaatccatgctacctctggtagagatgccctgaaggctgcaaaagaggcggtagaggaaggggctgcacaagctggtgtgaaaccgcccaagttaatcgctgtgacggtgttaaccagtatttctgccagacagttggcgttagatttgaaaattccttcagaattgccagaatatgctttagatatggctctaatggcgcaggagatggggttagatggggcagtgtgttcaccccaagaagtggcacatttacgccaaatttgcggggatgatttcgtgttggtttgtccgggggtacgcccaacatgggcagaagcgggagatcaaaagcgatcgctcaccccctcccaagccatccaagcaggggctgattatttagtgattggtcgtccaattactgctgctgctgaacctgagttagcctggaaacgcatttctcaagagttaacaacagtggtatga

SEQ ID NO: 16883 - protein, 238 aa, Anabaena sp
MSNDKIIVALDVPDTESAIALIDKLESVTFWKVGLELFTSSGPRILEVLKSRQKRIFLDLKFHDIPNTVAGACRAAAGYGVDLMTIHATSGRDALKAAKEAVEEGAAQAGVKPPKLIAVTVLTSISARQLALDLKIPSELPEYALDMALMAQEMGLDGAVCSPQEVAHLRQICGDDFVLVCPGVRPTWAEAGDQKRSLTPSQAIQAGADYLVIGRPITAAAEPELAWKRISQELTTVV

SEQ ID NO: 16884 - DNA, 696 bp, Aquifex aeolicus
  CDS (1)..(696): transl_table=11
atggcaagaatttgtgttgctctggacgtcccctgggaaagggctataaagatagtaaaagacctttacgacttctttgaaacatatccccttatcttaaaaatcggacacaagatttaccttgaaaagggcggagacgctgtaaaggaactcaaggaggactttccttacgaggtgttcctcgatttaaaactccatgacatcccttcggttgtaggacttgccgttgaaaagatcagtgaactgggaacggattacaccacggttcatctgctcggcggtccggaaatggtaaaggaagcggtaaagaacaagggaagcatgaaaatcctcggtgttactatactcacctcgcacgacgagaactacataaagtttttaaaaagcaactttgaagatataaagaacttcaccctttacctcgcaagagttggtatagaaaacggcgttgacggagttgtttgctcaggtgaagaagttgagttcttaaagaagaacatagaaaaggacttcatagcggtagttccgggaataaggattaaaaaggaaaagaggcacgaccagaagagggttctcacacccgcggaggcaaagaaaaggggagcagacgttatagtaatcggaagggaaattacagagagcaagaatcccgtctacgtggtagaaagggctctaaagatgatgggagagatatga

SEQ ID NO: 16885 - protein, 231 aa, Aquifex aeolicus
MARICVALDVPWERAIKIVKDLYDFFETYPLILKIGHKIYLEKGGDAVKELKEDFPYEVFLDLKLHDIPSVVGLAVEKISELGTDYTTVHLLGGPEMVKEAVKNKGSMKILGVTILTSHDENYIKFLKSNFEDIKNFTLYLARVGIENGVDGVVCSGEEVEFLKKNIEKDFIAVVPGIRIKKEKRHDQKRVLTPAEAKKRGADVIVIGREITESKNPVYVVERALKMMGEI

SEQ ID NO: 16886 - DNA, 804 bp, Ashbya gossypii
  CDS (1)..(804)
atgtcaacgaaatcttacgcagaaagggccaaggcacacaattcgccagttgctagaaagcttctggcattgatgcacgagaagaaaaccaatctctgcgcttcccttgatgtgcggacgtctagaaagcttctggagctagcagacacgctgggaccgcacatttgtctgctgaagacacatgtcgacatactgacggacttcgacatcgagacgacagtcaagccgctgcagcagcttgcggctaagcacaacttcatgatcttcgaggaccgcaagttcgctgacattggcaacacggttaagctgcagtactcctccggcgtgtaccgtatcgcggagtgggcggatattaccaatgcacacggcgtcaccggccccggtgtgatagccgggctgaaggaggctgcgaaactggcctcacaggaacccagggggttgctgatgctggcagagctctcttctcagggctctttggcgcgcggagactataccgcgggcgtcgttgaaatggcaaagctggacaaagactttgtgatcgggttcatcgcgcagcgtgacatgggtgggcgtgcagacggctttgactggctcatcatgaccccgggggttggcctggacgacaaaggagacggcctgggccagcagtaccgcacggtggatgaggtcgtcagcgacggtaccgatgtgatcattgttggcagagggctctttgacaagggaagagaccccaacgtcgagggtgcccgctaccgcaaggccggttgggaggcttacttgcgccgtattggcgagacttcgtag

SEQ ID NO: 16887 - protein, 267 aa, Ashbya gossypii
MSTKSYAERAKAHNSPVARKLLALMHEKKTNLCASLDVRTSRKLLELADTLGPHICLLKTHVDILTDFDIETTVKPLQQLAAKHNFMIFEDRKFADIGNTVKLQYSSGVYRIAEWADITNAHGVTGPGVIAGLKEAAKLASQEPRGLLMLAELSSQGSLARGDYTAGVVEMAKLDKDFVIGFIAQRDMGGRADGFDWLIMTPGVGLDDKGDGLGQQYRTVDEVVSDGTDVIIVGRGLFDKGRDPNVEGARYRKAGWEAYLRRIGETS

SEQ ID NO: 16888 - DNA, 837 bp, Aspergillus fumigatus
  CDS (1)..(837)
atgtcgtccaagtcgcaattgacttacggtgctcgagccagcaagcaccccaatcctctggcaaagagactttttgagattgccgaagcaaagaagacaaacgttaccgtctctgctgatgtgacgacaacccgagaactcctggacctcgctgaccgtctcggtccctacatcgccgtcatcaagacacacatcgacatcctcaccgatttcagcgtcgacactatcaatggcctgaatgtgctggctcaaaagcacaactttttgatcttcgaggaccgcaaattcatcgacatcggcaataccgtccagaagcaataccacggcggtgctctgaggatctccgaatgggcccacattatcaactgcagcgttctccctggcgagggcatcgtcgaggctctggcccagaccgcatctgcgcaagacttcccctatggtcctgagagaggactgttggtcctggcagagatgacctccaaaggatcgctggctacgggcgagtataccaaggcatcggttgactacgctcgcaaatacaagaacttcgttatgggtttcgtgtcgacgcgggccctgacggaagtgcagtcggatgtgtcttcagcctcggaggatgaagatttcgtggtcttcacgacgggtgtgaacctctcttccaaaggagataagcttggacagcaataccagactcctgcatcggctattggacgcggtgccgactttatcatcgccggtcgaggcatctacgctgctcccgacccggttgaagctgcacagcggtaccagaaagaaggctgggaagcttatatggccagagtatgcggcaagtcatga

SEQ ID NO: 16889 - protein, 278 aa, Aspergillus fumigatus
MSSKSQLTYGARASKHPNPLAKRLFEIAEAKKTNVTVSADVTTTRELLDLADRLGPYIAVIKTHIDILTDFSVDTINGLNVLAQKHNFLIFEDRKFIDIGNTVQKQYHGGALRISEWAHIINCSVLPGEGIVEALAQTASAQDFPYGPERGLLVLAEMTSKGSLATGEYTKASVDYARKYKNFVMGFVSTRALTEVQSDVSSASEDEDFVVFTTGVNLSSKGDKLGQQYQTPASAIGRGADFIIAGRGIYAAPDPVEAAQRYQKEGWEAYMARVCGKS

SEQ ID NO: 16890 - DNA, 834 bp, Aspergillus oryzae
  CDS (1)..(834)
atgtcttccaagtcgcaattgacctacagcgcacgcgctagcaagcaccccaatgcgctcgtaaagaagctcttcgaggttgccgaggccaagaaaaccaatgtcaccgtttccgccgacgtgacaaccaccaaagagctgctggatttggctgaccgactcggtccgtacattgccgtgatcaaaactcacatcgatatcctctccgatttcagcgaagaaaccatcaccggtctgaaggcccttgcagagaagcacaatttcctcatcttcgaagatcgcaagttcatcgatattggaaacacagtccaaaagcagtaccatggcggcactctgcgtatctctgagtgggcccacatcatcaactgcagtattctgcccggtgagggtatcgtcgaggctctggcccagactgcttcggccgaggacttcccctacggctccgagaggggccttttgatccttgcggagatgacctccaagggatctttggctaccggtcaatatactacttcttctgttgactatgcccggaagtataagaagtttgtgatgggattcgtctcgacacgtcaccttggcgaggttcagtctgaagttagctcgccttcggaggaggaagattttgtcgtcttcacgacaggtgtcaacctctcctcgaagggagacaagctgggacagcagtaccaaactcctgagtcggctgttggacgcggtgccgactttattattgctggccgtggaatttatgctgctcctgatcccgtggaggcggcgaagcagtaccagaaggagggatgggatgcatacctgaagcgtgttggtgcgcaataa

SEQ ID NO: 16891 - protein, 277 aa, Aspergillus oryzae
MSSKSQLTYSARASKHPNALVKKLFEVAEAKKTNVTVSADVTTTKELLDLADRLGPYIAVIKTHIDILSDFSEETITGLKALAEKHNFLIFEDRKFIDIGNTVQKQYHGGTLRISEWAHIINCSILPGEGIVEALAQTASAEDFPYGSERGLLILAEMTSKGSLATGQYTTSSVDYARKYKKFVMGFVSTRHLGEVQSEVSSPSEEEDFVVFTTGVNLSSKGDKLGQQYQTPESAVGRGADFIIAGRGIYAAPDPVEAAKQYQKEGWDAYLKRVGAQ

SEQ ID NO: 16892 - DNA, 813 bp, Aureobasidium pullulans
  CDS (1)..(813)
atgtcccgtcacgcaacaatcacccagtcataccaggagcgagcctcgctgcccaagacatcaccggtcgcctcgtacctcctacgattgatcgcagcgaagaagacaaatctctgtgtctcggcagatgtgtcgacaaccagagagctgctgcaactcgccgaagaggtcggcgactcaatatgcatgctcaagacacacgccgacatcattaatgactttggccctcgcaccatcgagggtctgaaagagattgctgccaagaagcacttcctcgtcttcgaggaccgcaagtttggcgacattggcagtaccgtgcaaaagcagttcactgccggccctctgcagatcgttcgctgggccaatatcatcaatgcccacatcttccctggccccgccatcatcactgctctctcgcaagcccgcccacgatgccgtcagttgttgatcctcgcagagatgagcagtgcaggcaacttgatgactggctcatacactgaacaatgtgttgtggaagcacgcaagaacccggagttcgtcatgggcttcatcgcacaacgcactctcaatgaacagcctggtgacaatttcatcaccatgactcctggcgtccagattggcgccactggagatggtctcggccaacagtacaacactccggaaaaggtcatcggcgaagctggcaccgacatcatcattgtcggccgcggtgtctacggtgctcaagataagagggccaaggccgaggaatacagagtcagagcatggaaggcatacgaggggaattggcgctgctactgcaacaaaaggtag

SEQ ID NO: 16893 - protein, 270 aa, Aureobasidium pullulans
MSRHATITQSYQERASLPKTSPVASYLLRLIAAKKTNLCVSADVSTTRELLQLAEEVGDSICMLKTHADIINDFGPRTIEGLKEIAAKKHFLVFEDRKFGDIGSTVQKQFTAGPLQIVRWANIINAHIFPGPAIITALSQARPRCRQLLILAEMSSAGNLMTGSYTEQCVVEARKNPEFVMGFIAQRTLNEQPGDNFITMTPGVQIGATGDGLGQQYNTPEKVIGEAGTDIIIVGRGVYGAQDKRAKAEEYRVRAWKAYEGNWRCYCNKR

SEQ ID NO: 16894 - DNA, 717 bp, Bacillus anthracis
  CDS (1)..(717): transl_table=11
atgtcacagtcgttaatcgttgcactagatttcccagggaaacaagatgtagaacaattcttgcgccactttgaaggggaagagttatttgtcaaagttggtatggagttattttacaaagaaggccctgcgattattacgtacttaaaagaaaaaggacataaaatctttctagatttaaaacttcatgatattccgaatacagtaaaaagcgctatgcgtagcctagctagtctagatgtagatatggtaaatgttcatgctggtgggggaagcagtatgatgaaagctgcgattgagggattagaggaaggtaagcaagaaggaaaagagagaccgatttgtattgcagttacacaactaacaagcacttcggaaactatgatgaaaaaagagattggcattgagaaaacgttagaagaagcggttgctcattatgcaaaactaacgaaagaaagtggacttgatggcgttgtttgctcaacacttgaagttccaaaattacgtgaagtatgcggaagtgaatttgtaacagtaacaccggggattcgtcttgcaagcgatgatgtaaatgaccaggtgcgcgtagcaacaccgaaacgtgcgagggaacttggctcaagctatatcgtagttggacgtagtattacaaaagcagaaaatccgcttgaagcgtataaaacagtaaaacaacagtgggaaggtgtaacagtatga

SEQ ID NO: 16895 - protein, 238 aa, Bacillus anthracis
MSQSLIVALDFPGKQDVEQFLRHFEGEELFVKVGMELFYKEGPAIITYLKEKGHKIFLDLKLHDIPNTVKSAMRSLASLDVDMVNVHAGGGSSMMKAAIEGLEEGKQEGKERPICIAVTQLTSTSETMMKKEIGIEKTLEEAVAHYAKLTKESGLDGVVCSTLEVPKLREVCGSEFVTVTPGIRLASDDVNDQVRVATPKRARELGSSYIVVGRSITKAENPLEAYKTVKQQWEGVTV

SEQ ID NO: 16896 - DNA, 735 bp, Bacillus caldolyticus
  CDS (1)..(735): transl_table=11
gtgcacacgccgttcattgtcgcgcttgatttcccatcaaaacaagaggtggagcggtttttgcggccgtttgccggaacgccgctgttcgtcaaagtcggcatggagctgtactatcaggaaggtccagccatcgtcgcgtttctcaaagaacaaggacatgccgtctttttagacttaaaactgcatgacatcccaaatacggtgaaacaggcgatgaaagggctcgcccgtgtcggcgccgatttggtgaacgtccacgccgccggcggccggcgcatgatggaagcggcgatcgaggggcttgacgccggcacgccaagcggaagaatgcggccgcgctgcatcgctgtcacccagctgacaagcacggacgagcgaatgcttcatgaggagctgtggatttcccgcccgcttgcggaaacagtcgcccattacgccgccttggcgaaagagagcggccttgacggcgtcgtctgttcagcgaacgaagcggcgttcatcaaagaacggtgcggcgcctcgttccttgccgtcaccccgggtatccgctttgctgatgatgcggcgcacgaccaagtgcgcgtcgtcaccccaaggaaagcgcgtgcgcttggttctgactacatcgtcgtcggccgcagcctcacccgcgccgccgatccgctcggggcgtatgcccgcctgcaacacgaatggaacggaggagagagagagtcaactacccccacttag

SEQ ID NO: 16897 - protein, 244 aa, Bacillus caldolyticus
MHTPFIVALDFPSKQEVERFLRPFAGTPLFVKVGMELYYQEGPAIVAFLKEQGHAVFLDLKLHDIPNTVKQAMKGLARVGADLVNVHAAGGRRMMEAAIEGLDAGTPSGRMRPRCIAVTQLTSTDERMLHEELWISRPLAETVAHYAALAKESGLDGVVCSANEAAFIKERCGASFLAVTPGIRFADDAAHDQVRVVTPRKARALGSDYIVVGRSLTRAADPLGAYARLQHEWNGGERESTTPT

SEQ ID NO: 16898 - DNA, 717 bp, Bacillus cereus
  CDS (1)..(717): transl_table=11
atgtcacagtcgttaatcgttgcactagattttccagggaaacaagaagtagaacaattcttacaccactttgaaggggaagagttatttgtcaaagtaggtatggagttattttacaaagaaggccctgcgattattacgtacttaaaagaaaagggacataagatcttcttagatttaaaacttcatgatattccgaatacagtaaaaagcgctatgcgtagcctagctagtctagatgttgatatggtaaatgttcatgctgctgggggaagcagcatgatgaaagctgcgattgagggattagaggaaggtaagcaagaaggaaaagagagaccgatttgtattgcagttacacaactaacaagcacttcggaagctatgatgaaaaaagagatcggcattgagaaaacgttagaagaagcggttgctcattatgcaaaattaacgaaagaaagtggacttgatggcgttgtttgttcaacacttgaagttccaaaattacgtgaagtatgcggaaatgaatttgtaacagtaacaccggggattcgtcttgcaagcgatgatgtaaatgaccaagtgcgcgtagcaacaccgaaacgtgcgagggaacttggctcaagctacatcgtagttggacgtagtattacaaaagcagaaaatccgcttgaagcgtataaaacagtaaaacaacagtgggaaggtgtaacagtatga

SEQ ID NO: 16899 - protein, 238 aa, Bacillus cereus
MSQSLIVALDFPGKQEVEQFLHHFEGEELFVKVGMELFYKEGPAIITYLKEKGHKIFLDLKLHDIPNTVKSAMRSLASLDVDMVNVHAAGGSSMMKAAIEGLEEGKQEGKERPICIAVTQLTSTSEAMMKKEIGIEKTLEEAVAHYAKLTKESGLDGVVCSTLEVPKLREVCGNEFVTVTPGIRLASDDVNDQVRVATPKRARELGSSYIVVGRSITKAENPLEAYKTVKQQWEGVTV

SEQ ID NO: 16900 - DNA, 705 bp, Bacillus halodurans
  CDS (1)..(705): transl_table=11
atgatacgaccattgatcattgccctagatgtagaaaaccgacagaacatgcaggaactgctcaagacacttccaaaacctctgttcgtaaaagtagggatggagttgttttacagtgaaggcccagctgtgattgagcaactaaaggatgaaggacatcaagtgtttctcgatttaaagctgcacgacattccgaacacggtaaagcgagcgatgcgacaactagccacactcggagttgacatcgtgaacgttcacgtagcaggaggagtaaacatgatggctgcggcacgggaaggactggaagctgggacagtggacggccgtaaccgtccgaagctcatcggtgtgacacagcttacaagtacaaatgaggctatgctacaaaaagagctgctcattcagtccaacatgaacggggcagtgtctcattatgctcggcttgcaaaggaggccggactggatggggttgtctcgtccgcccaagaggttcctattattcacgagcattgcggtccgtcttttttgaccgtcacaccagggattcgtttaaaagaggatgacaaaggggatcaaacgcgaattgttaccccggaagaagcgcggacattagggagctgggctatcgttgtcggtcgcagtatcacggcggctccagatcctgctgccgcctatgaaatcatacgcaagcaatgggagggttaa

SEQ ID NO: 16901 - protein, 234 aa, Bacillus halodurans
MIRPLIIALDVENRQNMQELLKTLPKPLFVKVGMELFYSEGPAVIEQLKDEGHQVFLDLKLHDIPNTVKRAMRQLATLGVDIVNVHVAGGVNMMAAAREGLEAGTVDGRNRPKLIGVTQLTSTNEAMLQKELLIQSNMNGAVSHYARLAKEAGLDGVVSSAQEVPIIHEHCGPSFLTVTPGIRLKEDDKGDQTRIVTPEEARTLGSWAIVVGRSITAAPDPAAAYEIIRKQWEG

SEQ ID NO: 16902 - DNA, 720 bp, Bacillus subtilis
  CDS (1)..(720): transl_table=11
atgaaaaacaacctgcccatcatcgcgcttgattttgcgtcagctgaagaaacacttgcgttcttagcgccttttcagcaagaaccgttatttgtaaaggttgggatggagcttttttatcaagaagggccatctatcgtgaaacaactaaaagaaagaaactgcgagctatttttagatctaaagcttcatgacatcccgactactgtaaacaaagcgatgaagcgccttgccagtcttggagtagacctcgtcaatgttcatgctgccgggggcaaaaaaatgatgcaggcagctctcgaaggcttagaagaaggtacgccggctggaaaaaaacgtccgtcacttatcgcggtaacccagctgacaagcacatctgaacaaatcatgaaagatgaactgctgatcgaaaagtctctgattgatacggttgtgcactacagcaaacaggcggaagaaagcggactggatggagtggtctgctctgttcatgaagcaaaagccatttaccaagcggtgtcgccttcatttctgactgtcactccggggatcagaatgtcagaggacgctgcgaatgaccaagttcgcgtagcgacgcctgccattgcaagagagaaaggttcatcagcgattgtagtaggacgctcgattacaaaagcggaagacccggtaaaagcctataaggctgtcagacttgaatgggagggaatcaaatcttga

SEQ ID NO: 16903 - protein, 239 aa, Bacillus subtilis
MKNNLPIIALDFASAEETLAFLAPFQQEPLFVKVGMELFYQEGPSIVKQLKERNCELFLDLKLHDIPTTVNKAMKRLASLGVDLVNVHAAGGKKMMQAALEGLEEGTPAGKKRPSLIAVTQLTSTSEQIMKDELLIEKSLIDTVVHYSKQAEESGLDGVVCSVHEAKAIYQAVSPSFLTVTPGIRMSEDAANDQVRVATPAIAREKGSSAIVVGRSITKAEDPVKAYKAVRLEWEGIKS

SEQ ID NO: 16904 - DNA, 711 bp, Bartonella bacilliformis
  CDS (1)..(711): transl_table=11
atgggagttgttgatgataacagcaatcgtgaacgccttattgttggattagatgttccgaatattaaacaagcagaaaaattggttacgcaattgggtgatgaggttagtttttataaaattggctatcagttagctttttctgggggaatggacttcgttcaagatcttattcaagcacgaaaaaaagtgttttttgatatgaaattgctcgatattgatcataccgttgcaagagctgtagaaaatattgccaaattaggtgtttcgatgctgactttgcatgcttatccaacagttatgaaagctgctgttgctgctgcaaaagggagtgatttatgtttgcttggggtgacggtgttaacatcaatggatgaagctgatttgcacaatgcgggttataaagatagcccaaaaaaattggcttttaaaagagctgagcaagcacgggaagccggcatgggtggaattgtttcttcagcgcttgaagccgcagctttacgaaaagtgatcggaagtgatatggctttggtcacaccggggattcgcccaatggggagtgataagggggatcaaaaacgggtgatggcaccaagacaagcgctagattctggtgctagccatcttgttgtcgcgcggccaattattcaagccgatgatcctttagtggcaacaaagaaaattttggcagaaatggctgatgggtgttaa

SEQ ID NO: 16905 - protein, 236 aa, Bartonella bacilliformis
MGVVDDNSNRERLIVGLDVPNIKQAEKLVTQLGDEVSFYKIGYQLAFSGGMDFVQDLIQARKKVFFDMKLLDIDHTVARAVENIAKLGVSMLTLHAYPTVMKAAVAAAKGSDLCLLGVTVLTSMDEADLHNAGYKDSPKKLAFKRAEQAREAGMGGIVSSALEAAALRKVIGSDMALVTPGIRPMGSDKGDQKRVMAPRQALDSGASHLVVARPIIQADDPLVATKKILAEMADGC

SEQ ID NO: 16906 - DNA, 714 bp, Bradyrhizobium japonicum
  CDS (1)..(714): transl_table=11
atgacgccagccgagatcgccccgaaggaccgcctgatcgttgcgctcgatctgccgagcgttgatgccgcggaggcgatgatcgcaaggctcggcgacagcgtcacgttctacaagatcggctatcgcctcgcctatgccggcggcttgccgctcgttgcgaggctcgcggacaagggcaagaaggtctttctcgatctcaagctgcacgacatcggcaacaccgtggcgcaaggcgtcgagagcatcaccaggctgggcgcgaccttcctcaccgtgcacgcttatccgcagaccatgaagggcgccgtcgaaggccgcggcggctcgaacctgaagatcctcgccgtcaccgtcctgacctcctacaacgaggacgatctgcacgcggcgggtttccggctcggcgtcgccgagctcgtcgaagcgcgcgcgcagcaggcgcaggtgcttggcatcgacgggctggtgtcgtcgcccgaggaggtgggcgccttgcgcaagatcgtcggccaccagatgagcctcgtcacgcccggcatccggccggcgggctcggcaagtggcgatcagaaacgcatcatgacgccgggccgcgcgatcaccgcgggcgccgattatctcgtcgtcgggcgcccggtggtggaagccgccgagcccaaggcgatcgcagacgccatccaggccgagatcgggcaggcgctgggagcatga

SEQ ID NO: 16907 - protein, 237 aa, Bradyrhizobium japonicum
MTPAEIAPKDRLIVALDLPSVDAAEAMIARLGDSVTFYKIGYRLAYAGGLPLVARLADKGKKVFLDLKLHDIGNTVAQGVESITRLGATFLTVHAYPQTMKGAVEGRGGSNLKILAVTVLTSYNEDDLHAAGFRLGVAELVEARAQQAQVLGIDGLVSSPEEVGALRKIVGHQMSLVTPGIRPAGSASGDQKRIMTPGRAITAGADYLVVGRPVVEAAEPKAIADAIQAEIGQALGA

SEQ ID NO: 16908 - DNA, 717 bp, Brucella melitensis
  CDS (1)..(717)
atgacgacagaattgcacgatgacgcatccgggcgcctgatcgtgggccttgacgtgccgacaattgccgaggcggaaaaggtggtcgaagaactgggcaatgctgtttccttctacaagatcggctatcagcttgtttttgccggtgggcttgatttcgccaaaagccttgtggcggcgcgcaaaaaagtcttcctcgacatgaagctgctcgatatcgacaacacgattgccaaaggcgtggaaaatgtcgcgaagatgggtgtttccatgctcacgcttcatgcctatccgaaggcaatgcgtgcggcggtggaagccgccagagggtcggacctatgccttttgggcgtgacggtcctgacctccatggacaatgccgatcttcgggaagccggttatttcgacaatgcggaaacgctggtgctgaaacgtgcccgtcaggcgcatgaggccggtatgggcggcattgtcgcctcggcggtggaggcgcaggccattcgccaggcggttggccccgatatggccatcgtcacaccgggcatccgcccggcagggagcgagaagggcgaccagaagcgcgtgatgacgccagccgatgccttgagggccggtgcgagccatctcatcgtggcgcgcccgatcgtgggcgcaccggatcgcaaggcggcagcccttgccatcctgaaggaaatgcgctcgattggaagaagttag

SEQ ID NO: 16909 - protein, 238 aa, Brucella melitensis
MTTELHDDASGRLIVGLDVPTIAEAEKVVEELGNAVSFYKIGYQLVFAGGLDFAKSLVAARKKVFLDMKLLDIDNTIAKGVENVAKMGVSMLTLHAYPKAMRAAVEAARGSDLCLLGVTVLTSMDNADLREAGYFDNAETLVLKRARQAHEAGMGGIVASAVEAQAIRQAVGPDMAIVTPGIRPAGSEKGDQKRVMTPADALRAGASHLIVARPIVGAPDRKAAALAILKEMRSIGRS

SEQ ID NO: 16910 - DNA, 717 bp, Brucella suis
  CDS (1)..(717)
atgacgacagaattgcacgatgacgcatccgggcgcctgatcgtgggccttgacgtgccgacaattgccgaggcggaaaaggtggtcgaagaactgggcaatgctgtttccttctacaagatcggctatcagcttgtttttgccggtgggcttgatttcgccaaaagccttgtggcggcgcgcaaaaaagtcttcctcgacatgaagctgctcgatatcgacaacacgattgccaaaggcgtggaaaatgtcgcgaagatgggtgtttccatgctcacgcttcatgcctatccgaaggcaatgcgtgcggcggtggaagccgccagagggtcggacctatgccttttgggcgtgacggtcctgacctccatggacaatgccgatcttcgggaagccggttattccgacaatgcggaaacgctggtgctgaaacgtgcccgtcaggcgcatgaggccggtatgggcggcattgtcgcctcggcggtggaggcgcaggccattcgccaggcggttggccccgatatggccatcgtcacaccgggcatccgcccggcagggagcgagaagggcgaccagaagcgcgtgatgacgccagccgatgccttgagggccggtgcgagccatctcgtcgtggcgcgcccgatcgtgggcgcaccggatcgcaaggcggcagcccttgccatcctgaaggaaatgcgctcgattggaagaagttag

SEQ ID NO: 16911 - protein, 238 aa, Brucella suis
MTTELHDDASGRLIVGLDVPTIAEAEKVVEELGNAVSFYKIGYQLVFAGGLDFAKSLVAARKKVFLDMKLLDIDNTIAKGVENVAKMGVSMLTLHAYPKAMRAAVEAARGSDLCLLGVTVLTSMDNADLREAGYSDNAETLVLKRARQAHEAGMGGIVASAVEAQAIRQAVGPDMAIVTPGIRPAGSEKGDQKRVMTPADALRAGASHLVVARPIVGAPDRKAAALAILKEMRSIGRS

SEQ ID NO: 16912 - DNA, 711 bp, Buchnera aphidicola subsp
  CDS (1)..(711): transl_table=11
gtgttgaatcctaatatttttcacatgccgaaaataatcattgcgttagatttctgtaataaaaagtccgctatgaaattagtaaatcttcttaatccatcaattttttatttaaaaattggaaaagaaatgtttacaattctaggttgcaaatttgtcaaagaattacaccaactaggatttaatatatttcttgatttaaaatttcatgatattccgaatactgtatttaacgctacaaaggcggcagctgatttagggatatggatgttaagtgttcatgcttctggtggtaaagaaatgctaatctcggcaaaaaaagcattaaaatcttttaaaaaagctcctttattgatagccgttacagcattaactagttttaaagaagaagcattaaaagaaattggaattaatatttcattaactgaatatattttaaaattatcaaaattatctaatgattgtggattagatggtattgtatgtccaggtaaagaagcaaagaaaatcaagtttttatttggaaataaatataaaattattacgccaggtattagaattgctaaagatttactatatgatcaaaataacattattactcctaaagaagcaaaagaatataaaatagattacatagtaataggacgttctattactatgtcaaaaaatccaattaaaaaattagatttaataataaaatcgatgcaataa

SEQ ID NO: 16913 - protein, 236 aa, Buchnera aphidicola subsp
MLNPNIFHMPKIIIALDFCNKKSAMKLVNLLNPSIFYLKIGKEMFTILGCKFVKELHQLGFNIFLDLKFHDIPNTVFNATKAAADLGIWMLSVHASGGKEMLISAKKALKSFKKAPLLIAVTALTSFKEEALKEIGINISLTEYILKLSKLSNDCGLDGIVCPGKEAKKIKFLFGNKYKIITPGIRIAKDLLYDQNNIITPKEAKEYKIDYIVIGRSITMSKNPIKKLDLIIKSMQ

SEQ ID NO: 16914 - DNA, 711 bp, Buchnera aphidicola subsp
  CDS (1)..(711): transl_table=11
gtgttatacactaacaattacaatattccaaaaattattattgctttagatttttacaataagaaagaagctatgacattagtagatcttcttgatccttctgttttttatttaaaaattggtaaggaaatgtttacaattttgggttttaaatttgtaaaagaactgcataagttaggctttaatgtatttcttgatttaaaatttcatgatattccaaatactgtatttaatgctacaaaagcagctgcagatttaggaatatggatgttaagtgttcatgcatctggtggtaaaaatatgcttctttcagcaaagaaagcgttaaaatcttttaaaaaacctcctttattaattgctgtcactatgttgactagtttaaaagaaaaagatttaaaagaaattggaattaaaatatcattaaaggactatattttaatattgtcaaagttatctaatgattgtggtttagatggaattgtctgtccaggaaaccaagcgaaaaaaataaaatcattatatggagataaatataaaattatcactccaggtattagattgtccagtgattcttcatttgatcaaaagcatattattactccaaaagaagcaaaagaatttcaaatagattacatagttataggacgttctattaccacttcaaaaaacccaattaaaaaattaaatcttataatagaatctatgcgataa

SEQ ID NO: 16915 - protein, 236 aa, Buchnera aphidicola subsp
MLYTNNYNIPKIIIALDFYNKKEAMTLVDLLDPSVFYLKIGKEMFTILGFKFVKELHKLGFNVFLDLKFHDIPNTVFNATKAAADLGIWMLSVHASGGKNMLLSAKKALKSFKKPPLLIAVTMLTSLKEKDLKEIGIKISLKDYILILSKLSNDCGLDGIVCPGNQAKKIKSLYGDKYKIITPGIRLSSDSSFDQKHIITPKEAKEFQIDYIVIGRSITTSKNPIKKLNLIIESMR

SEQ ID NO: 16916 - DNA, 711 bp, Buchnera aphidicola subsp
  CDS (1)..(711): transl_table=11
atgcacttaaaatctaattttaaaaatattaatatcattattgcgttagatttttttgatgaaaataaagctatgaaatttatttataatttaaatcctactatttatgcattaaaaataggtaatataatgtttactttatttggagttcgttttataaaaatattacaaaaattgggatttaaaatatttcttgatttaaaattttatgacatcccaaatacaatatttggggctatacaagcagttgctaatttaaatatatggatggttagtattcatatttctggaggaatacaaatgttaaaatcagctagattagcactaaaaccgtttaaaaataaaccgttgctgatgggagtaactattttgactagtttagataaaactgatatgtctaagttaggaattcagatatcattatcaaaatacatattgtctttagcaaaaatagcacataaatgtaatttagatggaattatttgctctggaacagaaatatcgaatataaaaaaacatattaatgtcaaaaactttaaaatattaactccaggaattagattaaatggatgttcttctaatgaccaaaaaaatgttacaactccaatgttagcaaaacaatataatgtcgactatattataattggaagaattgtcacatcttctcaaaatcctttaaaaacactagaattaatcagatcacaaatataa

SEQ ID NO: 16917 - protein, 236 aa, Buchnera aphidicola subsp
MHLKSNFKNINIIIALDFFDENKAMKFIYNLNPTIYALKIGNIMFTLFGVRFIKILQKLGFKIFLDLKFYDIPNTIFGAIQAVANLNIWMVSIHISGGIQMLKSARLALKPFKNKPLLMGVTILTSLDKTDMSKLGIQISLSKYILSLAKIAHKCNLDGIICSGTEISNIKKHINVKNFKILTPGIRLNGCSSNDQKNVTTPMLAKQYNVDYIIIGRIVTSSQNPLKTLELIRSQI

SEQ ID NO: 16918 - DNA, 840 bp, Campylobacter jejuni
  CDS (1)..(840): transl_table=11
atgaagctttgtgtcgcacttgatctttctacaaaagaagaatgcttacaacttgccaaagaattaaaaaatttagacatatggttaaaagtaggtttaagagcatatttaagagatggttttaaattcatagaagaacttaaaaaagttgatgattttaaaatatttcttgatcttaaatttcatgatattcccaacactatggcagatgcttgcgaagaagtatcaaaacttggtgttgatatgatcaatatccacgcaagtgctggaaaaatagccatacaagaagttatgacacggcttagcaaattttcaaaaagacctttagttttagcagtttctgctcttacgagttttgatgaagaaaatttctttagtatttatagacaaaaaattgaagaagctgtaattaatttttcaaaaatatcctatgaaaatggacttgatggtatggtatgctctgtttttgaaagcaaaaaaattaaagagcacacaagttcaaatttcttaacccttactcctggaattcgtccttttggagaaacaaatgatgatcaaaaacgtgttgctaatcttgcaatggctagagaaaatttgagtgattatatcgttgtgggaaggcctatatataaaaatgaaaatcctagggctgtatgtgaaaaaattttaaacaaaatacacagaaaaaatataagcgaaaacgatatagagcaaaattatgaagtaattcagcaaaaagaatgggatatgtgtaatcactttgaagaatggattaaaactcggcctgataaagaacatgctttaaaagaattttatgctaagtgtgggataaaatattga

SEQ ID NO: 16919 - protein, 279 aa, Campylobacter jejuni
MKLCVALDLSTKEECLQLAKELKNLDIWLKVGLRAYLRDGFKFIEELKKVDDFKIFLDLKFHDIPNTMADACEEVSKLGVDMINIHASAGKIAIQEVMTRLSKFSKRPLVLAVSALTSFDEENFFSIYRQKIEEAVINFSKISYENGLDGMVCSVFESKKIKEHTSSNFLTLTPGIRPFGETNDDQKRVANLAMARENLSDYIVVGRPIYKNENPRAVCEKILNKIHRKNISENDIEQNYEVIQQKEWDMCNHFEEWIKTRPDKEHALKEFYAKCGIKY

SEQ ID NO: 16920 - DNA, 801 bp, Candida maltosa
  CDS (1)..(801)
atggtatccaccaaaacatacaccacaagagcatcgactcatccatcaccagtcgcacaacgtcttttccacttaatggacaccaaaaaggccaatctctgtgcatcagtcgacgttcaaaccacatccgaattcctttccttaatcgacaaactcggtccatatatctgtttagtcaagacccacatcgacataatcgacgacttttcatatgaaggcactattgttccattattggaattggcacggaaacataactttatgattttcgaagatcgtaagtttgcagatatcggaaacacagtcaagcatcagtacacttccggggtgtacaagatcagttcctggagtgacatcaccaatgcgcatggtgtcactggtgctggtgttgttgatggtttgaaacagggtgcgttggaaactacgaaagaaccaaggggtttgttgatgttggcggagttgtcttcgaaaggatcattggcgtatggggagtatactgagaagacggttgagattgctaagctggataaggagttcgtgattgggtttattgctcaacgtgatatgggtggccatgatgaagggtttgattggattgttatgactccaggggttggtttggacgataagggtgatggtttgggtcaacagtatagaacagttgatgaggttgtgagtaccggtactgatgtgattattgttggaagaggattgtttggtaaaggaagagatccagaagttgaaggtaagagatatagagatgctggttggaatgcttatttgaaaagaaccggacaataa

SEQ ID NO: 16921 - protein, 266 aa, Candida maltosa
MVSTKTYTTRASTHPSPVAQRLFHLMDTKKANLCASVDVQTTSEFLSLIDKLGPYICLVKTHIDIIDDFSYEGTIVPLLELARKHNFMIFEDRKFADIGNTVKHQYTSGVYKISSWSDITNAHGVTGAGVVDGLKQGALETTKEPRGLLMLAELSSKGSLAYGEYTEKTVEIAKLDKEFVIGFIAQRDMGGHDEGFDWIVMTPGVGLDDKGDGLGQQYRTVDEVVSTGTDVIIVGRGLFGKGRDPEVEGKRYRDAGWNAYLKRTGQ

SEQ ID NO: 16922 - DNA, 702 bp, Caulobacter crescentus
  CDS (1)..(702): transl_table=11
atgaccgccgacccgcgcctgatcgtgccgctggacctgcccaccgtcgacgacgcccgcgccatggtcgagcgcctgggcgacgcggtcagcttctacaagatcggcctggagctgctggccagcgacggcatgggcctggctcacgacctgaaggcctcgggcaagtcgatctttctcgactggaagctccacgacatcggcgccacggtcgagcgctcggcccgggtcttggcgaccagcggctgcgacctcctgaccgtccacgccgaaccgcaggtgatgcaggcggcggtcaaggcgcgcggcgactcgtcgctgaagatcctggccgtgaccgtgctgaccagcctgaccgacgctgacctcgtggagatgggctacgccttcaccgcccgcgatctggtcgaacgccgcgtgcgccaggccctggcctgcggcgtcgacggcatcgtctcctcgccccacgaagcggccctggcccgcgagatcgccaacgacgcgggccagcccgagttcctgatcgtaacccccggcgtgcgccccgaatggtcggccaagaacgaccaggcccgcgccgccacgcccgccgacgccctgcgcgccggcgccacccacctggtctgcggccgcccgatcaccgcggccaacgacccgcgcgaggcggcgctcaaggtggtgacggagatggcggggatttag

SEQ ID NO: 16923 - protein, 233 aa, Caulobacter crescentus
MTADPRLIVPLDLPTVDDARAMVERLGDAVSFYKIGLELLASDGMGLAHDLKASGKSIFLDWKLHDIGATVERSARVLATSGCDLLTVHAEPQVMQAAVKARGDSSLKILAVTVLTSLTDADLVEMGYAFTARDLVERRVRQALACGVDGIVSSPHEAALAREIANDAGQPEFLIVTPGVRPEWSAKNDQARAATPADALRAGATHLVCGRPITAANDPREAALKVVTEMAGI

SEQ ID NO: 16924 - DNA, 744 bp, Chromobacterium violaceum
  CDS (1)..(744): transl_table=11
atgaatcctctgatcgcacagggcgaaagccggacgacgtccccggtggtggtggcgctggatttcgccgacgcggacggcgcgctcgccttcgccagccgcctggatccggcggaatgccggctgaaggtcggcaaggagctgttcacctccagcggccgccacttggtcgaatcgctggccgcgcgcggcttccaggttttcctggacatgaaattccacgacatccccaataccgtggcccaggcctgcaaggccgcggccgagtccggcgtgtggatggtcaacgtccacgcctccggcggccgccggatgatggaggccgcgcgcgaggcgctggccggctacagccagcgcccgctgctgatcgcggtgacggtgttgaccagcatggaggcgtcggacctggccgaggtcggcatcgccgccacgccgcaggagcacgtgctgcgcctggccacgctgacccgcgattgcggcctggacggcgtggtgtgctcggcgcaggaggccgcgatgctgaagctggcgctgggccgcgatttcaagctggtgacgccgggcatccgtctcgccgacagcgccggcgacgaccagcgccgcgtgatgacgccgaccgccgccttggccgccggctcggactatctggtgatcggccggccgatcacccgcgccgcggacccgttggccgcgctgcgcgccatcaatcaagacatttccgtattcctgggtaaacaatcatga

SEQ ID NO: 16925 - protein, 247 aa, Chromobacterium violaceum
MNPLIAQGESRTTSPVVVALDFADADGALAFASRLDPAECRLKVGKELFTSSGRHLVESLAARGFQVFLDMKFHDIPNTVAQACKAAAESGVWMVNVHASGGRRMMEAAREALAGYSQRPLLIAVTVLTSMEASDLAEVGIAATPQEHVLRLATLTRDCGLDGVVCSAQEAAMLKLALGRDFKLVTPGIRLADSAGDDQRRVMTPTAALAAGSDYLVIGRPITRAADPLAALRAINQDISVFLGKQS

SEQ ID NO: 16926 - DNA, 837 bp, Cladosporium fulvum
  CDS (1)..(837)
atgtcgtccaagtcgcaattgccctttagcacccgtgcctctaaccaccccaacccgctggctcggaagctgttcgaggtcgctgaagccaaaaagagcaatgtgacagtttccgccgatgtcaccaccaccaaggagctcctggacctggccgaccgtctcggaccctacattgccgtgatcaaaacacacatcgatatcttgtccgacttcggacccgagaccatcaatggcctgaacgcgctggccgagaagcacaactttctcatctttgaggaccgcaagttcatcgacatcggtaacaccgtccagaagcagtaccacggcggtgccctcaagatctccgagtgggcccacattatcaactgcgccgttctgccagccgagggcatcgtccaggctctggccgaaactgcacaggccgaggacttcccccatggttctgagcgcggtcttctgattctcgctgagatgacctccaagggctccttggctaccggagagtacacctctgcctcggttgactacgcgcggaaataccccagcttcgtgcttggcttcgtctcgacccgtgcgctgaccgaggtctcttcgaccgtcaccgctgccgacaacgaggacttcgtcgtcttcaccaccggtgtcaacctttcttctaagggcgacaagctcggacagcagtaccagaccccgcagtcggctattggccgcggtgccgactttatcatcgcgggacgtggaatctatactgctccagaccccgtcgaggcagccaagcaataccagcagcagggatgggaagcctatctggctcgtgttggcggtgccagccaataa

SEQ ID NO: 16927 - protein, 278 aa, Cladosporium fulvum
MSSKSQLPFSTRASNHPNPLARKLFEVAEAKKSNVTVSADVTTTKELLDLADRLGPYIAVIKTHIDILSDFGPETINGLNALAEKHNFLIFEDRKFIDIGNTVQKQYHGGALKISEWAHIINCAVLPAEGIVQALAETAQAEDFPHGSERGLLILAEMTSKGSLATGEYTSASVDYARKYPSFVLGFVSTRALTEVSSTVTAADNEDFVVFTTGVNLSSKGDKLGQQYQTPQSAIGRGADFIIAGRGIYTAPDPVEAAKQYQQQGWEAYLARVGGASQ

SEQ ID NO: 16928 - DNA, 711 bp, Coxiella burnetii
  CDS (1)..(711)
atggaaaaaccagacccaaaagttattgtggccatcgatgctgggacggtggagcaagcccgagcacaaataaacccattaacccctgaattatgtcaccttaaaatcggcagtattctatttacacgttacgggccggcatttgtcgaggaattaatgcagaaagggtatcgcatttttctcgatttgaaattttatgatattccacaaacggtggcaggcgcttgccgagcggtcgcagagcttggcgtgtggatgatgaatattcatatatccggtggacgcacgatgatggaaacggtcgtgaatgcgttgcaatcaattactttaaaggaaaaacctttattaatcggggtcactattttaacaagcctagacggtagtgatttaaaaacattagggatacaagagaaggttcctgatatcgtttgtcgtatggcaacccttgccaaaagcgctgggttggatggggtggtttgttcagctcaagaggcggcattgctgcgtaaacaattcgatagaaattttttgttagttactcctggcatccgtttagaaaccgatgaaaaaggtgatcaaaaacgtgtaatgactccacgagcggctatccaagctggcagtgattatttagtaattggcaggcccatcacgcaatccacagatcctttaaaggcattagaggctattgataaagatattaagacccgttga

SEQ ID NO: 16929 - protein, 236 aa, Coxiella burnetii
MEKPDPKVIVAIDAGTVEQARAQINPLTPELCHLKIGSILFTRYGPAFVEELMQKGYRIFLDLKFYDIPQTVAGACRAVAELGVWMMNIHISGGRTMMETVVNALQSITLKEKPLLIGVTILTSLDGSDLKTLGIQEKVPDIVCRMATLAKSAGLDGVVCSAQEAALLRKQFDRNFLLVTPGIRLETDEKGDQKRVMTPRAAIQAGSDYLVIGRPITQSTDPLKALEAIDKDIKTR

SEQ ID NO: 16930 - DNA, 738 bp, Escherichia coli O6
  CDS (1)..(738)
atgacgttaactgcttcatcttcttcccgcgctgttacgaattctcctgtagttgttgcccttgattatcataatcgcgatgccgcgatggcctttgtcgacaagatcgacccacgcgattgtcgtctgaaggtcggcaaagagatgtttacattgtttgggccacagtttgtgagcgaacttcaacagcgtggttttgatatctttcttgacctgaaattccacgatattcccaacactgcagcacacgctgtcgctgctgcggctgacttaggcgtgtggatggtgaatgttcatgcctccggtggggcgcgtatgatggccgcagcgcgtgaggcactggttccgtttggcaaagatgcaccgcttttgattgctgtgacagtgttgaccagcatggaagccagcgacctggccgatcttggcgtgacactgtcacctgcagattatgcagaacgtctggcggcactgacgcaaaaatgtggccttgatggtgtggtgtgttctgctcaggaagctgtgcgctttaaacaggtattcggtcaggagttcaaactggttacgccgggcattcgtccgcaggggagtgatgctggtgaccagcgccgcattatgacgccagaacaggcgttgtcggctggtgttgattatatggtgattggtcgcccggtaacgcaatcggtagatccagcgcagacgctgaaagcgatcaacgcctctttacagcggagtgcatga

SEQ ID NO: 16931 - protein, 245 aa, Escherichia coli O6
MTLTASSSSRAVTNSPVVVALDYHNRDAAMAFVDKIDPRDCRLKVGKEMFTLFGPQFVSELQQRGFDIFLDLKFHDIPNTAAHAVAAAADLGVWMVNVHASGGARMMAAAREALVPFGKDAPLLIAVTVLTSMEASDLADLGVTLSPADYAERLAALTQKCGLDGVVCSAQEAVRFKQVFGQEFKLVTPGIRPQGSDAGDQRRIMTPEQALSAGVDYMVIGRPVTQSVDPAQTLKAINASLQRSA

SEQ ID NO: 16932 - DNA, 714 bp, Enterococcus faecalis
  CDS (1)..(714): transl_table=11
atgcacgatagaccaattattgcgttagattttcccacgcaaaaagaagtggctgtttttttagaaaaatttcctaaggaagaagccttgtttgttaaagtggggatggaacttttttacgcagaaggaccagcgattgttcgctggcttaaagaacaaggacacgatgttttcttggatttaaaattacatgatattccgaatactgtggaaaaagcgatgacaaatttagcaaaattaggcgttgccattactaatgtccatgcagcagggggcgttcgaatgatgcaagcagctaaggaaggtctaatcaaagggactcagccaggcgctaaggttcctgagttaattgctgtaacccagttgacttctactagtgaagaagagatgcaccatgatcaattaatcaacgttcctttagagacaagtgtcattcattatgctaaatgtgcggaaaaagcgggtctggatggtgtggtttgttcagcattagaagcacgtggtattcaagaagcaaccaagcagacgtttatttgcttaacacctggtattcgtccagcaggaagtgcagtaggtgaccaacaacgggtcgttacgccgcaacatgctcgcgaaattgggtccacatatatcgttgttggccgacctattacccaagcagaaaatccttatgaagcctatcaagaaatcaaaaaagactggagcgaaaagtaa

SEQ ID NO: 16933 - protein, 237 aa, Enterococcus faecalis
MHDRPIIALDFPTQKEVAVFLEKFPKEEALFVKVGMELFYAEGPAIVRWLKEQGHDVFLDLKLHDIPNTVEKAMTNLAKLGVAITNVHAAGGVRMMQAAKEGLIKGTQPGAKVPELIAVTQLTSTSEEEMHHDQLINVPLETSVIHYAKCAEKAGLDGVVCSALEARGIQEATKQTFICLTPGIRPAGSAVGDQQRVVTPQHAREIGSTYIVVGRPITQAENPYEAYQEIKKDWSEK

SEQ ID NO: 16934 - DNA, 714 bp, Fusobacterium nucleatum subsp
  CDS (1)..(714): transl_table=11
atgaaaaaagaagttataatagcacttgattttccaacattagaaaaaactttagaatttttagataaattcaaagaagaaaaattatttgtaaaagttggaatggaattatatttacaaaatggaccaatagtaatagatgaaatcaaaaaaagaggacataaaattttcttagatttaaaattacatgatattccaaatactgtttactctgctgtgaaagggttagctaaatttaatatagatattttaactgtccatgcagctggtggttctgaaatgctaaaaggagctaaaagagctatgacagaagcaggagtaaatacaaaggttattgctataactcaacttacttctacaagtgaagaagatatgagaaaagaacaaaacattcaaacaagcatagaagaatctgttttaaactatgctagacttgcaaaagaaagtggagttgatggagtggtttcttctgttcttgaaacaaagaaaattagagaacaaagtggagaagagtttattataataaacccaggaataagattagcagaagattcaaaaggtgaccaaaaaagagtagctactccaatagatgctaatagagatggagctagttatattgtcgttggtagatcaataactggaaatgaaaatccagaagaaagatatagacttataaaaaatatgtttgaaatgggggataaatatgttgaatag

SEQ ID NO: 16935 - protein, 237 aa, Fusobacterium nucleatum subsp
MKKEVIIALDFPTLEKTLEFLDKFKEEKLFVKVGMELYLQNGPIVIDEIKKRGHKIFLDLKLHDIPNTVYSAVKGLAKFNIDILTVHAAGGSEMLKGAKRAMTEAGVNTKVIAITQLTSTSEEDMRKEQNIQTSIEESVLNYARLAKESGVDGVVSSVLETKKIREQSGEEFIIINPGIRLAEDSKGDQKRVATPIDANRDGASYIVVGRSITGNENPEERYRLIKNMFEMGDKYVE

SEQ ID NO: 16936 - DNA, 714 bp, Gloeobacter violaceus
  CDS (1)..(714): transl_table=11
atgggtggtgccgaacgggtgatcgtggccctcgatctcgcggacgcccaggcggcccgcgccctggtggagcgcgccccggccgtgcgcttctggaaagtcggactggaactattcaccgccgccggtccgggcctgatcgaatggctcaaagcgcgcgggtgccgggtgtttctcgatctcaaatttcacgatattcccaacacggtggccggggcctgccgggcggccacccgcctgggggtggacctgctcaccgtgcatgcgacggggggacaaccgatgctgatggcggcggtctccgcctgcacaggcgaagcggcccgcctcgggagccccgccccggcggtgctggcggtgaccctgctcaccagcctggacgcgcagctgctcgaacagcagctcttggtcaatgtcggggtaagcggctatgtggagcacctcgcggtcctggccgtgtcaagcggtgtgcagggggtggtctgctcgcctctggagacggccctgctgcgcgagcgctgcggaaacgattttctgatcgtcaccccgggcattcgcccgggtgggagcggcgaaggcgaccagcgccgcaccctaacccccggcgaagcgtttgcccggggcgccgactacctggtggtgggccgcccggtgacgaccgcccccgatccccaggtcgcattcaaggccatcgtcgcggaggtcggcggatga

SEQ ID NO: 16937 - protein, 237 aa, Gloeobacter violaceus
MGGAERVIVALDLADAQAARALVERAPAVRFWKVGLELFTAAGPGLIEWLKARGCRVFLDLKFHDIPNTVAGACRAATRLGVDLLTVHATGGQPMLMAAVSACTGEAARLGSPAPAVLAVTLLTSLDAQLLEQQLLVNVGVSGYVEHLAVLAVSSGVQGVVCSPLETALLRERCGNDFLIVTPGIRPGGSGEGDQRRTLTPGEAFARGADYLVVGRPVTTAPDPQVAFKAIVAEVGG

SEQ ID NO: 16938 - DNA, 693 bp, Haemophilus ducreyi
  CDS (1)..(693): transl_table=11
atggacaataaaattattgttgccttagattatgaaactgaaaatgaagcattgaattttatagatcaggttgatccgtcactttgtcgcttgaaagtgggtaaagaaatgtttacaacgttaggtgctcactttgttaaacagcttcacgacagaaaatttgatgtttttcttgatttaaaatatcacgatattccaaatactgtggcaagggctgtgcgttcagccgctgatttaggggtatggatggttgatttacatgcgtcaggtggattaacaatgatggaggaagcaaaaaaaattcttgagccttatggtaaggatgcgcctttattaattgcggtgacggtattaacaagtatggaagatttagatttgttacaaattggtattaatgcttctccgatggaacaggtgattcggttatcccaccttgcaaaacgtgcgggactagatggtgtagtctgttctccacaagaggtagaagtgttaagaacgcattgtggtgatgattttaaacttgtgacaccgggtattcgtccagccggttcagattttggtgatcaacgtcgtgtaatgacacccaaacaggctattcaaacgggggctgattttttagttattggtcgtcctattactcaagcacaagaacctttatccattttaaaagccattaatgcttcaattgcataa

SEQ ID NO: 16939 - protein, 230 aa, Haemophilus ducreyi
MDNKIIVALDYETENEALNFIDQVDPSLCRLKVGKEMFTTLGAHFVKQLHDRKFDVFLDLKYHDIPNTVARAVRSAADLGVWMVDLHASGGLTMMEEAKKILEPYGKDAPLLIAVTVLTSMEDLDLLQIGINASPMEQVIRLSHLAKRAGLDGVVCSPQEVEVLRTHCGDDFKLVTPGIRPAGSDFGDQRRVMTPKQAIQTGADFLVIGRPITQAQEPLSILKAINASIA

SEQ ID NO: 16940 - DNA, 693 bp, Haemophilus influenzae
  CDS (1)..(693): transl_table=11
atgacaagtaaaattattgtggcattggatttcgagaaagaagcagaggctcttgctttagttgatcaaattgatccaagtttgtgtcgattaaaagtgggtaaagaaatgtttactacacttggtattaattttgtaaaacaattacatcaacgtaattttgatgtttttttggatctgaaatatcacgatattccaaatacggtagcaagagcagttcgttctgctgctgatttaggcgtatggatggtggatttacacgcaagtggtggcttgcgtatgatggaagacgcaaagaaaattcttgaaccttatgggaaagatgcgccattgcttattgctgtgacggtattaaccagtatggaagacttggatttattacaaattgggattaatgcatcgccaatggaacaagttttacgcttagctcatttaacccaacgggcaggtttggatggtgtggtttgctctccgcaagaagttgaaattttacgtaatgcttgtggagaagactttaaattagtgaccccagggattcgtccaataggaactgattttggcgatcaacgacgtgtaatgacacctaccgcagcaattcgtgctggttcagattatttagttattggacgcccaataactcaagcggataatcctgcggaggttctccgttctattaatgtatctattgggtaa

SEQ ID NO: 16941 - protein, 230 aa, Haemophilus influenzae
MTSKIIVALDFEKEAEALALVDQIDPSLCRLKVGKEMFTTLGINFVKQLHQRNFDVFLDLKYHDIPNTVARAVRSAADLGVWMVDLHASGGLRMMEDAKKILEPYGKDAPLLIAVTVLTSMEDLDLLQIGINASPMEQVLRLAHLTQRAGLDGVVCSPQEVEILRNACGEDFKLVTPGIRPIGTDFGDQRRVMTPTAAIRAGSDYLVIGRPITQADNPAEVLRSINVSIG

SEQ ID NO: 16942 - DNA, 684 bp, Helicobacter pylori J99
  CDS (1)..(684): transl_table=11
atgcaattatgtgtcgcattagatttagaaaaaaaagaggacaatctttctttattgcaagaattaaagggcttagatttatgggctaaagtggggcttagatcttttataagagacggggcgacttttttagatgaaatcagaaagattgatgggaattttaagatttttttggatttgaagctctatgatattccttataccatggcaaatgccgcgctagaatgcgcgaaattagacattgacatgctcaccgtgcatttaagcagcgctaaaagcgcgctaaccattttaatgcaacgcctgaacgctcttaaaaaacgccccttaatcatgggcgtgagcgctttaacgagctttagcgaagaggaatttttgatggtgtataacgcccctttaaaaactcaagcaatcacattaagcgctataggcaaagagagcgggattgatggggtggtgtgttcggtgtttgaaagtttagcgattaaagaggctttaggtaagggctttttgactttaacccctggcataaggctggataaaaacgataaagaagatcaagaaagggtggcgaacgctaaagaagccaaacaaaatttaagcgattttatcgtggtaggccgccccatttatcaagctaaagagcctagagaagtggttttagagcttttaaaggattgttaa

SEQ ID NO: 16943 - protein, 227 aa, Helicobacter pylori J99
MQLCVALDLEKKEDNLSLLQELKGLDLWAKVGLRSFIRDGATFLDEIRKIDGNFKIFLDLKLYDIPYTMANAALECAKLDIDMLTVHLSSAKSALTILMQRLNALKKRPLIMGVSALTSFSEEEFLMVYNAPLKTQAITLSAIGKESGIDGVVCSVFESLAIKEALGKGFLTLTPGIRLDKNDKEDQERVANAKEAKQNLSDFIVVGRPIYQAKEPREVVLELLKDC

SEQ ID NO: 16944 - DNA, 684 bp, Helicobacter pylori
  CDS (1)..(684): transl_table=11
atgcaattatgtgtcgcattggatttagaaaaaaaagaggacaatctttctttattgcaagaattgaagggcttagatttatgggctaaggtggggcttagatcttttataagagacggggctgtttttttagatgaaatcagaaagattgatgaaaattttaagatttttttggatttgaagctctatgatattccttataccatggcaaatgccgcactagaatgcgcgaaattagacattgacatgctcaccgtgcatttaagcagcgctaaaagcgcgctaacagctttaatgcaacgcctgaacgctcttaaaaaacgccccttgattatgggcgtgagcgctttaaccagctttagcgaagaggaatttttgatggtgtataacgcccctttaaaaactcaagcgattaaattgagtgctatgggtaaagagagcgggattgatggggtggtgtgttcggtgtttgaaagtttagcgattaaagaggctttaggtaaggactttttgactttaacccctggcataaggctggatcaaaatgataaagaggatcaagaaagggtggcgaacgctaaagaagccaaacaaaatttaagcgattttatcgtggtgggccgccccatttatcaagctaaagagcctagagaagtggttttagagcttttaaaggattgttaa

SEQ ID NO: 16945 - protein, 227 aa, Helicobacter pylori
MQLCVALDLEKKEDNLSLLQELKGLDLWAKVGLRSFIRDGAVFLDEIRKIDENFKIFLDLKLYDIPYTMANAALECAKLDIDMLTVHLSSAKSALTALMQRLNALKKRPLIMGVSALTSFSEEEFLMVYNAPLKTQAIKLSAMGKESGIDGVVCSVFESLAIKEALGKDFLTLTPGIRLDQNDKEDQERVANAKEAKQNLSDFIVVGRPIYQAKEPREVVLELLKDC

SEQ ID NO: 16946 - DNA, 714 bp, Lactococcus lactis subsp
  CDS (1)..(714): transl_table=11
atgcaagaaaatagacctgtcattgcccttgatttccctgaattctcagacgtaaaagattttctcgaaaaatttgatccgtcagaacaattgtatattaaactaggaatggaacttttttacacggctggaccccaagtcgtttactatgtaaaatcgctcggccacagtgtattccttgatttaaaactccatgatattccaaacaccgttgaatcctcaatgcatgttttagcacgtttgggagtggatatggttaatgttcacgccgctggtggtgttgaaatgatggtcgcggctaaacgcggtttagaggctggaacgccagttggacggcaaaggccaaaattaattgctgtcacacaattaacctcaacttctgaggaaattatgcaaaatgaccaaaaaattatgactagtcttgaagaatcggttattaattacgcacaaaaaaccgctcaagcaggacttgacggtgtcgtttgttcggcacatgaagttgaaaaaattaaagcagcgacatcgaaagaattcatttgtctcacaccgggaattcgcccagaaggtgcaagtaaaggcgaccaaaaacgagtaatgacacctaaagaagcaagaacaattggttcagattatattgttgtcggccgtccaattacccaagcaaaagatccagtagctagctatcatgcgataaaagcagaatggaatcgataa

SEQ ID NO: 16947 - protein, 237 aa, Lactococcus lactis subsp
MQENRPVIALDFPEFSDVKDFLEKFDPSEQLYIKLGMELFYTAGPQVVYYVKSLGHSVFLDLKLHDIPNTVESSMHVLARLGVDMVNVHAAGGVEMMVAAKRGLEAGTPVGRQRPKLIAVTQLTSTSEEIMQNDQKIMTSLEESVINYAQKTAQAGLDGVVCSAHEVEKIKAATSKEFICLTPGIRPEGASKGDQKRVMTPKEARTIGSDYIVVGRPITQAKDPVASYHAIKAEWNR

SEQ ID NO: 16948 - DNA, 714 bp, Lactococcus lactis subsp
  CDS (1)..(714): transl_table=11
atgcaagaaaatagacctgttattgccctagatttcccagaattctcagatgtgaaagatttccttgaaaaatttgacccatctgaaaaactctacatcaaacttggtatggaacttttttataccgccggcccacaagtagtatattatgtgaaatcgctcggtcatagcgttttccttgatttaaaacttcatgatattccaaatacagttgaatcatccatgcgtgttttagcccgtttgggagttgatatggtcaatgttcacgctgctggcggggttgagatgatggttgcagctaaacgcggtttagaagcagggactccaattggacgtcaaagaccaaaactaattgccgttacgcaattaacctcgacttctgaggaaattatgcaaaatgaccaaaaaattatgaccagtcttgaagaatctgttattaattacgcacaaaaaacagcccaagccggacttgatggtgtcgtttgctccgctcatgaagttgaaaaaattaaagcggcaacatcaaaagaattcatttgtttaacaccgggaattcgtccagaaggagcaagtaaaggcgaccaaaaacgagtaatgacaccaaaagaagcaagaacaattggttcagattacattgttgttggtcgaccaattacacaagcaaaagaccctgtttcagcttatcatgcgataaaggaagaatggaatcaataa

SEQ ID NO: 16949 - protein, 237 aa, Lactococcus lactis subsp
MQENRPVIALDFPEFSDVKDFLEKFDPSEKLYIKLGMELFYTAGPQVVYYVKSLGHSVFLDLKLHDIPNTVESSMRVLARLGVDMVNVHAAGGVEMMVAAKRGLEAGTPIGRQRPKLIAVTQLTSTSEEIMQNDQKIMTSLEESVINYAQKTAQAGLDGVVCSAHEVEKIKAATSKEFICLTPGIRPEGASKGDQKRVMTPKEARTIGSDYIVVGRPITQAKDPVSAYHAIKEEWNQ

SEQ ID NO: 16950 - DNA, 714 bp, Lactobacillus plantarum
  CDS (1)..(714): transl_table=11
atgaagcgaccaattatcattgcgttagattttcccaccgccgaacgggccttagcttttttagaccaatttccggctgatttacatgtcactgtcaaaatcggcatggagttattttatgcagcgggaccgagtattgtgacggacgtgcaagctcgcggccatgcggttttcttagatttgaaactacatgatattcccaataccgtcgaatccgcaatgcgggtgatcgggcggttaggggtaacctatacaacggttcatgctgcgggtgggcacgtgatgctttcagccgccaaacgaggattggtcgcgggtgcaatggccgctggagtcactgcccccaagttattagcgattacgcagttaacttcgactaatcaagctattttgaatcaggaccagcaaatcatgggaacggttcgggcgagtgtcgtgcattatgccaaactagcacgggcgagtgactgtgatggcgtcatttgttccgcccaagaagttcaggcgattcatacggccgtcggtgctgattttctcggaattacgccgggaattcggccagcgtcggcgcagtcagatgaccagcaacgggtgatgacaccggctgccgctgctaaggctgggagcaacggtctcgtcatcgggcggccaattacgcaggctgcagaaccagttcaagcttaccgagatattatgacagaatggagtaactaa

SEQ ID NO: 16951 - protein, 237 aa, Lactobacillus plantarum
MKRPIIIALDFPTAERALAFLDQFPADLHVTVKIGMELFYAAGPSIVTDVQARGHAVFLDLKLHDIPNTVESAMRVIGRLGVTYTTVHAAGGHVMLSAAKRGLVAGAMAAGVTAPKLLAITQLTSTNQAILNQDQQIMGTVRASVVHYAKLARASDCDGVICSAQEVQAIHTAVGADFLGITPGIRPASAQSDDQQRVMTPAAAAKAGSNGLVIGRPITQAAEPVQAYRDIMTEWSN

SEQ ID NO: 16952 - DNA, 702 bp, Listeria innocua
  CDS (1)..(702): transl_table=11
atgaataaaccaattatcgcgctagattttcaaacttaccaagaagtagaggcttttttagcccagttttccggagaatctttatccgtaaaagtcggtatggaacttttttatagtaacggtccagccattgttgaaaaaataaagcaacaaaatcatgctatttttctagatttgaaactccacgatattccaaatacggtcaaaagtgcgatgattggtttggcaaaactaggtgttgatatggtgaatgttcatgcatcaggcggaaagaaaatgatggaagctgctcgtgaaggtcttgaaataggttcaacaagtggcaaacgtccaaaacttatcgcagtgacacaacttactagtacaagtgaaaccgacatgcaaaaggaacaattagtaaaggctagtcttcttgaatcagtgctacattacagtgatttaaccaaacaagcagggctagatggtgttgtctgctcagcactcgaagcagacgaaattaaactacaaaatggttctgactttttacgcgtaacgccaggtattcgattagcaagtgatgcgacagacgatcaaatccgcgtcgtaacacctgaaaaagctcgttcgattggatcatcgaatatcgtcgttggtcgctctatcactcgagcaaacgacccagtagcagcatataatcaagttttgaaggagtggaatgcatga

SEQ ID NO: 16953 - protein, 233 aa, Listeria innocua
MNKPIIALDFQTYQEVEAFLAQFSGESLSVKVGMELFYSNGPAIVEKIKQQNHAIFLDLKLHDIPNTVKSAMIGLAKLGVDMVNVHASGGKKMMEAAREGLEIGSTSGKRPKLIAVTQLTSTSETDMQKEQLVKASLLESVLHYSDLTKQAGLDGVVCSALEADEIKLQNGSDFLRVTPGIRLASDATDDQIRVVTPEKARSIGSSNIVVGRSITRANDPVAAYNQVLKEWNA

SEQ ID NO: 16954 - DNA, 702 bp, Listeria monocytogenes serotype 4b
  CDS (1)..(702): transl_table=11
atgaataaaccaattatcgcgctagatttccagacttacgaagaagtagagacctttttagccaaattttcgggagaaacgctatccgtgaaagtcggcatggaacttttttatagcaacggtccaatcattgttgaaaaaataaagcaacaacatcatgaaatcttcttggatttaaaactgcatgacatcccaaacactgtcaaaagtgcgatgattggcttggcaaaactaggcgtagatatggttaatgtacatgcggctggtgggaagaaaatgatggaagctgccagggaaggtctggaaataggttcttcaagtggcaaacgtccaaaaattattgccgtaactcaactgacaagtacaagtgagacagacatgcaaacagaacaattaataaaaacaagtctacttgaatccgtcatgcattatagcaatttatcgaaacaagctggtttagacggcgtcgtttgctccgcgctagaagcagaagatattaaacaacaaaatggcgctgattttttacgtgtaacaccaggcatccgattagcaagcgacgcagccgacgatcaaattcgtgtcgtaacaccagaaaaagcgcgtttgattggttcgtcaaacattgtcgttggtcgttccatcacgcgcgcaaacgacccggtagaagcgtataatcaagttttaaaggagtggaatgcatga

SEQ ID NO: 16955 - protein, 233 aa, Listeria monocytogenes serotype 4b
MNKPIIALDFQTYEEVETFLAKFSGETLSVKVGMELFYSNGPIIVEKIKQQHHEIFLDLKLHDIPNTVKSAMIGLAKLGVDMVNVHAAGGKKMMEAAREGLEIGSSSGKRPKIIAVTQLTSTSETDMQTEQLIKTSLLESVMHYSNLSKQAGLDGVVCSALEAEDIKQQNGADFLRVTPGIRLASDAADDQIRVVTPEKARLIGSSNIVVGRSITRANDPVEAYNQVLKEWNA

SEQ ID NO: 16956 - DNA, 702 bp, Listeria monocytogenes
  CDS (1)..(702): transl_table=11
atgaataaaccaattatcgcgctagatttccagacttacgaagaagtagagacctttttagccaaattttcaggagaaacgctatccgtgaaagttggcatggaacttttttatagcaacggtccagtcattgttgaaaaaataaagcaacaaaatcatgaaatcttcttagatttaaaactgcatgacatcccgaacactgtcaaaagtgcgatgattggcttggcaaaactaggcgttgatatggttaatgtacacgcggctggtgggaagaaaatgatggaagctgccaaggaaggtctggaaataggttctccaagtggcaaacgtccaaaaattatcgccgtaacacaactgacaagtacaagtgagacagacatgcaaacggaacaattaataaaaacaagtctgcttgaatccgtcatgcattatagcaatttatcgaaacaagctggtttagacggtgtcgtttgctccgcgctagaagcagaagatattaaacaacaaaatggcgctgattttttacgtgtaacaccaggcatccgactggcaagtgacacggcagacgatcaaattcgtgtcgtaacaccagaaaaagcacgtttgattggctcgtcaaacattgtcgttggtcgttccatcacgcgcgcaaacgacccggtagcagcgtataatcaagttttaaaggagtggaatgcatga

SEQ ID NO: 16957 - protein, 233 aa, Listeria monocytogenes
MNKPIIALDFQTYEEVETFLAKFSGETLSVKVGMELFYSNGPVIVEKIKQQNHEIFLDLKLHDIPNTVKSAMIGLAKLGVDMVNVHAAGGKKMMEAAKEGLEIGSPSGKRPKIIAVTQLTSTSETDMQTEQLIKTSLLESVMHYSNLSKQAGLDGVVCSALEAEDIKQQNGADFLRVTPGIRLASDTADDQIRVVTPEKARLIGSSNIVVGRSITRANDPVAAYNQVLKEWNA

SEQ ID NO: 16958 - DNA, 666 bp, Methanosarcina acetivorans
  CDS (1)..(666)
atggaaaggaatacctgtatgatccttgctctggacgtaaccgacagggaagaagcgctgaaaattgcagaagacgtctgggaattcgtggacgcaataaaggtaggctaccctctcatacttgccacagggctcgggattatcagggaacttgccgagttcgctccggtaatagccgatttcaaagttgccgatatccccaacaccaaccgccttatctgcgaccaggtctttgaagccggagccgatgcagtcatcgcacagggctttacaggcagggacagccttgatgcctgcattgaaatcgcttccgaatacagaaaggacgtcttcgttgtgagcgaaatgagccaccccggcggtgccgatttcatgcagccggttgcagaagcaattgcaaaaatggcgcttgaagcaggagctttcgggcttgtcgcccctgctacccgtcccaaaagagtgaagaaaatcaggagaatcatcggggacaaactcacaatcatctcccccggtgtgggtgcccagggcggaaaagcctcggacgttattgctgccggcgcagactgggtgatagtgggtaggagcatctacaaggcagaatccccaaaagaagctgccaggcagattgccgaggaaattcaggctgagctccggggagaatactga

SEQ ID NO: 16959 - protein, 221 aa, Methanosarcina acetivorans
MERNTCMILALDVTDREEALKIAEDVWEFVDAIKVGYPLILATGLGIIRELAEFAPVIADFKVADIPNTNRLICDQVFEAGADAVIAQGFTGRDSLDACIEIASEYRKDVFVVSEMSHPGGADFMQPVAEAIAKMALEAGAFGLVAPATRPKRVKKIRRIIGDKLTIISPGVGAQGGKASDVIAAGADWVIVGRSIYKAESPKEAARQIAEEIQAELRGEY

SEQ ID NO: 16960 - DNA, 642 bp, Methanococcus jannaschii
  CDS (1)..(642)
atgccaaagttaatgttagctcttgacgttttggatagagatagagctttaaaaatagtagaagatgttaaagattacgttgatgctataaaagttggatatcctttagttttatctactgggacagaaattataaaagaaataaaaaaactttgtaataaagaggttatagctgattttaaggttgcagacatcccagcaacaaatgagaagatagcaaaaataacattaaaatatgctgatggaataatagttcatggttttgttggagaggattcagttaaagcagtgcaagatgttgctaaaaagctaaacaaaaaggtaataatggttactgaaatgagccatccaggggctgttcaatttctacagccaatagcagataaattgtcagagatggctaaaaaactaaaagttgatgctatagttgctccatcaacaaggcctgaaaggcttaaagaaattaaagaaattgcagaattgccagtaataacaccaggagtcggagctcagggagggaagattgaggatattttaaatattttagatgagaatgattacgtcattgttggaagggcaatctatcaatcacaaaatcctaaagaagaggctaaaaaatataaagaaatgctaaataagtga

SEQ ID NO: 16961 - protein, 213 aa, Methanococcus jannaschii
MPKLMLALDVLDRDRALKIVEDVKDYVDAIKVGYPLVLSTGTEIIKEIKKLCNKEVIADFKVADIPATNEKIAKITLKYADGIIVHGFVGEDSVKAVQDVAKKLNKKVIMVTEMSHPGAVQFLQPIADKLSEMAKKLKVDAIVAPSTRPERLKEIKEIAELPVITPGVGAQGGKIEDILNILDENDYVIVGRAIYQSQNPKEEAKKYKEMLNK

SEQ ID NO: 16962 - DNA, 663 bp, Methanosarcina mazei
  CDS (1)..(663): transl_table=11
atggaacgaaatacatgtatgatccttgcccttgatgtgactgagagggaagaagcgctgaagattgcagaaaatgtccgggaatttgtggatgcaataaaagtgggataccctctaattcttgccaccgggcttgatattattagagagcttgccagatttgccccggtcatagctgacttcaaggttgcagatatccctaacaccaaccgtcttatctgcgaacaggtctttaaagccggagccgatgcggtcattgtgcagggctttactggcagggacagccttgatgcctgcattgaagttgcttccaaatacggaaaagatgtttttgttgtaagcgaaatgagccacccgggaggagccgagttcctgcagtcagcagcagaagcgattgcaaaaatggcagttgaagccggagctttcgggcttgttgctccagccacacgtccggaaagggtaaaagagataagaaaaattatcggagacaggcttaccattatctctccgggtgtgggtgcccagggaggaaaagcctctgacgttatctctgcaggggcagactgggtgattgtaggaagaagcatttacaaggcggaatctccaaaagaggctgcctgcgagattgctgaagaaattcaggctgagctccgcggaaagtaa

SEQ ID NO: 16963 - protein, 220 aa, Methanosarcina mazei
MERNTCMILALDVTEREEALKIAENVREFVDAIKVGYPLILATGLDIIRELARFAPVIADFKVADIPNTNRLICEQVFKAGADAVIVQGFTGRDSLDACIEVASKYGKDVFVVSEMSHPGGAEFLQSAAEAIAKMAVEAGAFGLVAPATRPERVKEIRKIIGDRLTIISPGVGAQGGKASDVISAGADWVIVGRSIYKAESPKEAACEIAEEIQAELRGK

SEQ ID NO: 16964 - DNA, 666 bp, Methanosarcina thermophila
  CDS (1)..(666)
atggaaaagaatacctgtatgatccttgccctggacgtaaccgacagggacgaagcgctgaagattgcagaagacgtctgggaattcgtggacgcaataaaggtaggctaccctctcatacttaccactgggcttgggatcatcagggaacttgccgagttcgccccggtaatagccgatttcaaggttgccgatattcccaacaccaaccgccttatctgcgatcaggtctttgaagccggagctgatgcggtcatcgttcagggctttacaggcagagacagccttgatgcctgcattgaaattgcttccgaatacagaaaggacgtcttcgttgtaagcgaaatgagccaccctgggggagccgagttcctgcagccagccgcagaatcaattgcaaagatggcccttgaagcgggagctttcgggcttgtcgccccggccacccgtcccgaaagagtgaggaaaatcaggaggatcatcggggacaaactcaccattatatctcccggagtaggtgcccagggaggaaaagcctcggacgtgattgctgcagggacagactgggtaatcgtgggaaggagcatctacaaagcagagtctcctaaagaagctgcacgtgagattgctgaggaaattcaggctgagctcagaggagagtactga

SEQ ID NO: 16965 - protein, 221 aa, Methanosarcina thermophila
MEKNTCMILALDVTDRDEALKIAEDVWEFVDAIKVGYPLILTTGLGIIRELAEFAPVIADFKVADIPNTNRLICDQVFEAGADAVIVQGFTGRDSLDACIEIASEYRKDVFVVSEMSHPGGAEFLQPAAESIAKMALEAGAFGLVAPATRPERVRKIRRIIGDKLTIISPGVGAQGGKASDVIAAGTDWVIVGRSIYKAESPKEAAREIAEEIQAELRGEY

SEQ ID NO: 16966 - DNA, 687 bp, Methanobacterium thermoautotrophicum
  CDS (1)..(687): transl_table=11
ttgagatcccggagagttgatgttatggacgttatgaacagacttatacttgcaatggacctcatgaaccgggatgatgccctcagggtcaccggagaggtcagggaatacatagacacggtcaagatagggtacccccttgtactctcagagggtatggatatcattgctgagttcagaaagagatttggctgcagaatcatagccgacttcaaggttgcagatatacccgagaccaatgaaaagatatgccgggccaccttcaaggcgggggctgatgccataatagtccacggattccggggagcagacagtgtcagggcctgcctcaatgtcgcagaggaaatgggacgtgaggtcttcctcctgacagagatgtcacacccaggggcagagatgttcatacagggcgctgcagatgaaatagccagaatgggggtcgatcttggtgtcaaaaattatgttggcccatccacaagacctgaaaggctttcaaggctgagggaaatcataggtcaggattcatttctcatatcccccggtgtgggagcccagggaggagacccaggggagaccctcaggttcgcagatgccataatagttggaagatccatctaccttgcagataaccctgcagctgcagcagcagggataatagaatccattaaagaccttctgaatccctga

SEQ ID NO: 16967 - protein, 228 aa, Methanobacterium thermoautotrophicum
MRSRRVDVMDVMNRLILAMDLMNRDDALRVTGEVREYIDTVKIGYPLVLSEGMDIIAEFRKRFGCRIIADFKVADIPETNEKICRATFKAGADAIIVHGFRGADSVRACLNVAEEMGREVFLLTEMSHPGAEMFIQGAADEIARMGVDLGVKNYVGPSTRPERLSRLREIIGQDSFLISPGVGAQGGDPGETLRFADAIIVGRSIYLADNPAAAAAGIIESIKDLLNP

SEQ ID NO: 16968 - DNA, 696 bp, Mycoplasma penetrans
  CDS (1)..(696): transl_table=4
atgagtaatagagaagttattattgctttagattttgatagtttagataaaacttgtaaattcttaaatttatttgagaatcaaaatttatttgtaaaaataggaatggaattgttttatcaaaatggtttacaagtattacatgaaatcaaaaatagaggtcataaaatctttttagatttaaaactacatgatattccaaatactgtttatcatgcagttaaaggactaatgaaatttgatgttgatattataactgttcactgtgcaggtggtcttacaatgttaaaccaagcaaagcaagcagtttttgatcaaaacaaaaatactaaaataattggaataactcaactaacttctacaagtgaaacagaaatgcaaactcagcaaaagatttcaacttcattacaagattcagttttaaattatgcgaaattagctaaagaagcaaatatagatggggttgtaagttcagtatgagaaactaaaaaaattaaagaacaaaatggtaataattttttagttatcaatcccggaataaggttagaaaaagatgatagtggagatcaaaaaagagtagcaagtccactagatgctaaaaatcaattagctgattttatagtggttggtagaccaattacaaaagataacaacccattagaaaaatatttagaaattaaaagaatgtttgtttag

SEQ ID NO: 16969 - protein, 231 aa, Mycoplasma penetrans
MSNREVIIALDFDSLDKTCKFLNLFENQNLFVKIGMELFYQNGLQVLHEIKNRGHKIFLDLKLHDIPNTVYHAVKGLMKFDVDIITVHCAGGLTMLNQAKQAVFDQNKNTKIIGITQLTSTSETEMQTQQKISTSLQDSVLNYAKLAKEANIDGVVSSVWETKKIKEQNGNNFLVINPGIRLEKDDSGDQKRVASPLDAKNQLADFIVVGRPITKDNNPLEKYLEIKRMFV

SEQ ID NO: 16970 - DNA, 741 bp, Neisseria meningitidis serogroup A
  CDS (1)..(741): transl_table=11
atgaatcctttaatctccgacttccaaactccgcaacaacgcacccccgttatcgtcgcccttgatttttccaacgaaaaagacacgctcggattcgtccgcaaccttgacccgacattgtgtcaaatcaaaatcggcaaagagctgtttaccgcgacgggacgcaatttggcagaaagcttaatcaatcaaggtttcaaacttttcctcgatttgaaataccacgatattccccacaccgtcgcgcaagcctgcaaagtcgctgccgatatgggcgtttggatggtcgatatgcacgcatcgggcggccgccgtatgatggaagccgcagcagaagccgttgccggatacggcacgaagccgctcttaatcggcgtaaccgtgttgaccagcatggaacaaagcgatttggcggaaatcggtttgaacaccgcccctgaagaacaagtcatccgcttggcgaaactggcgcaaagttcgggcttggacggcgtggtctgttccgcccaagaagccgcgccgctgcgccgcgaattgggacaggattttgtcttggtcacgcccggcatccgcttggacgttgccgacaataatgatgaccagcgccgcatcatgacaccggccgaagccttggctgccggttcgacttatttggtaatgggtcgtcctgtaacccaagctgccgatccggtagccgtattgcgcgaagtgaaccgcgtggcaaaccttgaagcaaactga

SEQ ID NO: 16971 - protein, 246 aa, Neisseria meningitidis serogroup A
MNPLISDFQTPQQRTPVIVALDFSNEKDTLGFVRNLDPTLCQIKIGKELFTATGRNLAESLINQGFKLFLDLKYHDIPHTVAQACKVAADMGVWMVDMHASGGRRMMEAAAEAVAGYGTKPLLIGVTVLTSMEQSDLAEIGLNTAPEEQVIRLAKLAQSSGLDGVVCSAQEAAPLRRELGQDFVLVTPGIRLDVADNNDDQRRIMTPAEALAAGSTYLVMGRPVTQAADPVAVLREVNRVANLEAN

SEQ ID NO: 16972 - DNA, 741 bp, Neisseria meningitidis serogroup B
  CDS (1)..(741): transl_table=11
atgaatcctttaatctccgacttccaaactccgcaacaacgcacccccgttatcgtcgcccttgatttttccaacgaaaaagacacgctcggattcgtccgcaaccttgacccgacattgtgtcaaatcaaaatcggcaaagagctgtttaccgcgacgggacgcaatttggcagaaagcttaatcaatcaaggtttcaaacttttcctcgatttgaaataccacgatattccccacaccgtcgcgcaagcctgcaaagtcgctgccgatatgggcgtttggatggtcgatatgcacgcatcgggcggccgccgtatgatggaagccgcagcagaagccgttgccggatacggcacgaagccgctcttaatcggcgtaaccgtgttgaccagcatggaacaaagtgatttggcggaaatcggtttgaacaccgcccctgaagaacaagtcatccgcttggcaaaactggcgcaaagttcgggcttggacggcgtggtctgttccgcccaagaagccgcgccgctgcgccgcgaattgggacaggattttgtcttggtcacgcccggcatccgcttggacgttgccggcaataatgatgaccagcgccgcatcatgacaccggccgaagccttggctgccggttcgacttatttggtaatgggtcgtcctgtaacccaagctgccgatccggtagccgtattgcgcgaagtgaaccgcgtggcaaaccttgaagcaaactga

SEQ ID NO: 16973 - protein, 246 aa, Neisseria meningitidis serogroup B
MNPLISDFQTPQQRTPVIVALDFSNEKDTLGFVRNLDPTLCQIKIGKELFTATGRNLAESLINQGFKLFLDLKYHDIPHTVAQACKVAADMGVWMVDMHASGGRRMMEAAAEAVAGYGTKPLLIGVTVLTSMEQSDLAEIGLNTAPEEQVIRLAKLAQSSGLDGVVCSAQEAAPLRRELGQDFVLVTPGIRLDVAGNNDDQRRIMTPAEALAAGSTYLVMGRPVTQAADPVAVLREVNRVANLEAN

SEQ ID NO: 16974 - DNA, 696 bp, Nitrosomonas europaea
  CDS (1)..(696): transl_table=11
atgaatgacccgcgtatcatcgtcgcactggattttcccgatcagtgtacagcattgaattttgctgccgggctggatagtacgctttgccgggtcaaggtcgggaaagagctgtttactctggcgggtccgcaattggtcgagaaattgatgaaactgggtttcgatgtatttctcgatctgaaattccatgatattcccaatacggttgctgcagcttgcagtgctgcatcaagccttggtgtatggatggtcaatgtacacgcgctgggagggagtaaaatgctgcttgcagcccgacaggccctggatgggaaaagaaccagactcattgccgttaccctgctcaccagcctgaatcagaatgatttgagtgagttgggtatagctgatacaccggaaacaatggtgcagcgactggctttgcttgcccagcgttgtggcctggacggtgtggtttgttcagcgctggaagcggtgagtctgagagaagtgactggtgaggatttttgtctggtcactccgggtatccgatcattcggtgacggtaacgatgatcaggcgaggattgcaacaccggcaatggcaatacgtagtggggccagctatcttgtgatcggcagacccatcacccgatcaccggatccgctcggagcactccgtcgattcaatgacgaggtcgcttcagttttatga

SEQ ID NO: 16975 - protein, 231 aa, Nitrosomonas europaea
MNDPRIIVALDFPDQCTALNFAAGLDSTLCRVKVGKELFTLAGPQLVEKLMKLGFDVFLDLKFHDIPNTVAAACSAASSLGVWMVNVHALGGSKMLLAARQALDGKRTRLIAVTLLTSLNQNDLSELGIADTPETMVQRLALLAQRCGLDGVVCSALEAVSLREVTGEDFCLVTPGIRSFGDGNDDQARIATPAMAIRSGASYLVIGRPITRSPDPLGALRRFNDEVASVL

SEQ ID NO: 16976 - DNA, 696 bp, Oceanobacillus iheyensis
  CDS (1)..(696): transl_table=11
atgaccatgtttgtagcactagattttcctgattggaaacaaacagaggcatttctatataaaaatgaattgcaaggtgttcctgttaaagttggtatggaactgttttataaagagggccctagcgtaattgagaaattaaaaaggaataatcactctatttttttagatcttaaattacatgacataccaaatacagtccatcgagcaatgaaaaatattgcttccttaggggtcgatttagttacaatacatacacttggcggaagtgaaatgattgctcaggcgaagcgtggacttgaacattcacaaacaaaactgattgcagtaaccctgttaacatcggtagatgaagaagtagttcaacatcaattacgtttacctggaaatattccagcaaatgttgctcatttagcgagcttagcaaaagctaatggagcggatggagtcgttagctctgtacatgaagtagcttctatcaaaaaaacttgtgatacatctttcttaacgttaaccccaggaatacgatttgatagttcggatgttcatgatcaaaaacgtgttgcgacaccagaaatggcaaatcaagttggaagtgactttatcgtagtaggtagagcgattacgcaatctgatcatccttatacagcatatatggaagcaaagaaacgatgggaggaagcttcggatgaataa

SEQ ID NO: 16977 - protein, 231 aa, Oceanobacillus iheyensis
MTMFVALDFPDWKQTEAFLYKNELQGVPVKVGMELFYKEGPSVIEKLKRNNHSIFLDLKLHDIPNTVHRAMKNIASLGVDLVTIHTLGGSEMIAQAKRGLEHSQTKLIAVTLLTSVDEEVVQHQLRLPGNIPANVAHLASLAKANGADGVVSSVHEVASIKKTCDTSFLTLTPGIRFDSSDVHDQKRVATPEMANQVGSDFIVVGRAITQSDHPYTAYMEAKKRWEEASDE

SEQ ID NO: 16978 - DNA, 702 bp, Pasteurella multocida
  CDS (1)..(702): transl_table=11
atgacgagtaaaatcattgttgcactagattatgaaaaagaagaagaggcattgtgtttagttgatcaaattgatccgagcttatgtcgtttgaaagtcggtaaagaaatgtttactacattagggacgaaatttgtcaaagcattacatgatcgcaactttgatgtgtttttagatttaaaatttcatgatattccaaatactgtagcaagagcggtgcgttctgcggcagatttaggggtttggatggttgatttacatgccagcggtggtttgcgtatgatggaggaggcgaagaaaattcttgaaccttatggtaaagacgcgcctcttttaattagtgtgacggtattaaccagtatggaagatctagatttattgcaaattggcattaatgcttctccgatggaacaagtaatccgtttagccaatctaacacagcgtgctggattagatggcgtagtttgttctccgcaagaagtggaaattttacgcgctaactgtggtaaagattttaaactgattacgccgggaattcgcccaatcggcagtgattttggtgatcagcgtcgcgtaatgacaccagcgggggcaattcaagcaggttctgactatttagtaattggtcgtccaattacacaagcagataacccagcagaagtgctcaaatcaatcaatgcttctttacctgtgaatagataa

SEQ ID NO: 16979 - protein, 233 aa, Pasteurella multocida
MTSKIIVALDYEKEEEALCLVDQIDPSLCRLKVGKEMFTTLGTKFVKALHDRNFDVFLDLKFHDIPNTVARAVRSAADLGVWMVDLHASGGLRMMEEAKKILEPYGKDAPLLISVTVLTSMEDLDLLQIGINASPMEQVIRLANLTQRAGLDGVVCSPQEVEILRANCGKDFKLITPGIRPIGSDFGDQRRVMTPAGAIQAGSDYLVIGRPITQADNPAEVLKSINASLPVNR

SEQ ID NO: 16980 - DNA, 747 bp, Photorhabdus luminescens subsp
  CDS (1)..(747): transl_table=11
atgacatctcataccttaacatcgttcggtagacagattagctcgcctgtcattgttgctttagattacgacaatcaggatacggcgctggcttttgccgataaaattgatccacaggattgccgtctgaaagtaggtaaagagatgtttaccttacatggtccgcagtttgttaagttgctgcaccaacgtggttttgaagtatttctagatttgaaattccatgatattcctaataccaccgccagagcggtagctgccgctgctgagatgggggtttggatggtaaacgtacatgctagtggcggcaccagaatgatgacagcggcgaaagaggcgctgctgccttatggtcatgatgctccattgttaattgctgtcacggtattaaccagcatggaacaatcggatctgcaaggtattgggattgatatgacaccagcgcaacaggctgaaaggttggcaaaactgactcaggcatgtgggctggatggtgtggtttgttctgcacatgaagctcagcaactgaaaaaggtttgtggtcagcattttcaattagttactcccggaattcgcccgacgggcagtgatgtgggtgatcagcgccgtatcatgacgccagaacaggcggtattggctggcgttgattatatggtcattggccgtccgattacccgtgccgccgatcctgcggccgcattgcgtcaaattaatcaatctattgcgggagtgattaatgcaagataa

SEQ ID NO: 16981 - protein, 248 aa, Photorhabdus luminescens subsp
MTSHTLTSFGRQISSPVIVALDYDNQDTALAFADKIDPQDCRLKVGKEMFTLHGPQFVKLLHQRGFEVFLDLKFHDIPNTTARAVAAAAEMGVWMVNVHASGGTRMMTAAKEALLPYGHDAPLLIAVTVLTSMEQSDLQGIGIDMTPAQQAERLAKLTQACGLDGVVCSAHEAQQLKKVCGQHFQLVTPGIRPTGSDVGDQRRIMTPEQAVLAGVDYMVIGRPITRAADPAAALRQINQSIAGVINAR

SEQ ID NO: 16982 - DNA, 723 bp, Prochlorococcus marinus
  CDS (1)..(723): transl_table=11
atgactctttcttttaagcctgaagataaattaattcttgctcttgatggcatgagtggagctgaagtgtttatgttgatagaaaaattacctaatttgatttgggtcaaagtaggtttggaattgtttactttgctaggccctcaaatcattaatcagcttagagatcgaggaaagaaggtttttttagatcttaaatttcatgatattcctactactatgggacgtgcttgttatcaagctgcaaagactggtgcggaattgatcacagttcatgcatgtgcagggaaaaaaggtattgaagaggctaataaatccgcagttaaaggagctaaagaagtaggtttgcctccccctagtcttttggcggttactgttttaacaagttggggatcaaaagattttgttcaagagcttgggatccaacaatctttggatcaaagagtctctttgttagcgaatttagcttcttcagcaggtattcaaggttgcatatgttcccctttagaagtaatgaaactgcgaaaagattttcccgaaccttttcaattaattactccgggcattcgttcttgcggagagaatattaatgatcagaataggattatgactcctttagaggcaattgatgcaggctcctctaagttagttataggtagagaagttactagttcagaaaacccttcagatgcttttaatagaatttgttctcaattaatttga

SEQ ID NO: 16983 - protein, 240 aa, Prochlorococcus marinus
MTLSFKPEDKLILALDGMSGAEVFMLIEKLPNLIWVKVGLELFTLLGPQIINQLRDRGKKVFLDLKFHDIPTTMGRACYQAAKTGAELITVHACAGKKGIEEANKSAVKGAKEVGLPPPSLLAVTVLTSWGSKDFVQELGIQQSLDQRVSLLANLASSAGIQGCICSPLEVMKLRKDFPEPFQLITPGIRSCGENINDQNRIMTPLEAIDAGSSKLVIGREVTSSENPSDAFNRICSQLI

SEQ ID NO: 16984 - DNA, 738 bp, Prochlorococcus marinus
  CDS (1)..(738): transl_table=11
atgacctcgccattgactcctgccgatcaactgatcattgctcttgatggcatggagcgggctgaggcccttgcattcatctcaaagttgccagaggtcagttgggtcaaggtgggactggaactgtttgttagtgcggggccagaggttttggctgatctacgggagcaagggttgcagatttttcttgatctaaagtttcacgatatccctgccaccattgcaggagcttgtcgccgagcggcgagctttggcgctgagttgatcacggtgcatgcctgtgctggccgtgctgctcttgctgaagctcaggctgctgcttgcgagggggctgcggaggttggcttgtcagcaccccggctgttggccgttactgtgctcaccagttgggatcagaagcgtctagcgaatgagctgtgcattcctcagtctcttcaggccagggtggagtggttggctgagttggcagcggagtcagggttgggcggctgcgtgtgttctccctgggaggtcagcggcttacgccgacttcatccctcgccatttgagttggtgactcctggtattcgcccctcgggggctgaattggcggatcaggtcagggtcatgagtcctgcagcggcgttgaatgcaggagcttcacgtttggtgattggcaggccgattacccgtgctgttgatccggcagaagcgtttgcacgctgctgccttgagattgaacagcgtcagctggactga

SEQ ID NO: 16985 - protein, 245 aa, Prochlorococcus marinus
MTSPLTPADQLIIALDGMERAEALAFISKLPEVSWVKVGLELFVSAGPEVLADLREQGLQIFLDLKFHDIPATIAGACRRAASFGAELITVHACAGRAALAEAQAAACEGAAEVGLSAPRLLAVTVLTSWDQKRLANELCIPQSLQARVEWLAELAAESGLGGCVCSPWEVSGLRRLHPSPFELVTPGIRPSGAELADQVRVMSPAAALNAGASRLVIGRPITRAVDPAEAFARCCLEIEQRQLD

SEQ ID NO: 16986 - DNA, 720 bp, Prochlorococcus marinus subsp
  CDS (1)..(720): transl_table=11
atgaaaaaatttaatacagaagaaaaaataatattagctattgatggattagatatatttcaagcaaaagtattgctagaaagatgtcccaatattaaatgggtaaaagttggcttagaactttttacgagggagggacctagtgtaataaaaattttgaaaaatttaaataaaaaaatattcttagatcttaaatttcacgatattcctaatactatgagcgctgcttgttatgaggtgtccaaactcggagttgatattatttctgttcatgcttcagcaggttctaaagctcttactgcatcaaaaaaagcatctttagaaggagcaaaaatagctactgtaaatgctccttgtgttatagggataactgttttaactagcttatctagtgaagaattccaaactgatcttgatagaaaaaactcgattgaggaaaatgttatcagacttgcaaaattgtctttcgatgctggattagatggatgcgtttgttctcctttggaggcaaaaatattgagatcaatgtataaaaataatttcgaattaataacacctggtattaggacaaatattcaaaaaaaagatgatcaaaatagaataatgactccttttgaagcaataagtaatggatcttctaaattggttattggaagagctattacaaaagcaaaagatcccaataaggcttttttggatatctgcgagtctatttgttaa

SEQ ID NO: 16987 - protein, 239 aa, Prochlorococcus marinus subsp
MKKFNTEEKIILAIDGLDIFQAKVLLERCPNIKWVKVGLELFTREGPSVIKILKNLNKKIFLDLKFHDIPNTMSAACYEVSKLGVDIISVHASAGSKALTASKKASLEGAKIATVNAPCVIGITVLTSLSSEEFQTDLDRKNSIEENVIRLAKLSFDAGLDGCVCSPLEAKILRSMYKNNFELITPGIRTNIQKKDDQNRIMTPFEAISNGSSKLVIGRAITKAKDPNKAFLDICESIC

SEQ ID NO: 16988 - DNA, 699 bp, Pseudomonas aeruginosa
  CDS (1)..(699): transl_table=11
atgtccgcctgccagtcccccatcatcgtcgccctggatttccccacccgtgaggccgccctggcgctggccgatcagctggacccgaaactgtgccgggtgaaggtcggcaaggaactcttcaccagttgtgccgcgggtatagtcgagaccttgcgtggcaagggcttcgaggtgttcctcgacctgaaattccacgacatcccgaacaccacggcgatggcggtgaaggccgccgccgagatgggcgtgtggatggtcaacgtgcactgctccggcggcctgcgcatgatggccgcctgccgcgagacgctggaggccttcagcgggcccaggccgttgctcatcggcgtgaccgtgctgaccagcatggagcgcgaggacctggcgggcatcggcctcgacatcgagccccaggagcaggtgttgcgcctcgccgccctggcgcagaaggccggcatggacggcctggtctgctcggcccaggaagcgccggcgctgaaggccgcccatccgggcctgcaactggtcacgccgggcatccgcccggccggcagcgcccaggacgaccagcggcgcatcctcaccccgcgccaggccctggacgccggctccgattacctggtgatcggccggccgatcagccaggccgccgacccggccaaggcgctggcggcgatcgtcgccgaactgggctga

SEQ ID NO: 16989 - protein, 232 aa, Pseudomonas aeruginosa
MSACQSPIIVALDFPTREAALALADQLDPKLCRVKVGKELFTSCAAGIVETLRGKGFEVFLDLKFHDIPNTTAMAVKAAAEMGVWMVNVHCSGGLRMMAACRETLEAFSGPRPLLIGVTVLTSMEREDLAGIGLDIEPQEQVLRLAALAQKAGMDGLVCSAQEAPALKAAHPGLQLVTPGIRPAGSAQDDQRRILTPRQALDAGSDYLVIGRPISQAADPAKALAAIVAELG

SEQ ID NO: 16990 - DNA, 702 bp, Pseudomonas putida
  CDS (1)..(702): transl_table=11
atgtccgcctgccagacgcccctgatcgtcgccctggatttccctacccgtgaggccgccctgaagctggctgaccagcttgaccctgcgctgtgccgggtgaaggttggcaaggagctgttcaccagcagcgcttcgggcattgtcgaaaccctgtgtgacaagggcttcgaagtgttcctggacctcaagttccacgacattcccaacaccaccgccatggcggtaaaggctgccgccgagatgggcgtgtggatggtcaacgtgcattgctccgggggcctgcgcatgatggcggcctgccgtgaagagctggccaagcgcagcggcccgcagccgttgctgattggcgtgaccgtgctgaccagcatggagcgtgaagacctggccggcattggcctggatgtcgacccccaagagcaagtgctgcgtttggcggcgctggcggaaaaagcgggtatggacggtttggtgtgctcggcgctcgaggccccggcactgaaggcggcgcacccctcgctgcaattggtgaccccgggcattcgcccggcgggcagcgcgcaggatgaccagcgccgtatcctcaccccacgccaggcactggatgccggttcggactacctggtaatcggccggccgatcagccaggctgcagaccctgcgcaagcgttggcagcggtggtggcggagatccgtgggtaa

SEQ ID NO: 16991 - protein, 233 aa, Pseudomonas putida
MSACQTPLIVALDFPTREAALKLADQLDPALCRVKVGKELFTSSASGIVETLCDKGFEVFLDLKFHDIPNTTAMAVKAAAEMGVWMVNVHCSGGLRMMAACREELAKRSGPQPLLIGVTVLTSMEREDLAGIGLDVDPQEQVLRLAALAEKAGMDGLVCSALEAPALKAAHPSLQLVTPGIRPAGSAQDDQRRILTPRQALDAGSDYLVIGRPISQAADPAQALAAVVAEIRG

SEQ ID NO: 16992 - DNA, 627 bp, Pyrococcus abyssi
  CDS (1)..(627): transl_table=11
gtgatagttctagctttggacgtttacgatgaggatagagctttgaagatagccgaggagacgaaggattacgttgcaatgattaaggtcaactggccactaataattgggagtggattggatataataaggaagctcaaagataggactggactaaagattatagccgatttgaagttagccgatataccgaatactaataagctcatagctaggaaagtttacgaagcgggtgccgattacataatagttcatccattcgtgggaagggacagcgttgaggcggttaatgagctcggggagataatcttagttgttgagatgagccatcccggggctttggagttcataaacccactaacggataagttcatagagctcgccaacgatgttgagccatttggggttatagctccaggaactaggcctgagagggttaaatatatccgagagaggcttaaggagggcgtgaagatacttactcctgggataggggcccagggaggaaaggctaaggaagcgatagaggctggggcagattacgtaatcgttggaaggtcaatttacaacgctccaaatcctagagaagctgcaagggaaatatacgatgaaataaggggtgagtga

SEQ ID NO: 16993 - protein, 208 aa, Pyrococcus abyssi
MIVLALDVYDEDRALKIAEETKDYVAMIKVNWPLIIGSGLDIIRKLKDRTGLKIIADLKLADIPNTNKLIARKVYEAGADYIIVHPFVGRDSVEAVNELGEIILVVEMSHPGALEFINPLTDKFIELANDVEPFGVIAPGTRPERVKYIRERLKEGVKILTPGIGAQGGKAKEAIEAGADYVIVGRSIYNAPNPREAAREIYDEIRGE

SEQ ID NO: 16994 - DNA, 636 bp, Pyrococcus furiosus
  CDS (1)..(636): transl_table=11
atgattgtactagcgttggacgtgtatgagagagaaaaggccttaagcatagcggaagatgttaaagattacatttcaatgataaaggtgaactggcccctgataattggaagtggtcttggagttatttcagagctaaagaagaaaacaggcctcccgataatagcggatctaaagctggcagacatcccaaacacaaataggttgatagcaaagaaagtttatgatgctggggcggattatataatactccattcctttgtagggagggacagcgtaaaggcagtgaaggagctaggagaaattataatgatagttgagatgagccatcctggggccttagaattcataaacccactcaccgacaagttcatagacatggccaatgaaataaagcctttcggcgtcatagcgccaggaaccaggccagagagaattagatacattagagagaggctgagtaaagacataaaagtgcttaccccaggaattggagcccaaggaggatcgccagtggaggcgttgaaagctggagcagattacatcatcattggaagggccatatacaatgctgaaaggcccagggaagccgctaagaagattttcgaggaggtgaaagaatggagctcaagataa

SEQ ID NO: 16995 - protein, 211 aa, Pyrococcus furiosus
MIVLALDVYEREKALSIAEDVKDYISMIKVNWPLIIGSGLGVISELKKKTGLPIIADLKLADIPNTNRLIAKKVYDAGADYIILHSFVGRDSVKAVKELGEIIMIVEMSHPGALEFINPLTDKFIDMANEIKPFGVIAPGTRPERIRYIRERLSKDIKVLTPGIGAQGGSPVEALKAGADYIIIGRAIYNAERPREAAKKIFEEVKEWSSR

SEQ ID NO: 16996 - DNA, 627 bp, Pyrococcus horikoshii
  CDS (1)..(627)
atgatagttttggccttagatgtttatgaaggagaaagggccattaaaatagctaaaagtgttaaggattacatttcgatgataaaggttaactggccactcattcttggaagtggagtggatataataagaagacttaaggaggagacaggagttgagataatagctgatcttaagcttgctgacataccgaatactaataggttgatagcaagaaaggtctttggggctggagcggactatgtaatagtgcataccttcgttggtagggatagcgtaatggcagtgaaggagcttggggaaataataatggtggttgaaatgagccatcctggagcactcgagttcattaatcctttaacagatagattcatagaagtcgcaaatgaaattgagccttttggggttatagctcctgggacaaggcctgagagaattggatacattagggatagattgaaggaagggataaagattctcgcccctgggataggggcccagggtggtaaagctaaggatgctgttaaagctggagcggattatataatagtgggaagggcaatatataacgctccaaatccaagagaagcagcaaaagcgatatacgatgaaataagaggtgtttag

SEQ ID NO: 16997 - protein, 208 aa, Pyrococcus horikoshii
MIVLALDVYEGERAIKIAKSVKDYISMIKVNWPLILGSGVDIIRRLKEETGVEIIADLKLADIPNTNRLIARKVFGAGADYVIVHTFVGRDSVMAVKELGEIIMVVEMSHPGALEFINPLTDRFIEVANEIEPFGVIAPGTRPERIGYIRDRLKEGIKILAPGIGAQGGKAKDAVKAGADYIIVGRAIYNAPNPREAAKAIYDEIRGV

SEQ ID NO: 16998 - DNA, 642 bp, Pyrococcus kodakaraensis
  CDS (1)..(642): transl_table=11
atggaggagagcaggctcattctggcgctcgacgtttatgatagggagagggcacttgagatagcggagtgcacagcagattacctctgggcaattaaggtaaactggcccctcatcatcggttccggattgaagataatcaccgagctcaagcaggtcacagggcttccgataatagccgacctcaaactcgctgatatccccaacacgaacagactgatagcgagtaaagtattcgaggctggggcagactacataattgcccacggcttcgtaggcagggacagcgttgaggccgttatggagcttggaaaaacgatcatcgttgtcgagatgagccatcccggagctaaagagttcattcagcccgtcaccgacaagctgatcgaacttgcaaacgagctggaacccttcggcgtaatagctcctgcgaccaggccggagcgggtctcgtacatccgttcaaggctcgagagggggataaggattttgactcccggagtgggtgcccagggtgggaaagccagtgatgccatcaaggccggtgctgactacgtgatagtcgggcgctcgatctacggcagtaataacccgcgcgaggcagcaaggagactctatgaggaaattctggaggtggtttga

SEQ ID NO: 16999 - protein, 213 aa, Pyrococcus kodakaraensis
MEESRLILALDVYDRERALEIAECTADYLWAIKVNWPLIIGSGLKIITELKQVTGLPIIADLKLADIPNTNRLIASKVFEAGADYIIAHGFVGRDSVEAVMELGKTIIVVEMSHPGAKEFIQPVTDKLIELANELEPFGVIAPATRPERVSYIRSRLERGIRILTPGVGAQGGKASDAIKAGADYVIVGRSIYGSNNPREAARRLYEEILEVV

SEQ ID NO: 17000 - DNA, 705 bp, Rhizobium fredii
  CDS (1)..(705): transl_table=11
atgagcacaagcgcgcgcgaccggctgatcgtcggcctcgaccttccgacgatcgccgaggcggaaaggatcgtctcgacgcttggcgacgatgtcgccttctacaagatcggctatcagctcgccttcgccggcggtctggaattcgcccgcgatctggcggcgagcggcaagaaggtcttcctcgacatgaagctgctcgacatcgacaatacggtggcgaagggcgttgagaacatcgtcaggatgggcatgtcgatgctgacgctgcacgcctatccgaaggcgatgaaggcggccgtcgacgcggcgaagggctccgatctctgcctgctcggcgtcacggtgctgacctcgatggacgcgcaggacgtcatcgatgccggctacggctccgatccgcatactctggtgctgcgcagggccgaacaggcgcgcgcggccggcatgggcggcatcgtctgctcggccgaggaagccaccgccgtgcgccgcatcatcggcgcggagatggcggtggtgacgcccggcattcgccccaccggtgcggagaaaggcgaccagaaacgggtgatgacgccggccgaggcgatccgcgccggatcgagccacctcgtcgtcgcccggccgatcgtcaaggcggccgatccgcttagtgccagccgcgccatcctggcggagatggagggcgtcctctcagcctga

SEQ ID NO: 17001 - protein, 234 aa, Rhizobium fredii
MSTSARDRLIVGLDLPTIAEAERIVSTLGDDVAFYKIGYQLAFAGGLEFARDLAASGKKVFLDMKLLDIDNTVAKGVENIVRMGMSMLTLHAYPKAMKAAVDAAKGSDLCLLGVTVLTSMDAQDVIDAGYGSDPHTLVLRRAEQARAAGMGGIVCSAEEATAVRRIIGAEMAVVTPGIRPTGAEKGDQKRVMTPAEAIRAGSSHLVVARPIVKAADPLSASRAILAEMEGVLSA

SEQ ID NO: 17002 - DNA, 714 bp, Rhizobium loti
  CDS (1)..(714): transl_table=11
atgcaggccaaatccatccaggcccagtccatccaggaaagactgatcgtcggcctcgacctaccgaccgtgcgggaagccgagcaggcggtgcgcgaactcgacggcgtcgtctccttctacaagatcggctatcagctggctttcgccggcgggctcgactttgccagggaactggccagcggcgggacaaagatcttcctcgacatgaagctgctcgacatcgaccacacggtggccaagggcgtcgagaacatcgtcaagatgggcatgaccatgctgaccatccacgcctatcccaaggcgatgcgcgcggcggtggaagcggccaggggcagtgacctttgcctgctcgccgtcagcgtgctgacctcgatggacgagcaggacatgatcgatgtcggctatgaatatgacccgcacacgctggtgctgcggcgctctgaacaagcgctgcatgccggcatgggcggcatcgtctgctcggcggcggaggcagaagcggtgcgccgcatcgttggccccgacatggcggtggtgacacccggcatccggccggccggcagcgaccatggcgaccagaaacgcgtggtgacgccggcgcaagcgatccgcaacggcgccagccatcttgtggtggcccgcccgatcgtcgcggcaagcgaccgccgcgcggcggcgcaggcgatcctcgacgaaatgcgctctgcatag

SEQ ID NO: 17003 - protein, 237 aa, Rhizobium loti
MQAKSIQAQSIQERLIVGLDLPTVREAEQAVRELDGVVSFYKIGYQLAFAGGLDFARELASGGTKIFLDMKLLDIDHTVAKGVENIVKMGMTMLTIHAYPKAMRAAVEAARGSDLCLLAVSVLTSMDEQDMIDVGYEYDPHTLVLRRSEQALHAGMGGIVCSAAEAEAVRRIVGPDMAVVTPGIRPAGSDHGDQKRVVTPAQAIRNGASHLVVARPIVAASDRRAAAQAILDEMRSA

SEQ ID NO: 17004 - DNA, 705 bp, Rhizobium meliloti
  CDS (1)..(705): transl_table=11
atgagcacaagcgcgcgcgaccggctgatcgtcggccttgatcttccaacggtgaccgaggccgagaaaatcgtctcgacgctcggcgaggaagtcctcttctataagatcggctatcaactggccttcgccggcggcctcgacttcgcgcgcgatctcgccgcgagcggcaagcaggtcttcctcgacatgaagctgctcgacatcgacaacacggtggccaagggcgtggagaacatcgtcaagatgggcgtgtcgatgttgacgctgcacgcctatccgaaggcgatgaagtcggcggtcgaagcggccaggggctcgaacctctgccttcttggcgtgacggtgctcacctcgatggacgaacaggacgtcatcgatgccggttatgaatatgatccgcacagcctggtcctgcgccgcgccgaacaggcccgcgccgcaggcatggggggcatcgtctgctcggcggaggaggccgccgccgtgcgaaagatcatcggcggcgacatggcgctggtgacgccgggcatccgcccggccggtgcggaaaaaggcgaccagaagcgggtgatgacgccggccgacgcgcttcgcgccggctcgagccacctcgtcgtcgggcggccgatcgttgccgcgcccgaccctctcgcagcaagccgcgcgatcctggccgaaatggagagcgccctctcccgttga

SEQ ID NO: 17005 - protein, 234 aa, Rhizobium meliloti
MSTSARDRLIVGLDLPTVTEAEKIVSTLGEEVLFYKIGYQLAFAGGLDFARDLAASGKQVFLDMKLLDIDNTVAKGVENIVKMGVSMLTLHAYPKAMKSAVEAARGSNLCLLGVTVLTSMDEQDVIDAGYEYDPHSLVLRRAEQARAAGMGGIVCSAEEAAAVRKIIGGDMALVTPGIRPAGAEKGDQKRVMTPADALRAGSSHLVVGRPIVAAPDPLAASRAILAEMESALSR

SEQ ID NO: 17006 - DNA, 792 bp, Rhizomucor pusillus
  CDS (1)..(792)
atgaacactttcaagacctacgctgatcgcgctgcacgacatcccaatggttgcgctaaagctctgtttgagctcatggagcgtaagcagacgaatctgtctatcgctgccgacgtgaccacaaagaaagaactccttcacattgctgatgcctgtggaccttacatctgcattctaaagacacacattgatatcattgatgactttgacgaagaccttgttgcgcagctgtgcgagttggcaaagaagcacgacttcttgttatttgaggatcgcaagtttgcggatatcggcaacacggtcaagcatcagtacggaaaaggtgtttacaagatcgcttcctgggcacacattacgaacgcccacaccgtgcctggcgaaggtatcatcaccggattgcgcgaagtcggtcttcctctcggtcgaggactgttgttattagctgaaatgtcatccaagggtgcattgactaagggcagctacacgaccgaatccgtcgagatggcacgacgtaaccaagactttgtttttggatttattgcccagcacaagatgaacgaaaaagacgatgaagatttcgttgtcatggcacctggtgtcggactggatgtcaagggagatggactcggtcagcaatatagaacgccttaccaggtcattgttgagtctggatgcgatgtcattatcgtgggacgtggtatctatggcaaccccgaccagatcgagttccaggcaaagcgttacaaggaagctggatggaacgcgtacttggaacgtgtacaaaagcattag

SEQ ID NO: 17007 - protein, 263 aa, Rhizomucor pusillus
MNTFKTYADRAARHPNGCAKALFELMERKQTNLSIAADVTTKKELLHIADACGPYICILKTHIDIIDDFDEDLVAQLCELAKKHDFLLFEDRKFADIGNTVKHQYGKGVYKIASWAHITNAHTVPGEGIITGLREVGLPLGRGLLLLAEMSSKGALTKGSYTTESVEMARRNQDFVFGFIAQHKMNEKDDEDFVVMAPGVGLDVKGDGLGQQYRTPYQVIVESGCDVIIVGRGIYGNPDQIEFQAKRYKEAGWNAYLERVQKH

SEQ ID NO: 17008 - DNA, 738 bp, Salmonella typhi
  CDS (1)..(738): transl_table=11
atgacgtttactgcttcatcttcttcctgcgctattactgaatcgcctgtcgttgtggcgttggattaccatgaacgcgataaagccctggcgtttgtcgataaaatcgatcctcgcgattgtcgcttaaaagtgggcaaagagatgttcacgctgtttggtccacaactcgttcgggatctccagcaacgtgggtttgatgtctttcttgatctaaaatttcatgatattcccaacaccacggcccgggcagtcgccgcagcggcagacctgggcgtttggatggtaaacgttcacgcgtctggtggggcgagaatgatggccgcagcgcgcgacgcgctggcgccattcagtaaagatgcgccgttgctcattgccgtgaccgtgttgaccagtatgggaaccagcgatctacacgatctgggcgtgacgttgtcaccggcggaacatgcggagcggctggcgcgcctgacgcagcaatgcgggctggatggcgtggtctgttccgctcaggaagctgtcagatttaaacaggcctttggcgctgcatttaagctggtgacgccgggcattcggcccgcaggcagcgaggcaggcgaccagcgacgcattatgacgcccgaacaggcattatccgctggcgtcgactatatggtgattggccgcccggttacgcaatcggtagatccggcgcaaacgctgaaggatattaacgcgtcactgaaacgggaggcataa

SEQ ID NO: 17009 - protein, 245 aa, Salmonella typhi
MTFTASSSSCAITESPVVVALDYHERDKALAFVDKIDPRDCRLKVGKEMFTLFGPQLVRDLQQRGFDVFLDLKFHDIPNTTARAVAAAADLGVWMVNVHASGGARMMAAARDALAPFSKDAPLLIAVTVLTSMGTSDLHDLGVTLSPAEHAERLARLTQQCGLDGVVCSAQEAVRFKQAFGAAFKLVTPGIRPAGSEAGDQRRIMTPEQALSAGVDYMVIGRPVTQSVDPAQTLKDINASLKREA

SEQ ID NO: 17010 - DNA, 738 bp, Salmonella typhimurium
  CDS (1)..(738): transl_table=11
atgacgtttactgcttcatcttcttcctgcgctattactgaatcgcctgtcgttgtggcgttggattaccatgaacgcgataaagccctggcgtttgtcgataaaatcgatcctcgcgattgtcgcttaaaagtgggcaaagagatgttcacgctgtttggtccacagctcgttcgggatctccagcaacgtgggtttgatgtctttcttgatctaaaatttcatgatattcccaacaccacggcccgggcggtcgccgctgcggcagacctgggcgtctggatggtaaacgttcacgcgtctggcggggcgagaatgatggccgcagcgcgcgacgcgctggcgccattcagtaaagatgcgccgttgctcattgccgtgaccgtgttgaccagtatggaaaccagcgatctacacgatctgggcgtgacgttgtcaccggcggaacatgcggagcggctggcgcgcctgacgcagcaatgcgggctggatggcgtggtctgttccgctcaggaagctgtcagatttaaacaggcctttggcgctgcatttaagctagtgacgccgggcattcggcccgcaggcagcgaggcaggcgaccagcgacgcattatgacgcccgaacaggcattatccgctggcgttgactatatggtgattggccgcccggttacgcaatcggtagatccggcgcaaacgctgaaggatattaacgcgtcactgaaacgggaggcataa

SEQ ID NO: 17011 - protein, 245 aa, Salmonella typhimurium
MTFTASSSSCAITESPVVVALDYHERDKALAFVDKIDPRDCRLKVGKEMFTLFGPQLVRDLQQRGFDVFLDLKFHDIPNTTARAVAAAADLGVWMVNVHASGGARMMAAARDALAPFSKDAPLLIAVTVLTSMETSDLHDLGVTLSPAEHAERLARLTQQCGLDGVVCSAQEAVRFKQAFGAAFKLVTPGIRPAGSEAGDQRRIMTPEQALSAGVDYMVIGRPVTQSVDPAQTLKDINASLKREA

SEQ ID NO: 17012 - DNA, 795 bp, Schizosaccharomyces pombe
  CDS (1)..(795)
atggatgctagagtatttcaaagctattcagctagagctgaggggatgaaaaatcccattgccaaggaattgttggctttgatggaagaaaagcaaagcaacttgtcagtcgcggtcgatttgacgaagaaatccgaaatcttagaattggtagataaaattggaccctatgtctgtgttatcaagacacatattgacgttgtcgaggatttcgaccaggatatggtagaaaaactggtggccttaggtaaaaagcatcgttttcttatctttgaggatcgcaaattcgcagacattggaaataccgtcaagctacaatatgcatctggtgtgtacaaaattgcttcttgggctcatatcacaaattgccatacagtgccaggcgagggtattatacaaggcctcaaagaagttggtttacctttgggacgtggtctcttgcttttggctgaaatgtcttccaaaggctctttggctactggttcctacacagagaaaaccttagaatggtttgagaagcataccgatttttgctttggctttatagctggtcgtcgatttcctaaccttcaaagcgactacataactatgtcccctggtatcggcttggatgttaaaggagacgggctgggacagcaatatcgtactcctgaagaagtgattgtaaactgcggtagcgatatcatcattgttggtcgtggagtctatggagctggtcgtaatcctgttgtcgaagccaagagatatagagaagctggttggaaggcatatcagcaaagactttctcagcattaa

SEQ ID NO: 17013 - protein, 264 aa, Schizosaccharomyces pombe
MDARVFQSYSARAEGMKNPIAKELLALMEEKQSNLSVAVDLTKKSEILELVDKIGPYVCVIKTHIDVVEDFDQDMVEKLVALGKKHRFLIFEDRKFADIGNTVKLQYASGVYKIASWAHITNCHTVPGEGIIQGLKEVGLPLGRGLLLLAEMSSKGSLATGSYTEKTLEWFEKHTDFCFGFIAGRRFPNLQSDYITMSPGIGLDVKGDGLGQQYRTPEEVIVNCGSDIIIVGRGVYGAGRNPVVEAKRYREAGWKAYQQRLSQH

SEQ ID NO: 17014 - DNA, 696 bp, Shewanella oneidensis
  CDS (1)..(696): transl_table=11
atgacgactaaacctatcctcgtagcgcttgattacgataataaaaaccatgctttacaattgatagatcaactcgatcccaacatgtgtcgcctgaaagtcggcaaagaaatgtttaccctgtttggcccacaactggtgaaagatatccacgaacgtggctttgatcttttccttgacttaaagtttcacgatattcccaatactgttgctaaagcagtcactgctgcagcggaacttggcgtgtggatgacaaacgtccatgccagcggtggcttggccatgatggaagcggcaaaaaaggctttgcagccatacggtaaagaggcgccaatgctgattgccgtgacggtattaacctcaatgagcgatgaagaccttaaattgataggtattgatgtgcctgcatttgagcatgttcagcgtttagctaaattgactaaacaggcagaacttgatggtgttgtctgttcggcccaagaggcgagcatacttaagtcactattaggtcaagactttaaattgattaccccaggcattcgacctgtcggtagtgatgttggtgaccaacaccgcgtgatgacgccgcctgaggcgcttgccgccggtgctgattatttagtgattggtcgtccgatcactaaggcgactgatcctctggctgcgctgcaggccattcaccagtcattggtttag

SEQ ID NO: 17015 - protein, 231 aa, Shewanella oneidensis
MTTKPILVALDYDNKNHALQLIDQLDPNMCRLKVGKEMFTLFGPQLVKDIHERGFDLFLDLKFHDIPNTVAKAVTAAAELGVWMTNVHASGGLAMMEAAKKALQPYGKEAPMLIAVTVLTSMSDEDLKLIGIDVPAFEHVQRLAKLTKQAELDGVVCSAQEASILKSLLGQDFKLITPGIRPVGSDVGDQHRVMTPPEALAAGADYLVIGRPITKATDPLAALQAIHQSLV

SEQ ID NO: 17016 - DNA, 738 bp, Shigella flexneri
  CDS (1)..(738): transl_table=11
atgacgttaactgcttcatcttcttcccgcgccgttacgaattctcctgtggttgttgcccttgattatcataattgtgatgacgcgctgtcctttgtcgacaagatcgacccacgcgattgtcgtctgaaggtcggtaaagagatgtttacattgtttgggccacagtttgtgcgcgaacttcaacagcgtggttttgatatctttcttgacctgaaattccacgatatccccaacactgcagcgcacgctgtcgctgctgcagctgacttaggcgtgtggatggtgaatgttcatgcctccggtggggcgcgtatgatgaccgcagcgcgtgaggcactggttccgtttggcaaagatgcaccgcttttgattgctgtgacagtgttgaccagcatggaagccagcgacctggccgatcttggcgtgacactgtcacctgcagattatgcagaacgtctggcagcactgacgcaaaaatgtgaccttgatggtgtggtgtgttctgctcaggaagctgtgcgctttaaacaggtattcggtcaggagttcaaactggttacaccgggcattcgtccgcaggggagtgaagctggtgaccagcgccgcattatgacgccagaacaggcgttggcggctggtgttgattatatggtgattggtcgcccggtaacgcaatcggtagatccagcgcagacactgaaagcgatcaacgcctctttacagcggagtgcatga

SEQ ID NO: 17017 - protein, 245 aa, Shigella flexneri
MTLTASSSSRAVTNSPVVVALDYHNCDDALSFVDKIDPRDCRLKVGKEMFTLFGPQFVRELQQRGFDIFLDLKFHDIPNTAAHAVAAAADLGVWMVNVHASGGARMMTAAREALVPFGKDAPLLIAVTVLTSMEASDLADLGVTLSPADYAERLAALTQKCDLDGVVCSAQEAVRFKQVFGQEFKLVTPGIRPQGSEAGDQRRIMTPEQALAAGVDYMVIGRPVTQSVDPAQTLKAINASLQRSA

SEQ ID NO: 17018 - DNA, 693 bp, Staphylococcus aureus
  CDS (1)..(693): transl_table=11
atgaaagatttaccaattattgcattagattttgaatcaaaagaaaaagtaaatcaatttttagatttatttgatgaatcattattcgtaaaagtaggtatggaacttttttatcaagaaggtcctcaattaattaatgagataaaagaaagaggccatgatgtatttttagatttaaaactgcatgatattcctaatacagttggtaaggcgatggaaggactagctaaattgaatgttgatctggtaaatgttcatgctgctggtggcgtaaaaatgatgtctgaggccattaaaggattaagaaaacataatcaacatacaaaaattattgcagtaacacagcttacgtcaacaacagaagacatgttacgacacgaacaaaatatacaaacatcgattgaagaggccgttttaaattatgccaagttagcaaatgcagctggtttagatggcgttgtttgttcacctcttgaaagtcgtatgttgactgaaaagttaggtacatcatttttaaaagtaacaccaggtattagacctaaaggtgcatctcaagatgaccaacaccgtattacgacaccggaagaagcaagacagcttggttcgacgcatattgtagtcggtagaccgattacacaaagtgacaatccagtcgaaagttatcataaaattaaagaaagttggttagtataa

SEQ ID NO: 17019 - protein, 230 aa, Staphylococcus aureus
MKDLPIIALDFESKEKVNQFLDLFDESLFVKVGMELFYQEGPQLINEIKERGHDVFLDLKLHDIPNTVGKAMEGLAKLNVDLVNVHAAGGVKMMSEAIKGLRKHNQHTKIIAVTQLTSTTEDMLRHEQNIQTSIEEAVLNYAKLANAAGLDGVVCSPLESRMLTEKLGTSFLKVTPGIRPKGASQDDQHRITTPEEARQLGSTHIVVGRPITQSDNPVESYHKIKESWLV

SEQ ID NO: 17020 - DNA, 699 bp, Staphylococcus epidermidis
  CDS (1)..(699): transl_table=11
atgagtgtgagaaatctacccattatagcattagattttaaatcagcagacgaggttcatacatttttaaataaatttaatgaaccgttatgcgtcaaaattgggatggagttattttatcaaacagggccagctttaattaagtccattaaaaaaagaggtcatgatatctttttagatttaaaattacatgacatacctaatactgtgagtaaagcaatggaaggcttagcacgtttagatgtagatttagtcaatgttcatgctgccggtggtattaaaatgatggaagaagctaaaaaagggttaagaaaacataatgctgatattaaaatcattgcagttactcaattaacttcaactactgaaacacaattacatgaagaacaaaatattcaaacctcaatagaggaggcagttttaaattatgctcgtcttactaaaaaagctggtttagacggtgtcgtatgttctcctcttgaggctgagatgatttctaaagaactaggtactgactttttaaaagtgacaccaggtattcgcccgaaaggcgcagctcgtaatgatcaacaacgaattacaacaccagaggaagctaaaaccttggggtcaacacatatcgtagtaggtcgacctatcactcaaagtgagcatccaattgacagttatcataaaataaaagaaagttggttaagttaa

SEQ ID NO: 17021 - protein, 232 aa, Staphylococcus epidermidis
MSVRNLPIIALDFKSADEVHTFLNKFNEPLCVKIGMELFYQTGPALIKSIKKRGHDIFLDLKLHDIPNTVSKAMEGLARLDVDLVNVHAAGGIKMMEEAKKGLRKHNADIKIIAVTQLTSTTETQLHEEQNIQTSIEEAVLNYARLTKKAGLDGVVCSPLEAEMISKELGTDFLKVTPGIRPKGAARNDQQRITTPEEAKTLGSTHIVVGRPITQSEHPIDSYHKIKESWLS

SEQ ID NO: 17022 - DNA, 702 bp, Streptococcus agalactiae serotype III
  CDS (1)..(702): transl_table=11
atgttagaaaaatgccctatcatcgccttagatttttctgatttggcttctgtaacaacttttttagaacattttccaaaagaagaattgctttttgtcaaaataggaatggagctttattattccgaaggtccctcaattattagatatattaaatccttaggacatcgcatttttttggatttaaaattacatgatatccctaatacagttcgatcatctatgtctgtcttagccaaattaggcattgatatgactaatgtgcatgctgcaggaggagtcgaaatgatgaaagcagctagagaaggtttgggggagggtccaatactattagcagtgacacaattaacctcgacttcacaagaacaaatgcaggtggatcaacatattaacttaagtgtagttgattcggtttgccattatgctcaaaaagctcaagaagcaggcttagatggagtagtcgcatcggctcaagaggtaaagcaaatcaagaaacagactaacgaacatttcatttgcttaacgcctggtatcagacctccacaaaccaatcagttagatgatcaaaaaagaacgatgactcctgagcaagcacgtatagttggggctgattatatcgttgtgggaagacctataacgaaagcagaaaatccatatcaagcatatctagagataaaagaagaatggaatcgtattaaataa

SEQ ID NO: 17023 - protein, 233 aa, Streptococcus agalactiae serotype III
MLEKCPIIALDFSDLASVTTFLEHFPKEELLFVKIGMELYYSEGPSIIRYIKSLGHRIFLDLKLHDIPNTVRSSMSVLAKLGIDMTNVHAAGGVEMMKAAREGLGEGPILLAVTQLTSTSQEQMQVDQHINLSVVDSVCHYAQKAQEAGLDGVVASAQEVKQIKKQTNEHFICLTPGIRPPQTNQLDDQKRTMTPEQARIVGADYIVVGRPITKAENPYQAYLEIKEEWNRIK

SEQ ID NO: 17024 - DNA, 702 bp, Streptococcus agalactiae serotype V
  CDS (1)..(702): transl_table=11
atgttagaaaaatgccctatcattgccttagatttttctgatttggcttctgtaacaacttttttagaacattttccaaaagaagaattgctttttgtcaaaataggaatggagctttattattccgaaggtccctcaattattagatatattaaatccttaggacatcgcatttttttggatttaaaattacatgatatccctaatacagttcgatcatctatgtctgtcttagccaaattaggcattgatatgactaatgtgcatgctgcaggaggagtcgaaatgatgaaagcagctagagaaggtttggggaagggtccaatactattagcagtgacacaattaacctcgacttcacaagaacaaatgcaggtggatcaacatattaacttaagtgtagttgattcggtttgccattatgctcaaaaagctcaagaagcaggcttagatggagtagtcgcatcggctcaagagggaatgcaaatcaagaaacagactaacgaacatttcatttgcttaacgcctggtatcagacctccacaaaccaatcagttagatgatcaaaaaagaacgatgactcctgagcaagcacgtatagttggggctgattatatcgttgtgggaagacctataacgaaagcagaaaatccatatcaagcatatctagagataaaagaagaatggaatcgtattaaataa

SEQ ID NO: 17025 - protein, 233 aa, Streptococcus agalactiae serotype V
MLEKCPIIALDFSDLASVTTFLEHFPKEELLFVKIGMELYYSEGPSIIRYIKSLGHRIFLDLKLHDIPNTVRSSMSVLAKLGIDMTNVHAAGGVEMMKAAREGLGKGPILLAVTQLTSTSQEQMQVDQHINLSVVDSVCHYAQKAQEAGLDGVVASAQEGMQIKKQTNEHFICLTPGIRPPQTNQLDDQKRTMTPEQARIVGADYIVVGRPITKAENPYQAYLEIKEEWNRIK

SEQ ID NO: 17026 - DNA, 693 bp, Streptococcus mutans
  CDS (1)..(693): transl_table=11
atgcgtgaaccccgtcccttaattgctcttgattttccttcttttgatgatgtgaaatccttcttagcacaattcccaccagaagagaaactttatgttaaaattggtatggaactctattatgctgtcggtccagagattgtgcgctatgtgaaaggtcttggccattcggtctttcttgatttaaaattgcatgatattcccaatacggtcaaatcagctatgaaggtgctatctgatcttggtgtagatatgactaatgttcatgcggctggcggtgttgaaatgatgaaggcagcgcgtgaaggtttgggaaaaggtccaaaactgatcgcggtgacccaattaacttcaacgtctgaagaacagatgcatgatttccaaaacattcaaaccagcttagcggagtcagttgttcattatgccaagaagactgcggaagctggtcttgatggagttgtctgctctgctcatgaagtggaagccatcaaatcagccacgtcgaatgattttgtctgtctaacaccgggtattcgtccagcgggctctgccattggtgaccaaaaacgcatcatgacaccagcagacgcacgtaccattggttcagactatatcgtgctaggacgccctatcacgcgagcagaggatccaatagccgcctatcaagcgattaaagctgaatggaatggctag

SEQ ID NO: 17027 - protein, 230 aa, Streptococcus mutans
MREPRPLIALDFPSFDDVKSFLAQFPPEEKLYVKIGMELYYAVGPEIVRYVKGLGHSVFLDLKLHDIPNTVKSAMKVLSDLGVDMTNVHAAGGVEMMKAAREGLGKGPKLIAVTQLTSTSEEQMHDFQNIQTSLAESVVHYAKKTAEAGLDGVVCSAHEVEAIKSATSNDFVCLTPGIRPAGSAIGDQKRIMTPADARTIGSDYIVLGRPITRAEDPIAAYQAIKAEWNG

SEQ ID NO: 17028 - DNA, 693 bp, Streptococcus pyogenes serotype M3
  CDS (1)..(693): transl_table=11
atgaaagaagaacgcccaattattgctttagacttttcatcatttgaggagactaaagcatttttagacttatttccagcagaagaaaagctatacgtgaaaattggtatggaattatattatgcgcaaggaccagatattgttcggtctatcaaatcgttagggcataatgtatttttggatttaaaattacatgatattccaaatactgttcgtgctgctatggcagttcttaaagaattagatattgatatggcaactgttcatgcagctggtggtgtagagatgctaaaagcagctcgagaaggactaggccaaggccctaccttaattgcggtaacgcagctaacttcaaccagtgaagaccaaatgcgtggtgatcaaaatattcaaacgagtcttttagagtctgttttgcattacagcaagggggcagctaaagctcagctagatggggtggtttgttcggcacaagaagtagaagctatcaaggcggtgacgcctacgggatttacttgcttaactcctggcattcgtcctaaaggcagtaatattggcgatcaaaaacgagtgatgactccaaaccaagcaagacgcattggaagtgattatattgtggtagggcgaccaattacccaggcaaaagacccagtggctgcttaccaagccataaaagctgagtgggcaggctaa

SEQ ID NO: 17029 - protein, 230 aa, Streptococcus pyogenes serotype M3
MKEERPIIALDFSSFEETKAFLDLFPAEEKLYVKIGMELYYAQGPDIVRSIKSLGHNVFLDLKLHDIPNTVRAAMAVLKELDIDMATVHAAGGVEMLKAAREGLGQGPTLIAVTQLTSTSEDQMRGDQNIQTSLLESVLHYSKGAAKAQLDGVVCSAQEVEAIKAVTPTGFTCLTPGIRPKGSNIGDQKRVMTPNQARRIGSDYIVVGRPITQAKDPVAAYQAIKAEWAG

SEQ ID NO: 17030 - DNA, 693 bp, Streptococcus pyogenes serotype M6
  CDS (1)..(693): transl_table=11
atgaaagaagaacgcccaattattgctttagacttttcatcatttgaggagactaaagcatttttagacttatttccagcagaagaaaagctatacgtgaaaattggtatggaattatattatgcgcaaggaccagatattgttcggtatatcaaatcgttagggcataatgtatttttggatttaaaattacatgatattccaaatactgttcgtgctgctatggcagttcttaaagaattagatattgatatggcaactgttcatgcagctggtggtgtagagatgctaaaagcagctcgagaaggactaggtcaaggccctaccttaattgcggtaacgcagctaacttcaaccagtgaagaccaaatgcgtggtgatcaaaatattcaaacgagtcttttagagtctgttttgcattacagcaagggggcagctaaagctcagctagatggggtggtttgttcggcacaagaagtagaagctatcaaggcggtgacacctacgggatttacttgcttaactcctggcattcgtcctaaaggcagtaatattggcgatcaaaaacgagtgatgactccaaaccaagcaagacgcattggaagtgattatattgtggtagggcgaccaattacccaggcaaaagacccagtggctgcttaccaagccataaaagctgagtgggcaggctaa

SEQ ID NO: 17031 - protein, 230 aa, Streptococcus pyogenes serotype M6
MKEERPIIALDFSSFEETKAFLDLFPAEEKLYVKIGMELYYAQGPDIVRYIKSLGHNVFLDLKLHDIPNTVRAAMAVLKELDIDMATVHAAGGVEMLKAAREGLGQGPTLIAVTQLTSTSEDQMRGDQNIQTSLLESVLHYSKGAAKAQLDGVVCSAQEVEAIKAVTPTGFTCLTPGIRPKGSNIGDQKRVMTPNQARRIGSDYIVVGRPITQAKDPVAAYQAIKAEWAG

SEQ ID NO: 17032 - DNA, 693 bp, Streptococcus pyogenes serotype M18
  CDS (1)..(693): transl_table=11
atgaaagaagaacgcccaattattgctttagacttttcatcatttgaggagactaaagcatttttagacttatttccagcagaagaaaagctatacgtgaaaattggtatggaattatattatgcgcaaggaccagatattgttcggtatatcaaatcgttagggcataatgtatttttggatttaaaattacatgatattccaaatactgttcgtgctgctatggcagttcttaaagaattagatattgatatggcaactgttcatgcagctggtggtgtagagatgctaaaagcagctcgagaaggactaggtcaagaccctaccttaattgcggtaacgcagctaacttcaaccagtgaagaccaaatgcgtggtgatcaaaatattcaaacgagtcttttagagtctgttttgcattacagcaagggggcagctaaagctcagctagatggggtggtttgttcggcacaagaagtagaagctatcaaggcggtgacacctacgggatttacttgcttaactcctggcattcgtcctaaaggcagtaatattggcgatcaaaaacgagtgatgactccaaaccaagcaagacgcattgaaagtgattatattgtggtagggcgaccaattacccaggcaaaagacccagtggctgcttaccaagccataaaagctgagtgggcaggctaa

SEQ ID NO: 17033 - protein, 230 aa, Streptococcus pyogenes serotype M18
MKEERPIIALDFSSFEETKAFLDLFPAEEKLYVKIGMELYYAQGPDIVRYIKSLGHNVFLDLKLHDIPNTVRAAMAVLKELDIDMATVHAAGGVEMLKAAREGLGQDPTLIAVTQLTSTSEDQMRGDQNIQTSLLESVLHYSKGAAKAQLDGVVCSAQEVEAIKAVTPTGFTCLTPGIRPKGSNIGDQKRVMTPNQARRIESDYIVVGRPITQAKDPVAAYQAIKAEWAG

SEQ ID NO: 17034 - DNA, 702 bp, Streptococcus pneumoniae
  CDS (1)..(702): transl_table=11
atgcgagaacatcgtccaatcattgctcttgattttcctagttttgaggcggtcaaggaatttttagctcttttcccagcagaagaaagcctttatctcaaggtagggatggagctttattacgcagcggggcctgagattgtgtcctacttaaaaggtttgggtcatagtgtctttttggatctcaaacttcatgacattcctaatacagtcaagtcagccatgaagatcttgtctcagcttggtgtcgatatgactaatgtccatgcggctggtggtgtagagatgatgaaggcggcgcgtgaaggtcttgggagtcaagccaaattgatcgctgtaactcagctcacatcaacgtcagaagctcagatgcaggagtttcaaaatatccaaaccagtctgcaagagtctgtgattcactatgccaagaagacagctgaagctggcttggatggtgttgtttgctcggctcaggaagtacaagtcatcaagcaggctaccaatccagattttatctgtctgacaccagggattcgtccagctggtgttgcagttggagatcaaaaacgagtcatgacacctgctgatgcctatcaaatcggcagtgactatatcgtagtgggacgtcccattacccaagctgaggatcctgttgcagcttatcatgccatcaaggatgaatggacacaggactggaattaa

SEQ ID NO: 17035 - protein, 233 aa, Streptococcus pneumoniae
MREHRPIIALDFPSFEAVKEFLALFPAEESLYLKVGMELYYAAGPEIVSYLKGLGHSVFLDLKLHDIPNTVKSAMKILSQLGVDMTNVHAAGGVEMMKAAREGLGSQAKLIAVTQLTSTSEAQMQEFQNIQTSLQESVIHYAKKTAEAGLDGVVCSAQEVQVIKQATNPDFICLTPGIRPAGVAVGDQKRVMTPADAYQIGSDYIVVGRPITQAEDPVAAYHAIKDEWTQDWN

SEQ ID NO: 17036 - DNA, 702 bp, Streptococcus pneumoniae
  CDS (1)..(702): transl_table=11
atgcgagaacatcgtccaatcattgctcttgattttcctagttttgaggcggtcaaggaatttttagctcttttcccagcagaagaaagcctttatctcaaggtagggatggagctttattacgcagcggggcctgagattgtgtcctacttaaaaggtttgggtcatagtgtctttttggatctcaaacttcatgacattcctaatacagtcaagtcagccatgaagatcctatctcagcttggtgtggatatgaccaatgttcatgcggctggtggtgtagagatgatgaaggctgcgcgtgaaggtcttggaagtcaagctaaattgatcgctgtaactcagctcacatcaacgtcagaagctcagatgcaggagtttcaaaatatccaaaccagtctgcaagagtctgtgattcactatgccaagaagacagctgaagctggcttggatggtgttgtttgctcggctcaggaagtacaagtcatcaagcaggctaccaatccagattttatctgtctgacaccagggattcgtccagctggtgttgcagttggagatcaaaaacgagtcatgacacctgctgatgcctatcaaatcggcagtgactatatcgtagtgggacgtcccattacccaagctgaggagcctgttgcagcttatcatgccatcaaggatgaatggacacaggactggaattaa

SEQ ID NO: 17037 - protein, 233 aa, Streptococcus pneumoniae
MREHRPIIALDFPSFEAVKEFLALFPAEESLYLKVGMELYYAAGPEIVSYLKGLGHSVFLDLKLHDIPNTVKSAMKILSQLGVDMTNVHAAGGVEMMKAAREGLGSQAKLIAVTQLTSTSEAQMQEFQNIQTSLQESVIHYAKKTAEAGLDGVVCSAQEVQVIKQATNPDFICLTPGIRPAGVAVGDQKRVMTPADAYQIGSDYIVVGRPITQAEEPVAAYHAIKDEWTQDWN

SEQ ID NO: 17038 - DNA, 741 bp, Synechococcus sp
  CDS (1)..(741): transl_table=11
ttggctccgtcgctcgcttctggccccgccgatcggatcatcgtggcccttgatggcatggcgcccgagcaggcgctgaggtttgcggctcagctggacggactgcgctgggtgaaggtgggtctggaattgtttgtgcaggccggcccagaggtggtggctcagctgcgggagcaggggttgcgggtgttcctggatctcaaatttcacgacatccccgcgacgatggcaggagcctgccggagggcggcggcgttgggggcggagctgatcacggtgcatgcctgcgccggcagtgaagcgctcaaggcggcccaggccgcggcggtggagggggcccagcaggctggtctcaacccgcccacgctgctggcggtgacggtgctcaccagttgggaggagcagcgactgcaacgggaactcgccattcagcaatccattggcgagcgggtgccggcgttggcgcagctgtcggcaacggcaggcatcggtggttgtgtctgctcacccttggaggccgcggcgttgcgggcccagcaccccgaaccgtttgccctggtcacgccggggattcgccccaaaggttctgcggtgggcgatcaggcccgggtgatgggaccggctgaagcgatagctgccggcgcgagccagctggtgatcggccgtccgatcaccaaagctgacgatcccagcgctgcctttgcggcctgttgcacccagttgctgggatcgattgattga

SEQ ID NO: 17039 - protein, 246 aa, Synechococcus sp
MAPSLASGPADRIIVALDGMAPEQALRFAAQLDGLRWVKVGLELFVQAGPEVVAQLREQGLRVFLDLKFHDIPATMAGACRRAAALGAELITVHACAGSEALKAAQAAAVEGAQQAGLNPPTLLAVTVLTSWEEQRLQRELAIQQSIGERVPALAQLSATAGIGGCVCSPLEAAALRAQHPEPFALVTPGIRPKGSAVGDQARVMGPAEAIAAGASQLVIGRPITKADDPSAAFAACCTQLLGSID

SEQ ID NO: 17040 - DNA, 696 bp, Synechocystis sp
  CDS (1)..(696): transl_table=11
atgaccccagaccaagtaattgttgccctagatgtgccggatttacccaaggcgatcgccttagtggatcgtttgccaggggtaggtttttggaaggtggggctggaattatttgtgggggcggggccggtcattttggcggagttaaaagaccggggtaaaaggatttttttggatctgaaattccatgacattcccaatacgatgttgggggcctgcctgtctgccagtcggtacgaagtggatttactcactctccatgccactgcgggaagtcaagctttaaccttagccgcccaagccatggccccattgccccatcctcccaaactgttggccattaccttgctcactagcattggcgatcgccagttacgggaagagttacaacaacccttagccgtggatgattacgtcaacgccatggcccggttggcccgaaatgctggcattgatggagcggtgtgttccccccaggaagtggctaaactgaggcaaacctgcggccctgaatttttactggttacccccggcgtgcggcctctctggtcggccccaggcgatcaacaacgggtcatgattcccgcccaggcgatcgccgctggggccaattatgtggtcattggtcgacccatcactgctgatcctagtcccgaagccgcttgggaaagattatgccaagaccttgctgtttaa

SEQ ID NO: 17041 - protein, 231 aa, Synechocystis sp
MTPDQVIVALDVPDLPKAIALVDRLPGVGFWKVGLELFVGAGPVILAELKDRGKRIFLDLKFHDIPNTMLGACLSASRYEVDLLTLHATAGSQALTLAAQAMAPLPHPPKLLAITLLTSIGDRQLREELQQPLAVDDYVNAMARLARNAGIDGAVCSPQEVAKLRQTCGPEFLLVTPGVRPLWSAPGDQQRVMIPAQAIAAGANYVVIGRPITADPSPEAAWERLCQDLAV

SEQ ID NO: 17042 - DNA, 645 bp, Thermoplasma acidophilum
  CDS (1)..(645)
atgtcggaatcaaggcttgtggttgcactagacctcacggacaaggatagagccctggaaatagccagatccataggaagacaggtgttcgccataaagataaactggcccctggtcctggcaggatccggatcgataataggcgagatcgcaagggtgtcgcgggttgtctgtgacttcaagatagcagatataccgaacacgaacagcataatagcaaaatttgcgagggatcagggagcatggggcataatatcgcattcattcacaggccttgaatcactgagatcggtcgtcgaagcatctggcgatactaaggtcttctcggttgtggccatgtcgcatcccggttcggatctcattaacgacaattaccggaagctgatggatatatctgagagggcaggcgtctacggctatatagcgcctggcaataaattatccgacctgtctgaaatacggaagcgcacgaaaaagaccataatgtctccaggcataggatcgcagggaggaagggcatcggatgccataaaggccggcgcggatctggttatagtcggaagatccatatacgaaagtgcagatccggtgacagcagcagaagccataaacgaggaaatagcaaaggccgttgaacaaaactag

SEQ ID NO: 17043 - protein, 214 aa, Thermoplasma acidophilum
MSESRLVVALDLTDKDRALEIARSIGRQVFAIKINWPLVLAGSGSIIGEIARVSRVVCDFKIADIPNTNSIIAKFARDQGAWGIISHSFTGLESLRSVVEASGDTKVFSVVAMSHPGSDLINDNYRKLMDISERAGVYGYIAPGNKLSDLSEIRKRTKKTIMSPGIGSQGGRASDAIKAGADLVIVGRSIYESADPVTAAEAINEEIAKAVEQN

SEQ ID NO: 17044 - DNA, 606 bp, Thermotoga maritima
  CDS (1)..(606): transl_table=11
atgacacctgttctcagtctggacatggaagatcctatcagattcatcgacgaaaacggcagtttcgaagtggtgaaggtgggtcacaacctcgccatacacgggaaaaagatcttcgacgagctcgcaaagagaaatttgaagataatcctcgacctgaagttctgcgatatcccttcaacggtggaacgttccataaagagctgggatcacccggcgatcataggtttcacagttcactcctgcgctggatacgaaagcgtggagagggctctcagtgcaacagacaaacacgtgttcgttgtggtgaaactcacttccatggaaggatccctcgaggattacatggacaggatagaaaaactgaacaagcttgggtgtgatttcgtgcttcccggtccatgggcaaaggctctgagagagaagataaaaggcaaaattctcgttcccggcatcagaatggaagtgaaagcagacgatcaaaaggacgtcgtaacgctcgaagagatgaagggaatagcgaattttgctgtgctcggaagagagatctacctgagcgaaaatcccagagaaaagatcaaaaggataaaggagatgagactgtga

SEQ ID NO: 17045 - protein, 201 aa, Thermotoga maritima
MTPVLSLDMEDPIRFIDENGSFEVVKVGHNLAIHGKKIFDELAKRNLKIILDLKFCDIPSTVERSIKSWDHPAIIGFTVHSCAGYESVERALSATDKHVFVVVKLTSMEGSLEDYMDRIEKLNKLGCDFVLPGPWAKALREKIKGKILVPGIRMEVKADDQKDVVTLEEMKGIANFAVLGREIYLSENPREKIKRIKEMRL

SEQ ID NO: 17046 - DNA, 660 bp, Thermoplasma volcanium
  CDS (1)..(660): transl_table=11
gtggataagagaattatagtagccttggatgttaaggaaaagaaaaaagctatagatattgcagaaagcctatcggacattgtatttgcttttaagataaactggcccttagtactatattcatctcctgaggttataggtgaaatttcgcaatatggtaaggttatatgtgactttaaagtggcagatatcccttatacgaactcgctaataacagagagagttcgggatcttggtgcatggggaataatatctcactcgtttcttggagaagaatcccttaaatccgtggtcaatgcagctaaaggcatgcatgtattttcagttgtggctatgtcgcatcctggctcagatatgataaactccaatgctatgcaactaatgaaactatccatagaatgtggggtttacggatttgttgcccctgcaaacaagattgatgacctaagaatgatcaggtctgcaacggacagagtaataatatcgccaggaataggagcacagggaggtgatccgtacacagctgttctgaatggatcggattatttaatagtgggccggagcgtttatgaaagcgataagccagagttagaggtttcaaagcttcagcaaactgccgagagagctattgaggacagggagagacttaaaaacagttaa

SEQ ID NO: 17047 - protein, 219 aa, Thermoplasma volcanium
MDKRIIVALDVKEKKKAIDIAESLSDIVFAFKINWPLVLYSSPEVIGEISQYGKVICDFKVADIPYTNSLITERVRDLGAWGIISHSFLGEESLKSVVNAAKGMHVFSVVAMSHPGSDMINSNAMQLMKLSIECGVYGFVAPANKIDDLRMIRSATDRVIISPGIGAQGGDPYTAVLNGSDYLIVGRSVYESDKPELEVSKLQQTAERAIEDRERLKNS

SEQ ID NO: 17048 - DNA, 795 bp, Torulaspora delbrueckii
  CDS (1)..(795)
atgtcggttgctacttatcaagagagggctgcaaagcatccaagtcctgtggcttcaaaacttttgaatttgatgcatgaaaagaagaccaatctatgtgcttcattagatgtgaataccaccgaagaattgcttaaattagtcgatactctaggtccttacatctgtttgttgaaaacacacatcgatatcatttctgatttttccattgatggtactgtgaagcctttgaaagaattggccaaaaagcacaactttatgatctttgaggacaggaaattcgccgatatcggtaacactgtcaagctacagtattcttcaggtgtctacagaattgccgagtgggctgatattacaaacgcccatggtgtcactggtgctgggatcgtcactgggttgaaacaagcggctcaagagactacaaacgaaccaagaggtctattaatgttggctgaactatcttctaaaggttctttggcccatggtgaatacacccaaggtactgtcgaaattgctaagacagacaaagatttcgtcattggattcattgcccaaagagacatgggaggaagagaagaaggatatgactggctaatcatgacaccaggtgttggcctagacgacaagggcgatgcgctgggtcaacagtacagaactgtcgatgaagttgtctctacggggtcagacatcatcattgtcggcagaggacttttcgccaagggaagagatccaagagtagaaggcgaacgttaccgtaaagccggctgggaagcatacgagaagagatgccagtaa

SEQ ID NO: 17049 - protein, 264 aa, Torulaspora delbrueckii
MSVATYQERAAKHPSPVASKLLNLMHEKKTNLCASLDVNTTEELLKLVDTLGPYICLLKTHIDIISDFSIDGTVKPLKELAKKHNFMIFEDRKFADIGNTVKLQYSSGVYRIAEWADITNAHGVTGAGIVTGLKQAAQETTNEPRGLLMLAELSSKGSLAHGEYTQGTVEIAKTDKDFVIGFIAQRDMGGREEGYDWLIMTPGVGLDDKGDALGQQYRTVDEVVSTGSDIIIVGRGLFAKGRDPRVEGERYRKAGWEAYEKRCQ

SEQ ID NO: 17050 - DNA, 696 bp, Vibrio cholerae
  CDS (1)..(696): transl_table=11
atgaacgacccaaaagtgattgttgcactggactatgacaatctggcggatgcgctcgcgtttgtggacaaaattgacccaagcacatgtcgactcaaagtgggtaaagagatgtttactctatttggtcctgattttgtccgtgagctgcataaacgaggtttttctgtgtttctggatcttaaatttcacgatattccgaatacctgttcaaaagcggtgaaagctgccgctgagcttggggtttggatggtgaatgtgcacgcgagtggtggcgagcgaatgatggcagcatcgcgtgagattctggagccgtatggtaaagagcgcccactgctgattggtgtcactgtattgaccagtatggaatctgccgatttacaaggtattggcatcttgagtgcgccacaagatcatgtgctgcgattagcaacgctcaccaaaaatgctggtcttgatggtgtggtatgctccgcacaagaggcatcactattgaagcaacatttggggcgtgaattcaaattggtgacgccaggaattcgtccagcgggttcagagcaaggcgatcaacgccgtattatgactccagcccaagccattgcctctggttcagattatctcgtgatcggtcgccctatcactcaagccgcacatcctgaagtggttctggaagagataaacagctctttagtttag

SEQ ID NO: 17051 - protein, 231 aa, Vibrio cholerae
MNDPKVIVALDYDNLADALAFVDKIDPSTCRLKVGKEMFTLFGPDFVRELHKRGFSVFLDLKFHDIPNTCSKAVKAAAELGVWMVNVHASGGERMMAASREILEPYGKERPLLIGVTVLTSMESADLQGIGILSAPQDHVLRLATLTKNAGLDGVVCSAQEASLLKQHLGREFKLVTPGIRPAGSEQGDQRRIMTPAQAIASGSDYLVIGRPITQAAHPEVVLEEINSSLV

SEQ ID NO: 17052 - DNA, 702 bp, Vibrio parahaemolyticus
  CDS (1)..(702): transl_table=11
atgatcgaccaaaaagttattgtcgcactggattatgataaccaagctgatgcgctagcgtttgtagatagaattgatcctgcgtcatgtcgcctaaaagtcggcaaggaaatgtttacgctatttggtcctgattttgtacgtgaactccacaaacgtggtttttctgtattcctggatttgaaatttcatgatatcccgaatacctgttcaaaagcggtacgcgctgctgctgagttaggtgtatggatggtgaacgttcatgcaagcggtggtgagcgtatgatgacagcatcacgtgagattcttgagccatatggtaaagatcgtccacttctgattggtgtaacggtattgactagcatggaacaaagtgacttggcaggtattggtctgaatgttgaaccgcaagagcaagtgattcgtctagcgacattgactaagaactcaggtctcgatggcgtagtgtgctctgcgcaagaatcttcactacttaaaaatgagctaggtaaagagtttaaactgatcactccaggaattcgtcctgctggttctgatcaaggcgaccaacgtcgtattatgacgccagttgatgctattcaagcgggttctgactaccttgttattggccgtccgatcactcaggcgacggaccctgctgccgtattgaaatctatcaacgacagcttagctagcaagtaa

SEQ ID NO: 17053 - protein, 233 aa, Vibrio parahaemolyticus
MIDQKVIVALDYDNQADALAFVDRIDPASCRLKVGKEMFTLFGPDFVRELHKRGFSVFLDLKFHDIPNTCSKAVRAAAELGVWMVNVHASGGERMMTASREILEPYGKDRPLLIGVTVLTSMEQSDLAGIGLNVEPQEQVIRLATLTKNSGLDGVVCSAQESSLLKNELGKEFKLITPGIRPAGSDQGDQRRIMTPVDAIQAGSDYLVIGRPITQATDPAAVLKSINDSLASK

SEQ ID NO: 17054 - DNA, 699 bp, Vibrio vulnificus
  CDS (1)..(699): transl_table=11
atgatcgaccaaaaagttattgtcgcactggattacgataatcaagccgatgcactggccttcgtagatagaattgatcctgcgtcatgtcgcctaaaagtaggcaaggaaatgtttactctatttggtcctgatttcgtacgtgaacttcacaaacgtggtttttctgtatttctagatctgaagtttcacgatatcccaaatacatgctcaaaagccgttcgagcagcagctgagttgggtgtctggatggtgaatgtacatgcaagtggtggtgaacgcatgatgacagcatctcgtgagattcttgaaccttatggtaaagatcgcccgttactgattggtgtgaccgtactcaccagcatggagcaaagcgacctagcaggcattggtttggacgttgcaccacaagaacacgtgattcgcttagctacgttgacgaagaattctggtttggatggtgttgtgtgttctgctcaagaatcctctctgctgaagaatgagctgggcaaagagtttaaattggttacgccaggtattcgcccgctcggctcagaacaaggagatcaacgtcgtatcatgacaccacttgaagcggtacaagcaggttctgattaccttgttatcggacggccaattacgcaggcagtagatcctgcggcagtcttgcaagctataaatacaagcctaaccaaatag

SEQ ID NO: 17055 - protein, 232 aa, Vibrio vulnificus
MIDQKVIVALDYDNQADALAFVDRIDPASCRLKVGKEMFTLFGPDFVRELHKRGFSVFLDLKFHDIPNTCSKAVRAAAELGVWMVNVHASGGERMMTASREILEPYGKDRPLLIGVTVLTSMEQSDLAGIGLDVAPQEHVIRLATLTKNSGLDGVVCSAQESSLLKNELGKEFKLVTPGIRPLGSEQGDQRRIMTPLEAVQAGSDYLVIGRPITQAVDPAAVLQAINTSLTK

SEQ ID NO: 17056 - DNA, 699 bp, Vibrio vulnificus
  CDS (1)..(699): transl_table=11
atgatcgaccaaaaagttattgtcgcactggattacgataatcaagccgatgcactggccttcgtagatagaattgatcctgcgtcatgtcgcctaaaagtaggcaaggaaatgtttacgctatttggtcctgatttcgtacgtgaacttcacaaacgtggtttttctgtatttctagatctgaagtttcacgatatcccaaatacatgctcaaaagccgttcgagcagcagctgagttgggtgtctggatggtgaatgtacatgcaagtggtggtgaacggatgatgacagcatctcgtgagattcttgagccttatggtaaagatcgcccgttactgattggtgtgaccgtactcaccagcatggagcaaagcgacctagcaggcattggtttgaacgttgcaccacaagatcacgtgattcgcttagctacgttgacgaagaattctggtttggatggtgttgtgtgttctgcgcaagaatcctctctgctgaagaatgagctgggcaaagagtttaaattggttacgccaggtattcgcccgctcggctcagaacaaggtgatcaacgtcgtatcatgacaccacttgaagcggtacaagcaggttctgattaccttgttatcggacggccaattacgcaggcagtagatcctgcggcagtcttgcaagctataaatacaagcctaaccaaatag

SEQ ID NO: 17057 - protein, 232 aa, Vibrio vulnificus
MIDQKVIVALDYDNQADALAFVDRIDPASCRLKVGKEMFTLFGPDFVRELHKRGFSVFLDLKFHDIPNTCSKAVRAAAELGVWMVNVHASGGERMMTASREILEPYGKDRPLLIGVTVLTSMEQSDLAGIGLNVAPQDHVIRLATLTKNSGLDGVVCSAQESSLLKNELGKEFKLVTPGIRPLGSEQGDQRRIMTPLEAVQAGSDYLVIGRPITQAVDPAAVLQAINTSLTK

SEQ ID NO: 17058 - DNA, 699 bp, Wigglesworthia glossinidia brevipalpis
  CDS (1)..(699): transl_table=11
atgaaactatctccaattattgtagctttagattattctaacccaaaaaaagctatatctttttctaaaaagatttccccagatcaatgccaattaaaaattggacatgaattatttattaattcaggattttttttaatcaactttttacaaaaaaatggatttaaaatttttttagatttaaagctttacgacattcctaatacaataaaaaaaacaatattttcgctagcaaaatttggaatatggatggttaatgttcatgctagtggaggatataatatgatgactgctgctaaagatgctttgtcacatataaataatcctccaaaacttattgcagttacagttcttactagcatggaaaaatcagatttaagcaaatcaaaaatttttacaaaaataataaatcatgtaattcatttatctaataacgcttataaatgtggattagatggtattgtatgctccccttgggaagctgaaaaagtaagaaaaaaatttggaaataattttattattgtaactcctggaataaggtttaaaaatacaaattataatgatcaaaaaagagtaatgaatccatacgacgctataaaatctggatctaattatatagtgattggtagacctattactaaatcaagcaacccatatttattattagaaaaaattttatcaaaattaaataatatttag

SEQ ID NO: 17059 - protein, 232 aa, Wigglesworthia glossinidia brevipalpis
MKLSPIIVALDYSNPKKAISFSKKISPDQCQLKIGHELFINSGFFLINFLQKNGFKIFLDLKLYDIPNTIKKTIFSLAKFGIWMVNVHASGGYNMMTAAKDALSHINNPPKLIAVTVLTSMEKSDLSKSKIFTKIINHVIHLSNNAYKCGLDGIVCSPWEAEKVRKKFGNNFIIVTPGIRFKNTNYNDQKRVMNPYDAIKSGSNYIVIGRPITKSSNPYLLLEKILSKLNNI

SEQ ID NO: 17060 - DNA, 687 bp, Wolinella succinogenes
  CDS (1)..(687): transl_table=11
atgcagctctgcatcgcgcttgaccttcctagccaagaggagaatctaaagctcttggaatctcttgtggggcttcctgtgtggatcaaggtgggtttgaggagttatattcgcgatggaaaggagtttttagggagaatcaggcagattgatcctcgctttgaactctttcttgacttgaagctccatgatattcctaacaccatgggggatgcagctgaagaaatcgcctctttgggggtgggcatgttcacactccatgctagcagcggaggcgaggcgatgagagaggtggcggctcgtttggcgcgattccctaggcgtcccttggcttttgcggtgacggcgctcacgagttttggcgaggaagggtttagggagatttataacgcctctttggagagcaaagcgttggatatggcgatgttggcggctcaaaatggaatggatggtgtggtctgttcagtttttgaaagtcagagaatcaaatcctatgtcgcccaggattttctaaccctcactccgggaatccgcccctttggagagccaagtggcgatcagaagcgtgtggcggatctccatgaggctaaaagcgcctccagcgattttattgtcgtgggacgacccgtctacaagcatcctcgccctagagaggcggtagagaagattctagagggaatcgcctag

SEQ ID NO: 17061 - protein, 228 aa, Wolinella succinogenes
MQLCIALDLPSQEENLKLLESLVGLPVWIKVGLRSYIRDGKEFLGRIRQIDPRFELFLDLKLHDIPNTMGDAAEEIASLGVGMFTLHASSGGEAMREVAARLARFPRRPLAFAVTALTSFGEEGFREIYNASLESKALDMAMLAAQNGMDGVVCSVFESQRIKSYVAQDFLTLTPGIRPFGEPSGDQKRVADLHEAKSASSDFIVVGRPVYKHPRPREAVEKILEGIA

SEQ ID NO: 17062 - DNA, 732 bp, Xanthomonas axonopodis pv
  CDS (1)..(732): transl_table=11
atgagccgcgcgccattgccgctggccgcacatgagcggctgatcttcgcgctggatgtgcccagccacgaccaagcaatcgcctgggtggaccggctcggcgattcggtgtcgttctacaagatcggcatggagctgctggcatcgggcgagtacttccacgtgctcgatgcgctggccaagcgcgacaagcgcgtgttcgtggacctcaagttcttcgacattcctgccaccgtggccggcacgattcgccgcctggcgcagtggccggtgagctattgcaccgtgcacggctggcacgccggcatgctgcaggctgccgccgaagccaaccacggcgacatgcgcctgctggcggtcacggtgctgacgtcgatgggccgcccggacctggtggcaatgggcatcgaccgcgaaccggtggacgtggtggtggagcgcgcgctggccgcacgggccgccgggatcgatggcgtgatcgcttccgggcaggaagccggcccgatccgccgtgccaccggtccggacttttcgatcgtctgccccggcatccgccccggcggcccggtcggcgacgaccagcaacgcacggtcggcgtggctcaggcatttatcgacggcgccgacgcgatcgtcgttggccgcccgatccgcctggcgagcgatcctgcagcggcggctgacgccatccaggcggagatccgcgcggcactgatgcagaacggagactaa

SEQ ID NO: 17063 - protein, 243 aa, Xanthomonas axonopodis pv
MSRAPLPLAAHERLIFALDVPSHDQAIAWVDRLGDSVSFYKIGMELLASGEYFHVLDALAKRDKRVFVDLKFFDIPATVAGTIRRLAQWPVSYCTVHGWHAGMLQAAAEANHGDMRLLAVTVLTSMGRPDLVAMGIDREPVDVVVERALAARAAGIDGVIASGQEAGPIRRATGPDFSIVCPGIRPGGPVGDDQQRTVGVAQAFIDGADAIVVGRPIRLASDPAAAADAIQAEIRAALMQNGD

SEQ ID NO: 17064 - DNA, 732 bp, Xanthomonas campestris pv
  CDS (1)..(732): transl_table=11
atgaaccgtcccccgttaccgctggccgcgcacgatcggctgatctttgcgctggatgtgcccggccatgacgaggccatcgcctgggtggaccgtttgggcgagtcggtggcgttctacaagatcggcatggaattgctggcgtcgggcgagtacttccacgtgctcgatgcgctggccaagcgcaacaagcgcgtgttcgtcgacctgaagttcttcgacattcccgccaccgtcgccggcaccattcgccgcctgtcgcaatggccggtgagctattgcaccgtgcacggctggcacgccggcatgctggaagccgccgctgcggccaaccagggcgacatgcgcctgctcgcagtgaccgtgctgacctcaatgggccggccggacttggccgcgatgggcatcgaccgcgagccggtggacgtggtggtggagcgcgcgctggccgcccaagccgctggcatcgacggggtgatcgcctcgggccaggaagcgggcatgatccgccgcgccaccggcccggccttttcgatcgtctgccccggtatccgccccggcggcccggtcggcgatgaccagcagcgcaccgtgggcgtggcgcaggccttcgccgatggcgcagatgccattgtggtcggccgcccgatccgcctggccaacgaccccgccgccgccgccgccgccatccaggccgaaatccgcgcggccgtggtgcagcaccgggattga

SEQ ID NO: 17065 - protein, 243 aa, Xanthomonas campestris pv
MNRPPLPLAAHDRLIFALDVPGHDEAIAWVDRLGESVAFYKIGMELLASGEYFHVLDALAKRNKRVFVDLKFFDIPATVAGTIRRLSQWPVSYCTVHGWHAGMLEAAAAANQGDMRLLAVTVLTSMGRPDLAAMGIDREPVDVVVERALAAQAAGIDGVIASGQEAGMIRRATGPAFSIVCPGIRPGGPVGDDQQRTVGVAQAFADGADAIVVGRPIRLANDPAAAAAAIQAEIRAAVVQHRD

SEQ ID NO: 17066 - DNA, 735 bp, Xylella fastidiosa
  CDS (1)..(735): transl_table=11
atgatgaatcacacgccgttattactggggatccgcgagcggttgatcttcgcactagacgtacccagtcggacgcaagcattggaatggatcgaccgattgggtgatgccatctccttctataagatcggcatggaattgttggcttccggcgaatatttccaggtactcgacgacttggcttcgtgtggcaaacgcgtcttcgtcgacctgaaattcttcgacatccccgctacagtcgcaggagtcatccgtcgtctttcgcagtggcccatcagctattgcacaatccatggctggcacgcgcccatgatgcaagcggcgaccgaagccaataccagcaacatgcatttactggcagtcaccgtgctgacatccatgacacgtgcagatttagcgaagatgggtatcgaccgcgaacccgttgatgtcgtgattgaacgtgcattagccgcccacatggcggggatgagtggtgtgattgcttctggacaggaagcagcagcaatccgccgcgccgtcggctctggattctcaatcgtttgtccaggcattcgcacaaaccatgtgcctcacaatgaccaacaacgcacgatgagcatcacggctgcttttgccaacggtgcagatgcgattgtggtgggacgcccaatccgaatggcagaggatccgcaagcggcagcagaggctatgcaaacagaaatcatgacggcactcactgagccatcaacataa

SEQ ID NO: 17067 - protein, 244 aa, Xylella fastidiosa
MMNHTPLLLGIRERLIFALDVPSRTQALEWIDRLGDAISFYKIGMELLASGEYFQVLDDLASCGKRVFVDLKFFDIPATVAGVIRRLSQWPISYCTIHGWHAPMMQAATEANTSNMHLLAVTVLTSMTRADLAKMGIDREPVDVVIERALAAHMAGMSGVIASGQEAAAIRRAVGSGFSIVCPGIRTNHVPHNDQQRTMSITAAFANGADAIVVGRPIRMAEDPQAAAEAMQTEIMTALTEPST

SEQ ID NO: 17068 - DNA, 735 bp, Xylella fastidiosa
  CDS (1)..(735): transl_table=11
atgatgaatcacacgccgttattactggggatccgcgagcggttgatcttcgcactagacgtacccagtcgaacgcaagcattggaatggatcgaccaattgggtgatgccatctccttctataagatcggcatggaattgttggcttccggcgaatatttccaggtactcgacgacttggcttcgcgtggcaaacgtgtcttcgtcgacctaaaattcttcgacatccccgctacagtcgcaggagtcatccgtcgtctttcgcagtggcccatcagctattgcacaatccatggctggcacgcgcccatgatgcaagcggcgaccgaagccaatacgagcaacatgcatttactggcagttaccgtgctgacatcgatgacacgtgaagatttagcgaagatgggtatcaaccgcgaacccgttgatgtcgtggttgaacgtgcattagccgcccacatggcggggatgagcggtgtgattgcttctggacaggaagcagcagcaatccgccacgccatcggctctggtttctcaatcgtttgcccaggcattcgcacaaaccatgtgcctcacaatgaccaacaacgcacgataggcatcaaggctgcttttgccaacggtgcagatgcgattgtggtgggacgcccaatccgaatggcgcaggatccgcaagcggcagcagaggctatgcaaacagaaatcatgacggcactcactgagccatcaacataa

SEQ ID NO: 17069 - protein, 244 aa, Xylella fastidiosa
MMNHTPLLLGIRERLIFALDVPSRTQALEWIDQLGDAISFYKIGMELLASGEYFQVLDDLASRGKRVFVDLKFFDIPATVAGVIRRLSQWPISYCTIHGWHAPMMQAATEANTSNMHLLAVTVLTSMTREDLAKMGINREPVDVVVERALAAHMAGMSGVIASGQEAAAIRHAIGSGFSIVCPGIRTNHVPHNDQQRTIGIKAAFANGADAIVVGRPIRMAQDPQAAAEAMQTEIMTALTEPST

SEQ ID NO: 17070 - DNA, 738 bp, Yersinia pestis
  CDS (1)..(738): transl_table=11
atgacgtccgcaactaaaactaataacagtggctcaatatcctccccaattgttgttgcgttggattatgccaataaagacgctgcgttagcctttgctgatcaggttagtccacaggattgccggttaaaagtgggcaaagagatgtttacgttgtacggccccgagcttatccgtgacttacatcagcgcggctttgacgtatttcttgatttgaaattccatgacatccctaatactaccgcgcgtgccgtggctgcggcagcagagttgggggtctggatggtcaatgttcatgccagtggcggtgcccgcatgatgtcggcggcgaaagaagccttgttgccttatggtgcacaagcccccttactgattgccgttactgtactgaccagcatggatggcgaagatctgcgggatatcggtattactatcagtccggctgagcaggccgagcggttagcgaaactgacctgggattgcggtttggatggcgtggtgtgctcggctcatgaagcggtgcgtttgaagcaagtttgtggcgaagacttctcgctcgttaccccaggtattcgcccacaaggcagtgaagccggtgaccagcggcggatcatgacacctgaacaggcggtagctgtaggtgttgattacatggtaatcggtcgcccaattacacaatctcctgatccggaaaaaacgctgcgcgaaatattggcatcactgacgaaggtggcataa

SEQ ID NO: 17071 - protein, 245 aa, Yersinia pestis
MTSATKTNNSGSISSPIVVALDYANKDAALAFADQVSPQDCRLKVGKEMFTLYGPELIRDLHQRGFDVFLDLKFHDIPNTTARAVAAAAELGVWMVNVHASGGARMMSAAKEALLPYGAQAPLLIAVTVLTSMDGEDLRDIGITISPAEQAERLAKLTWDCGLDGVVCSAHEAVRLKQVCGEDFSLVTPGIRPQGSEAGDQRRIMTPEQAVAVGVDYMVIGRPITQSPDPEKTLREILASLTKVA

SEQ ID NO: 17072 - DNA, 23 bp, Artificial sequence
  Primer sequence
atgacgttaactgcttcatcttc

SEQ ID NO: 17073 - DNA, 24 bp, Artificial sequence
  Primer sequence
ttatgcactccgctgtaaagaggc

SEQ ID NO: 17074 - protein, 292 aa, Artificial sequence
  Consensus
  Variant (2)..(2): Xaa in position 2 is any amino acid
  Variant (7)..(26): Xaa in position 7 to 26 is any amino acid
  Variant (27)..(36): Xaa in position 27 to 36 is any or no amino acid
  Variant (40)..(41): Xaa in position 40 to 41 is any amino acid
  Variant (43)..(46): Xaa in position 43 to 46 is any amino acid
  Variant (48)..(50): Xaa in position 48 to 50 is any amino acid
  Variant (52)..(53): Xaa in position 52 to 53 is any amino acid
  Variant (55)..(58): Xaa in position 55 to 58 is any amino acid
  Variant (59)..(97): Xaa in position 59 to 97 is any or no amino acid
  Variant (100)..(100): Xaa in position 100 is any amino acid
  Variant (104)..(105): Xaa in position 104 to 105 is any amino acid
  Variant (108)..(108): Xaa in position 108 is any amino acid
  Variant (111)..(125): Xaa in position 111 to 125 is any amino acid
  Variant (126)..(130): Xaa in position 126 to 130 is any or no amino acid
  Variant (133)..(135): Xaa in position 133 to 135 is any amino acid
  Variant (137)..(137): Xaa in position 137 is any amino acid
  Variant (138)..(139): Xaa in position 138 to 139 is any or no amino acid
  Variant (141)..(148): Xaa in position 141 to 148 is any amino acid
  Variant (149)..(164): Xaa in position 149 to 164 is any or no amino acid
  Variant (169)..(170): Xaa in position 169 to 170 is any amino acid
  Variant (174)..(184): Xaa in position 174 to 184 is any amino acid
  Variant (185)..(196): Xaa in position 185 to 196 is any or no amino acid
  Variant (198)..(203): Xaa in position 198 to 203 is any amino acid
  Variant (206)..(206): Xaa in position 206 is any amino acid
  Variant (210)..(213): Xaa in position 210 to 213 is any amino acid
  Variant (215)..(217): Xaa in position 215 to 217 is any amino acid
  Variant (220)..(222): Xaa in position 220 to 222 is any amino acid
  Variant (223)..(232): Xaa in position 223 to 232 is any or no amino acid
  Variant (239)..(244): Xaa in position 239 to 244 is any amino acid
  Variant (245)..(250): Xaa in position 245 to 250 is any or no amino acid
  Variant (253)..(260): Xaa in position 253 to 260 is any or no amino acid
  Variant (262)..(264): Xaa in position 262 to 264 is any amino acid
  Variant (267)..(268): Xaa in position 267 to 268 is any amino acid
  Variant (274)..(274): Xaa in position 274 is any amino acid
  Variant (276)..(277): Xaa in position 276 to 277 is any amino acid
  Variant (279)..(279): Xaa in position 279 is any amino acid
  Variant (280)..(284): Xaa in position 280 to 284 is any or no amino acid
  Variant (286)..(291): Xaa in position 286 to 291 is any amino acid
LXVALDXXXXXXXXXXXXXXXXXXXXXXXXXXXXXXKVGXXLXXXXGXXXVXXLXXXXXXXXXXXXXXXXXXXXXXXXXXXXXXXXXXXXXXXXXXXVFXDLKXXDIXNTXXXXXXXXXXXXXXXXXXXXVHXXXGXXXMXXXXXXXXXXXXXXXXXXXXXXXXLIAVXXLTSXXXXXXXXXXXXXXXXXXXXXXXAXXXXXXGLXGVVXXXXEXXXIRXXXXXXXXXXXXXVTPGIRXXXXXXXXXXXXDQXXXXXXXXAXXXGSXXIVVGRXIXXAXXXXXXPXXXXXXI

SEQ ID NO: 17075 - protein, 6 aa, Artificial sequence
  Consensus
  Variant (2)..(3): Xaa in position 2 to 3 is any or no amino acid
  Variant (5)..(5): Xaa in position 5 is any or no amino acid
AXXLXD

SEQ ID NO: 17076 - protein, 10 aa, Artificial sequence
  Consensus
  Variant (2)..(2): Xaa in position 2 is Ile, Leu or Val
  Variant (4)..(9): Xaa in position 4 to 9 is any or no amino acid
KXGXXXXXXL

SEQ ID NO: 17077 - protein, 30 aa, Artificial sequence
  Consensus
  Variant (2)..(2): Xaa in position 2 is any amino acid
  Variant (4)..(4): Xaa in position 4 is any amino acid
  Variant (6)..(6): Xaa in position 6 is Phe or Leu
  Variant (7)..(7): Xaa in position 7 is any amino acid
  Variant (10)..(10): Xaa in position 10 is Asp, Gly, Pro or Ser
  Variant (11)..(11): Xaa in position 11 is any amino acid
  Variant (12)..(12): Xaa in position 12 is Thr or Val
  Variant (13)..(29): Xaa in position 13 to 29 is any amino acid
  Variant (30)..(30): Xaa in position 30 is Phe, Ile, Leu, Met or Val
FXDXKXXDIXXXXXXXXXXXXXXXXXXXXX

SEQ ID NO: 17078 - protein, 8 aa, Artificial sequence
  Consensus
  Variant (2)..(2): Xaa in position 2 is any or no amino acid
  Variant (4)..(5): Xaa in position 4 to 5 is any or no amino acid
  Variant (7)..(7): Xaa in position 7 is any amino acid
  Variant (8)..(8): Xaa in position 8 is Ala, Asp, Glu, Gly, Asn, Ser or Thr
LXTXXSXX

SEQ ID NO: 17079 - protein, 4 aa, Artificial sequence
  Consensus
  Variant (3)..(3): Xaa in position 3 is Ile or Val
  Variant (4)..(4): Xaa in position 4 is Gln or Arg
PGXX

SEQ ID NO: 17080 - protein, 18 aa, Artificial sequence
  Consensus
  Variant (2)..(2): Xaa in position 2 is any amino acid
  Variant (3)..(4): Xaa in position 3 to 4 is any or no amino acid
  Variant (6)..(6): Xaa in position 6 is Ala, Ser or Val
  Variant (7)..(7): Xaa in position 7 is Asp, Asn, Ser or Thr
  Variant (8)..(8): Xaa in position 8 is any amino acid
  Variant (9)..(9): Xaa in position 9 is Ile, Leu, Met or Val
  Variant (10)..(10): Xaa in position 10 is Ile or Val
  Variant (11)..(11): Xaa in position 11 is any amino acid
  Variant (12)..(12): Xaa in position 12 is Ala or Gly
  Variant (14)..(14): Xaa in position 14 is any amino acid
  Variant (15)..(15): Xaa in position 15 is Ile, Leu or Val
  Variant (16)..(17): Xaa in position 16 to 17 is any amino acid
  Variant (18)..(18): Xaa in position 18 is Ala, Asp, Asn, Pro, Ser or Thr
AXXXGXXXXXXXRXXXXX

SEQ ID NO: 17081 - DNA, 216 bp, Escherichia coli
  CDS (1)..(216)
atgactgttcaggactacttattaaaatttcgcaaaatcagttcactcgaaagtctggaaaaactctacgaccatcttaattacaccctgacggacgatcaggaactgatcaatatgtatcgtgctgccgatcaccgtcgcgcagagctggtttctggcgggcgtttgtttgacctcggccaggtaccgaagtccgtctggcactatgtccaataa

SEQ ID NO: 17082 - protein, 71 aa, Escherichia coli
MTVQDYLLKFRKISSLESLEKLYDHLNYTLTDDQELINMYRAADHRRAELVSGGRLFDLGQVPKSVWHYVQ

SEQ ID NO: 17083 - DNA, 228 bp, Escherichia coli
  CDS (1)..(228): transl_table=11
atgttcttcaggaattgtacaatgaaaacaaaacaagactggctctttcagttaagacgttgctcaacactcgacacacttgaaaagattattgaaaaaaaccaaaactgcctccccccttctgagcttgagtcgtttaatgccgcagccgatcacaggcttgcggaactcacaatgaataaactctacgataaagtccctccatccgtctggaaatatgtatattag

SEQ ID NO: 17084 - protein, 75 aa, Escherichia coli
MFFRNCTMKTKQDWLFQLRRCSTLDTLEKIIEKNQNCLPPSELESFNAAADHRLAELTMNKLYDKVPPSVWKYVY

SEQ ID NO: 17085 - DNA, 210 bp, Shigella flexneri
  CDS (1)..(210): transl_table=11
atggcaaaaacaaaacaggaatggctgtatcagttacggcgatgttcatcagtcaatacgctggaaaaaattattcataaaaacagagacagtttatcaaacagtgaacgtgaatcatttaattcagcagcagaccaccggctagcggaattaatcaccggaaagttatatgacaggataccaaaagagatatggaaatatgtaaggtaa

SEQ ID NO: 17086 - protein, 69 aa, Shigella flexneri
MAKTKQEWLYQLRRCSSVNTLEKIIHKNRDSLSNSERESFNSAADHRLAELITGKLYDRIPKEIWKYVR

SEQ ID NO: 17087 - DNA, 219 bp, Salmonella typhimurium LT2
  CDS (1)..(219): transl_table=11
atgtctgataaaccattaactaaaactgattatttgatgcgtttacggcgctgtcagacaattgacactctggagcgcgtcattgagaaaaataaatatgaattgtccgacaatgagctggctgtattttactcagctgcggatcaccgtcttgcagaattgacgatgaacaaactctacgacaagatcccctcttcagtatggaaattcattcgttaa

SEQ ID NO: 17088 - protein, 72 aa, Salmonella typhimurium LT2
MSDKPLTKTDYLMRLRRCQTIDTLERVIEKNKYELSDNELAVFYSAADHRLAELTMNKLYDKIPSSVWKFIR

SEQ ID NO: 17089 - DNA, 231 bp, Salmonella typhimurium LT2
  CDS (1)..(231): transl_table=11
atggatcaactttatatgactgttcaggattatctattaaaattccgcaaaattagttcgctcgaaagtctggaaaaactgttcgaccaccttaactatacccttactgatgacatggacattgttaatatgtatcgcgctgcagatcaccgccgtgccgaactggtttccggaggacgcctgtttgatgtaggtcaggttccgcaatccgtctggcgctatgtgcaataa

SEQ ID NO: 17090 - protein, 76 aa, Salmonella typhimurium LT2
MDQLYMTVQDYLLKFRKISSLESLEKLFDHLNYTLTDDMDIVNMYRAADHRRAELVSGGRLFDVGQVPQSVWRYVQ

SEQ ID NO: 17091 - DNA, 213 bp, Salmonella enterica subsp. enterica serovar Typhi str. CT18
  CDS (1)..(213): transl_table=11
atgtccgaaactaagcaggcgtatttaatgaaatttcgtaagtgctcttctttcgacacactggaaaaagtattcgaacgactctgtgaaaaaaatgcaggtatagcatcactggaaatttccggggcatatgaccatcgaaaagctgaactgacaatgaagaaactctacgataaagtacccgcaagcgtatggacactggtccgtcagtaa

SEQ ID NO: 17092 - protein, 70 aa, Salmonella enterica subsp. enterica serovar Typhi str. CT18
MSETKQAYLMKFRKCSSFDTLEKVFERLCEKNAGIASLEISGAYDHRKAELTMKKLYDKVPASVWTLVRQ

SEQ ID NO: 17093 - DNA, 231 bp, Escherichia coli CFT073
  CDS (1)..(231): transl_table=11
atgggtagaagtatgtccgaaaaacctttaacgaaaaccgattatttaatgcgtttacgtcgttgccagacaattgacacgctggagcgtgttatcgagaaaaataaatacgaattatcagataatgaactggcggtattttactcagccgcagatcaccgcctcgccgaattgaccatgaataaactgtacgacaagatcccttcctcagtatggaaatttattcgctaa

SEQ ID NO: 17094 - protein, 76 aa, Escherichia coli CFT073
MGRSMSEKPLTKTDYLMRLRRCQTIDTLERVIEKNKYELSDNELAVFYSAADHRLAELTMNKLYDKIPSSVWKFIR

SEQ ID NO: 17095 - DNA, 231 bp, Citrobacter freundii
  CDS (1)..(231): transl_table=11
atggcggaaacagtttatcaggcgcggaggcgtttttaccttctccgttttcggcgcagccgtaacccggacacactggaaaaaatgtacgaatccatgcgggatcgtggacaggtgccgccggaggactccgaggcttttgaggctgccgccgaccatcgccgcgcagagctggcatcgggacgcatctgggataagatcccgccgcatgtctggcagtatgtaaaataa

SEQ ID NO: 17096 - protein, 76 aa, Citrobacter freundii
MAETVYQARRRFYLLRFRRSRNPDTLEKMYESMRDRGQVPPEDSEAFEAAADHRRAELASGRIWDKIPPHVWQYVK

SEQ ID NO: 17097 - DNA, 210 bp, Escherichia coli
  CDS (1)..(210): transl_table=11
atggcaaaaacaaaacaggaatggctgtatcagttacggcgatgttcatcagtcaatacgctggaaaaaattattcataaaaacagagacagtttatcgaccagtgaacgtgaatcatttaattcagcagcagaccaccggttagcagaattaatcaccggaaagttatatgacaggataccaaaagaaatatggaaatatgtaaggtaa

SEQ ID NO: 17098 - protein, 69 aa, Escherichia coli
MAKTKQEWLYQLRRCSSVNTLEKIIHKNRDSLSTSERESFNSAADHRLAELITGKLYDRIPKEIWKYVR

SEQ ID NO: 17099 - DNA, 204 bp, Wigglesworthia glossinidia endosymbiont of Glossina brevipalpis
  CDS (1)..(204): transl_table=11
atgaaaaaaatagattaccttatgcgtttaagaaaatgtagaacattagcaactttagaaagagttatagaaaaaaataaatataaattgtcaaatgatgaattagaaatttttaattcagctgctgatcatagattagcagaaataactatgaataaattgtatgataagattccaaatgttgtatggaaatatgtaagataa

SEQ ID NO: 17100 - protein, 67 aa, Wigglesworthia glossinidia endosymbiont of Glossina brevipalpis
MKKIDYLMRLRKCRTLATLERVIEKNKYKLSNDELEIFNSAADHRLAEITMNKLYDKIPNVVWKYVR

SEQ ID NO: 17101 - DNA, 204 bp, Photorhabdus luminescens subsp. laumondii TTO1
  CDS (1)..(204): transl_table=11
atgactaaaactgattatctgatgcgtttaagaaaatgcaccacgattgatacactggaacgtgtgattgaaaagaacaaatatgaactttcaggagatgaacttgaactattctactctgctgcggatcatcgcctagctgagctgaccatgaataaactgtatgatagaattccaccttcagtatggaaatatgttcgctaa

SEQ ID NO: 17102 - protein, 67 aa, Photorhabdus luminescens subsp. laumondii TTO1
MTKTDYLMRLRKCTTIDTLERVIEKNKYELSGDELELFYSAADHRLAELTMNKLYDRIPPSVWKYVR

SEQ ID NO: 17103 - DNA, 213 bp, Serratia marcescens
  CDS (1)..(213): transl_table=11
atgtctgacacaaagcagtcttatttaatgaaattccgtaagtgtagttcgttcgaaacgctcgaaaaagtatttgaaaggttatgtgaaaaaaactcgggtgtcgcctctcttgaaatttctggtgcttatgatcatcgtaaagctgaactgacaatgaaaaagttatatgacaaagttcctgcgagtgtgtggacctttgttcgcgagtaa

SEQ ID NO: 17104 - protein, 70 aa, Serratia marcescens
MSDTKQSYLMKFRKCSSFETLEKVFERLCEKNSGVASLEISGAYDHRKAELTMKKLYDKVPASVWTFVRE

SEQ ID NO: 17105 - DNA, 231 bp, Erwinia amylovora
  CDS (1)..(231): transl_table=11
atggcggaaacagtttatcaggcgcggaggcgtttttaccttctccgttttcggcgcagtcgtaacccggacacactggaaaaaatgtacgaatccatgcgggatcgtggacaggtgccgccggaggacaccgaggcttttgaggctgcggccgaccatcgccgcgcagagctggcatcgggacgcatctgggataagatcccgccgcatgtctggcagtatgtaaaataa

SEQ ID NO: 17106 - protein, 76 aa, Erwinia amylovora
MAETVYQARRRFYLLRFRRSRNPDTLEKMYESMRDRGQVPPEDTEAFEAAADHRRAELASGRIWDKIPPHVWQYVK

SEQ ID NO: 17107 - DNA, 204 bp, Klebsiella pneumoniae
  CDS (1)..(204): transl_table=11
atgacgaaacaggaatggattttacgactacggcgctgtacatcgaaggaaaccctggaaagggttatagaaaaaaataaatattctctgtcagatgatgagcttgagcatttcaatgccgcggttgatcaccggctggcggagatgacgatgggaaagttgtatgaccgggtaccgccaggtgtctggaaatttgtgaaatag

SEQ ID NO: 17108 - protein, 67 aa, Klebsiella pneumoniae
MTKQEWILRLRRCTSKETLERVIEKNKYSLSDDELEHFNAAVDHRLAEMTMGKLYDRVPPGVWKFVK

SEQ ID NO: 17109 - DNA, 210 bp, Escherichia coli O157:H7
  CDS (1)..(210): transl_table=11
atggaaaaaacaaaacaggaatggctgtatcaattacggcgatgttcatcagtcaatacgctggaaaaaattattcataaaaacagagacagtttatcgaccagtgaacgtgaatcatttaattcagcagcagaccaccggttagcagaattaatcaccggaaagttatatgacaggataccaaaagaaatatggaaatatgtaaggtaa

SEQ ID NO: 17110 - protein, 69 aa, Escherichia coli O157:H7
MEKTKQEWLYQLRRCSSVNTLEKIIHKNRDSLSTSERESFNSAADHRLAELITGKLYDRIPKEIWKYVR

SEQ ID NO: 17111 - DNA, 204 bp, Erwinia carotovora subsp. atroseptica SCRI1043
  CDS (1)..(204)
atgaaaaaaatcgactatttgatgcgtttgcgtaaatgcacaaccattgacacactcgaacgtgttattgaaaaaaacaagtatgagctctccaatgatgaactggagatgttcttttcagcagccgatcatcgcctggctgaactgacaatgaacaaactctacgacaaaatccctaccgcagtatggcgctacgtacgttaa

SEQ ID NO: 17112 - protein, 67 aa, Erwinia carotovora subsp. atroseptica SCRI1043
MKKIDYLMRLRKCTTIDTLERVIEKNKYELSNDELEMFFSAADHRLAELTMNKLYDKIPTAVWRYVR

SEQ ID NO: 17113 - DNA, 210 bp, Escherichia coli
  CDS (1)..(210): transl_table=11
atggcgaaaacaaaacaggaatggctgtatcagttacggcgatgttcatcagtcaatacgctggaaaaaattattcataaaaacagagacagtttattaaacagtgaacgtgaatcatttaattcagcagcagaccaccggttagcggaattaatcaccggaaagttatatgacaggataccaaaagagatatggaaatatgtaaggtaa

SEQ ID NO: 17114 - protein, 69 aa, Escherichia coli
MAKTKQEWLYQLRRCSSVNTLEKIIHKNRDSLLNSERESFNSAADHRLAELITGKLYDRIPKEIWKYVR

SEQ ID NO: 17115 - DNA, 285 bp, Salmonella enterica subsp. enterica serovar Choleraesuis str
  CDS (1)..(285): transl_table=11
gtgcggttttgtttattttttatcagtgactactccgttggcattatatttaatatggatcaactttatatgactgttcaggattatctattaaaattccgcaaaattagttcgctcgaaagtctggaaaaactgttcgaccaccttaactatacccttactgatgacatggacattgttaatatgtatcgcgctgcagatcaccgccgtgccgaactggtttccggaggacgcctgtttgatgtaggtcaggttccgcaatccgtctggcgctatgtgcaataa

SEQ ID NO: 17116 - protein, 94 aa, Salmonella enterica subsp. enterica serovar Choleraesuis str
MRFCLFFISDYSVGIIFNMDQLYMTVQDYLLKFRKISSLESLEKLFDHLNYTLTDDMDIVNMYRAADHRRAELVSGGRLFDVGQVPQSVWRYVQ

SEQ ID NO: 17117 - DNA, 210 bp, Escherichia coli
  CDS (1)..(210): transl_table=11
atggcgaaaacaaaacaggaatggctgtatcagttacggcgatgttcatcagccaatacgctggaaaaaattattcgtaaaaacagagacagtttattaaacagtgaacgtgaatcatttaattcagcagcagaccaccggttagcggaattaatcaccggaaagttatatgacaggataccaaaagagatatggaaatatgtaaggtaa

SEQ ID NO: 17118 - protein, 69 aa, Escherichia coli
MAKTKQEWLYQLRRCSSANTLEKIIRKNRDSLLNSERESFNSAADHRLAELITGKLYDRIPKEIWKYVR

SEQ ID NO: 17119 - DNA, 387 bp, Escherichia coli
  CDS (1)..(387): transl_table=11
atgtgtaacgctacgttaattgcaatatctggttatggctttataccttcagtattaaaaatattttttaccggagaaacagggaagtggaaagacttccgggatgacgtcagaatacgttattctgatggtattatgttaacgttaatcacagcacaaaataacgagaggataatggaagttaagaccaaagaagactggctgtatcagtttcgccgttgttcatcccgggagacactagaaaaagtgatttcccacacgcgttataagcttactccagcggagatggaagccttcaactctgcggtcgatcaccggctggcagaactgaccatgaacaaactgtacgatcgtgttcccgcttcagtctggaaatatgttacctga

SEQ ID NO: 17120 - protein, 128 aa, Escherichia coli
MCNATLIAISGYGFIPSVLKIFFTGETGKWKDFRDDVRIRYSDGIMLTLITAQNNERIMEVKTKEDWLYQFRRCSSRETLEKVISHTRYKLTPAEMEAFNSAVDHRLAELTMNKLYDRVPASVWKYVT

SEQ ID NO: 17121 - DNA, 210 bp, Escherichia coli
  CDS (1)..(210): transl_table=11
atggcaaaaacaaaacaggaatggctgtatcagttacggcgatgttcatcagtcaatacgctggaaaaaattattcataaaaacagagacagtttatcgaacagtgaacgtgaatcatttaattcagcagcagatcaccggttagcagaattaatcaccggaaagttatatgacagtataccaaaagaaatatggaaatatgtaaggtaa

SEQ ID NO: 17122 - protein, 69 aa, Escherichia coli
MAKTKQEWLYQLRRCSSVNTLEKIIHKNRDSLSNSERESFNSAADHRLAELITGKLYDSIPKEIWKYVR

SEQ ID NO: 17123 - DNA, 219 bp, Escherichia coli
  CDS (1)..(219): transl_table=11
atgtccgaaaaacctttaacaaaaaccgattatttaatgcgtttacgtcgttgccagacaattgacacgctggagcgtgttatcgagaaaaataaatacgaattatcagataatgaactggcggtattttactcagccgcagatcaccgcctcgccgaattgaccatgaataaactgtacgacaagatcccttcctcagtatggaaatttattcgctaa

SEQ ID NO: 17124 - protein, 72 aa, Escherichia coli
MSEKPLTKTDYLMRLRRCQTIDTLERVIEKNKYELSDNELAVFYSAADHRLAELTMNKLYDKIPSSVWKFIR

SEQ ID NO: 17125 - DNA, 216 bp, Salmonella paratyphi
  CDS (1)..(216): transl_table=11
atgactgttcaggattatctattaaaattccgcaaaattagttcgctcgaaagtctggaaaaactgttcgaccaccttaactatacccttactgatgacatggacatcgttaatatgtatcgcgctgcagatcaccgccgtgccgagctggtttccggaggacgcctgtttgatgtaggtcaggttccgcaatccgtctggcgctatgtgcaataa

SEQ ID NO: 17126 - protein, 71 aa, Salmonella paratyphi
MTVQDYLLKFRKISSLESLEKLFDHLNYTLTDDMDIVNMYRAADHRRAELVSGGRLFDVGQVPQSVWRYVQ

SEQ ID NO: 17127 - DNA, 204 bp, Yersinia enterocolitica
  CDS (1)..(204): transl_table=11
atgacaaaaactgactacctgatgcgtttaagaaaatgtacgactattgatacattggaacgtgtaattgaaaaaaataagtacgaactttctgacgatgagctggaattgttttactcagcagcagaccaccgcttagctgaactcacaatgaataaactttatgataaaattccacctactgtatggcaacatgtgaaatag

SEQ ID NO: 17128 - protein, 67 aa, Yersinia enterocolitica
MTKTDYLMRLRKCTTIDTLERVIEKNKYELSDDELELFYSAADHRLAELTMNKLYDKIPPTVWQHVK

SEQ ID NO: 17129 - DNA, 26 bp, Artificial sequence
  Primer sequence
atgactgttcaggactacttattaaa

SEQ ID NO: 17130 - DNA, 23 bp, Artificial sequence
  Primer sequence
ttattggacatagtgccagacgg

SEQ ID NO: 17131 - protein, 72 aa, Artificial sequence
  Consensus
  Variant (4)..(4): Xaa in position 4 is any amino acid
  Variant (29)..(29): Xaa in position 29 is any amino acid
  Variant (34)..(35): Xaa in position 34 to 35 is any or no amino acid
  Variant (39)..(39): Xaa in position 39 is any amino acid
  Variant (54)..(54): Xaa in position 54 is any amino acid
  Variant (55)..(57): Xaa in position 55 to 57 is any or no amino acid
  Variant (65)..(65): Xaa in position 65 is any amino acid
MTKXDYLMRLRKCSSIDTLEKVIEKNKYXLSDDXXELEXFYSAADHRLAELTMXXXXKLYDKIPXSVWKYVR

SEQ ID NO: 17132 - protein, 10 aa, Artificial sequence
  Consensus
  Variant (2)..(2): Xaa in position 2 is Lys or Arg
  Variant (3)..(3): Xaa in position 3 is any amino acid
  Variant (4)..(4): Xaa in position 4 is Gln, Ser or Thr
  Variant (5)..(5): Xaa in position 5 is Ser or Thr
  Variant (6)..(6): Xaa in position 6 is any amino acid
  Variant (7)..(7): Xaa in position 7 is Asp, Glu or Asn
  Variant (8)..(8): Xaa in position 8 is Ser or Thr
RXXXXXXXLE

SEQ ID NO: 17133 - protein, 8 aa, Artificial sequence
  Consensus
  Variant (2)..(2): Xaa in position 2 is Ala or Val
  Variant (6)..(6): Xaa in position 6 is any amino acid
AXDHRXAE

SEQ ID NO: 17134 - protein, 5 aa, Artificial sequence
  Consensus
  Variant (2)..(2): Xaa in position 2 is any amino acid
  Variant (3)..(3): Xaa in position 3 is Ala, Gly, Ser, Thr or Val
PXXVW

SEQ ID NO: 17135 - DNA, 1470 bp, Escherichia coli K12
  CDS (1)..(1470): transl_table=11
atggtttccgaaactaaaaccacagaagcgccgggcttacgccgtgaattaaaggcgcgtcacctgacgatgattgccattggcggttccatcggtacaggtctttttgttgcctctggcgcaacgatttctcaggcaggtccgggcggggcattgctctcgtatatgctgattggcctgatggtttacttcctgatgaccagtctcggtgaactggctgcatatatgccggtttccggttcgtttgccacttacggtcagaactatgttgaagaaggctttggcttcgcgctgggctggaactactggtacaactgggcggtgactatcgccgttgacctggttgcagctcagctggtcatgagctggtggttcccggatacaccgggctggatctggagtgcgttgttcctcggcgttatcttcctgctgaactacatctcagttcgtggctttggtgaagcggaatactggttctcactgatcaaagtcacgacagttattgtctttatcatcgttggcgtgctgatgattatcggtatcttcaaaggcgcgcagcctgcgggctggagcaactggacaatcggcgaagcgccgtttgctggtggttttgcggcgatgatcggcgtagctatgattgtcggcttctctttccagggaaccgagctgatcggtattgctgcaggcgagtccgaagatccggcgaaaaacattccacgcgcggtacgtcaggtgttctggcgaatcctgttgttctatgtgttcgcgatcctgattatcagcctgattattccgtacaccgatccgagcctgctgcgtaacgatgttaaagacatcagcgttagtccgttcaccctggtgttccagcacgcgggtctgctctctgcggcggcggtgatgaacgcagttattctgacggcggtgctgtcagcgggtaactccggtatgtatgcgtctactcgtatgctgtacaccctggcgtgtgacggtaaagcgccgcgcattttcgctaaactgtcgcgtggtggcgtgccgcgtaatgcgctgtatgcgacgacggtgattgccggtctgtgcttcctgacctccatgtttggcaaccagacggtatacctgtggctgctgaacacctccgggatgacgggttttatcgcctggctggggattgccattagccactatcgcttccgtcgcggttacgtattgcagggacacgacattaacgatctgccgtaccgttcaggtttcttcccactggggccgatcttcgcattcattctgtgtctgattatcactttgggccagaactacgaagcgttcctgaaagatactattgactggggcggcgtagcggcaacgtatattggtatcccgctgttcctgattatttggttcggctacaagctgattaaaggaactcacttcgtacgctacagcgaaatgaagttcccgcagaacgataagaaataa

SEQ ID NO: 17136 - protein, 489 aa, Escherichia coli K12
MVSETKTTEAPGLRRELKARHLTMIAIGGSIGTGLFVASGATISQAGPGGALLSYMLIGLMVYFLMTSLGELAAYMPVSGSFATYGQNYVEEGFGFALGWNYWYNWAVTIAVDLVAAQLVMSWWFPDTPGWIWSALFLGVIFLLNYISVRGFGEAEYWFSLIKVTTVIVFIIVGVLMIIGIFKGAQPAGWSNWTIGEAPFAGGFAAMIGVAMIVGFSFQGTELIGIAAGESEDPAKNIPRAVRQVFWRILLFYVFAILIISLIIPYTDPSLLRNDVKDISVSPFTLVFQHAGLLSAAAVMNAVILTAVLSAGNSGMYASTRMLYTLACDGKAPRIFAKLSRGGVPRNALYATTVIAGLCFLTSMFGNQTVYLWLLNTSGMTGFIAWLGIAISHYRFRRGYVLQGHDINDLPYRSGFFPLGPIFAFILCLIITLGQNYEAFLKDTIDWGGVAATYIGIPLFLIIWFGYKLIKGTHFVRYSEMKFPQNDKK

SEQ ID NO: 17137 - DNA, 1464 bp, Pseudomonas aeruginosa PAO1
  CDS (1)..(1464): transl_table=11
atgactgacctgaacaccagccagggccagcaattgcggcgggtgctcaagccgcgccacctgaacatgatcgccatcggcggctccatcggcaccgggctgttcgtcgcctccggggccacagtggccaccgccgggcccggcggtgcgctgctttcctacgcactgatcgggctgatggtgtacttcctcatgaccagtctcggcgagatggccgcctacatgcccgtttccggctcattctgtacctatggcagccggttcgtcgaagatggcttcggtttcgccctcggctggaactactggtacaactgggcggtgaccatcgccgcggagctggtggcggcgcaactggtgatgagtttctggttccccgaggtgccgggcatctactggagcgcgatcttcctgggcatcatgttcggcctcaacgtgatttccgcgcgcggcttcggcgagagcgaattctggttcgccctgatcaaggtagtcacggtggtgatcttcatcggcgtcggcctggcgaccatcttcggcatcatgcatggcgtggagtcgcccggcttcagcaacttcaccatgggcgacgcgcccttcgtcggcggcttccaggcgatggtcggggtggcgatgatcgccggcttctcgttccagggcaccgaactgatcggcatcgccgccggtgaatcggaaaatccgcggaagaacatcccgatcgccattcgccaggtgttctggcgcatcctgatgttctacatcctggcgatcttcgtgatcggcatgctgattccctacaccgacccgaacctgctgaagaacgatgccagcgacatcagcgtgtcgcccttcaccctgctcttcgagcgcgccggcttcgccgcggcggccggggtgatgaacgcagtgatcctctcggcgatcctctccgccggcaactccggcatgtacgcctcgacccggatgctctacaacctcgccctcgagggcaaggcaccgcgcctgttctcccgcgtctcgcgcagcggcgtgccacgcaacgcgctgtacgccactaccctggtcggcgccctgtgcttcctcacttcggccttcggcgacagcaccgtctacacatggctgctgaacacctcgggcatgtgcggcttcatcgcctggctgggcatcgccatctcccactatcgcttccgcaagggttacctggcccagggcggccgcctggaagacctgccctaccgggccaagctgttccccttcgggccgctgttcgccttcgccctgtgcatggtcatcaccctcgggcagaactaccaggcgctggtgggcgaacgcatcgactggatcggcctcctcgccacctatatcagcctgccgctgttcctggcgatctggctgggataccgctggaagaagcgcgcacgcttcgttcgctaccacgaaatggacgtcagcccgaccaatacctga

SEQ ID NO: 17138 - protein, 487 aa, Pseudomonas aeruginosa PAO1
MTDLNTSQGQQLRRVLKPRHLNMIAIGGSIGTGLFVASGATVATAGPGGALLSYALIGLMVYFLMTSLGEMAAYMPVSGSFCTYGSRFVEDGFGFALGWNYWYNWAVTIAAELVAAQLVMSFWFPEVPGIYWSAIFLGIMFGLNVISARGFGESEFWFALIKVVTVVIFIGVGLATIFGIMHGVESPGFSNFTMGDAPFVGGFQAMVGVAMIAGFSFQGTELIGIAAGESENPRKNIPIAIRQVFWRILMFYILAIFVIGMLIPYTDPNLLKNDASDISVSPFTLLFERAGFAAAAGVMNAVILSAILSAGNSGMYASTRMLYNLALEGKAPRLFSRVSRSGVPRNALYATTLVGALCFLTSAFGDSTVYTWLLNTSGMCGFIAWLGIAISHYRFRKGYLAQGGRLEDLPYRAKLFPFGPLFAFALCMVITLGQNYQALVGERIDWIGLLATYISLPLFLAIWLGYRWKKRARFVRYHEMDVSPTNT

SEQ ID NO: 17139 - DNA, 1413 bp, Pseudomonas aeruginosa PAO1
  CDS (1)..(1413): transl_table=11
atggctgacggcaaggaaaggctgcaactcacccgggccctggcgagccgccacatcttcatgctgtccctcggcggggtgatcggcaccgggctgttcatgggctccggcgtgaccatcaaccagggcggcccggccggcgcggtgctggcctacctggtggccggggtgctgatgtacctggtgatggtctgcctcggcgagctgtcggtgcagatgccggtctccggttcgttccaggcccacgcgacgcgtttcatcggcccggcgactggcttcatgatcggctgggtctactggatgagctgggcctccacggtaggcctggaattcaccgcggccgggatgctcatgacccgctggttcccggaggtgcccgtgtggctatggtcgggtttcttcgtggtcgtgctgttctccctcaatgccctggcgacccgcgctttcggcgaggccgagtactggttcgccgggatcaaggtggcggcgatcctggtgttcatcgtggtcggggggctggtgatcttcggcggtatcgaactgaagagcggtgcgccggcgccgatgttctccaacctggtcggcgagcggctgttccccaacggcctgtcggcggtgttcgcggtgatgatgacggtggtctatgccttccagggttgcgagatcatgggcgtcgccgccggcgagaccgagcgaccggagaagagcatcccgcgggcggtgcgcaacgtggtgttccgcgtactgatcttctacgtgctggccatcgtcgtgctttccgccatcattccctggcaacaggccgggctgatggaaagcccgttcgtgcaggtgttcgacatggtcgggattccctacgcggcggacctgatgaacttcgtcatcctcaccgccatcctctcggtaggcaactcgggcctgtacgcctcgacgcggatcctctgggcgatgtccaggtccggcatggccccgcgcggcctgtcgaagctcagcgcgcgcggcgtgccgctctacgcgttgctgatcaccctgtgcttcgccctgctctcgttgctgaccagcgtggtcgccgccgacaccctgttcatggtgctgatggcggtgagcgggatgtccggcaccgtcacctggatcgtcatcgcctacgcccaataccgcttccgccgcgagcacatggccagcggcggcacggtcgccgagctgaaatatgccgcgccgctgttcccgctggtgccgctggcctgcatcgccgtgtgctgctcgctgttcgtcttcctcgccctcgatcccacccagcggccgtccttgtactggggcttcggcttcatcgccgcctgctacctggcctattacgtggttcgtcgccggcagccgcagggactgggcgaccccgccctgggacgggccggctga

SEQ ID NO: 17140 - protein, 470 aa, Pseudomonas aeruginosa PAO1
MADGKERLQLTRALASRHIFMLSLGGVIGTGLFMGSGVTINQGGPAGAVLAYLVAGVLMYLVMVCLGELSVQMPVSGSFQAHATRFIGPATGFMIGWVYWMSWASTVGLEFTAAGMLMTRWFPEVPVWLWSGFFVVVLFSLNALATRAFGEAEYWFAGIKVAAILVFIVVGGLVIFGGIELKSGAPAPMFSNLVGERLFPNGLSAVFAVMMTVVYAFQGCEIMGVAAGETERPEKSIPRAVRNVVFRVLIFYVLAIVVLSAIIPWQQAGLMESPFVQVFDMVGIPYAADLMNFVILTAILSVGNSGLYASTRILWAMSRSGMAPRGLSKLSARGVPLYALLITLCFALLSLLTSVVAADTLFMVLMAVSGMSGTVTWIVIAYAQYRFRREHMASGGTVAELKYAAPLFPLVPLACIAVCCSLFVFLALDPTQRPSLYWGFGFIAACYLAYYVVRRRQPQGLGDPALGRAG

SEQ ID NO: 17141 - DNA, 1434 bp, Lactococcus lactis subsp. lactis Il1403
  CDS (1)..(1434): transl_table=11
atggaaaatcaaaatcaggtcaagcgcaaccttaaacagcgccacatcaccatgattgcattgggtggtacaattggaacaggtttatttttaacttcaggagcaacaattagtcaagcaggtccctggggcgcagttcttgcttattgttttattggtattatggtttacttcgtaatgacttccttaggtgagatggcgacatatttgcctacctcaggttcattctccgattatggcggtcgttatgttgatcctgcttttggctttgcattagggtggaactattggctcaatggagcgattaccattgccgtggatttaacgacagcaggattgattacgcagttttggttcccgcaccttccgtcttggatattttcaggaattgcgacggtcttaatttttattattaatgttatggcggttggagcattcggggaaacagaatattggttatcaacgattaaagtgattacgattgtcctctttttagctattggtttacttaccatttttggagttttgggacaaggaaatgttgatgtcgttgccaatttaagtgctggcaatcatggctttgttggtggaatttcaggatttgttggagttttacttattgccggattctcttttcaaggaactgagcttttagggattaccgcaggtgaatctgaagacccaggtaagtcaattcctaaagcaatgaactctattttctggcgtatcttacttttttacatcttttcaatcattgtgattgctgcaattatcaattttaaagaccctcgcttgttaaatccaaattcgacagctgtcatgagtccatttactattgtctttaaaaatattggctttgcagttgcagcttcagttatgaatgcggtcattcttacttcggtaatttcatcagcaaattcagtaatgtatgcttcaacacgtattctttattcattgggacaagaaaaaggcgcaccaaaattctttggacgaacagcaaaaaatggaattcctttttatgccctattagccacaacaattatttgttttattgctttcttaactggaatatttggaacgcaaatttatcttttcttggttgatttatcatcactaacaggctttcttgcttggcttggaatttctatcagtcatatccgttttagaagagcctatattgctcaagggaaaaaattggaagatcttccttacaaagctaaatggttcccatttggtccaattgttgcgctcttgatgactgcggcgattgccattaatcttgacccagccatgctctttagtgagcactggggtgaaggcttagctttatacgctgcaattcctattttcattattctttattttggttataaatggaagtataatacaaaaattattccacttgaagaagtagatttgagtcgggaaaaataa

SEQ ID NO: 17142 - protein, 477 aa, Lactococcus lactis subsp. lactis Il1403
MENQNQVKRNLKQRHITMIALGGTIGTGLFLTSGATISQAGPWGAVLAYCFIGIMVYFVMTSLGEMATYLPTSGSFSDYGGRYVDPAFGFALGWNYWLNGAITIAVDLTTAGLITQFWFPHLPSWIFSGIATVLIFIINVMAVGAFGETEYWLSTIKVITIVLFLAIGLLTIFGVLGQGNVDVVANLSAGNHGFVGGISGFVGVLLIAGFSFQGTELLGITAGESEDPGKSIPKAMNSIFWRILLFYIFSIIVIAAIINFKDPRLLNPNSTAVMSPFTIVFKNIGFAVAASVMNAVILTSVISSANSVMYASTRILYSLGQEKGAPKFFGRTAKNGIPFYALLATTIICFIAFLTGIFGTQIYLFLVDLSSLTGFLAWLGISISHIRFRRAYIAQGKKLEDLPYKAKWFPFGPIVALLMTAAIAINLDPAMLFSEHWGEGLALYAAIPIFIILYFGYKWKYNTKIIPLEEVDLSREK

SEQ ID NO: 17143 - DNA, 1521 bp, Lactococcus lactis subsp. lactis Il1403
  CDS (1)..(1521): transl_table=11
ttgagtctgagtcaaacaagtcggtgtagaataaattttattagggagagaattttggaaaattcttcaaactcaactactgagacgcaagtaaaacgcggcttaaaatcacgtcatgtttccatgattgcccttggcggaacaatcggaactggattgtttctgacttcaggcgatgtcattcacacggcaggaccatttggtgcactgactgcctatgttcttatcggagcaatggtttacttcctcatgacatcacttggtgaaatggccacttatttacccacttctggttctttttcagactatggaacacgttatgttgacccagcttttggttttgctctaggttggaattactggttaaactgggcaattaccgtagcggttgatttaacagccgttgccctttgtatcaaattctggttaccagatgttccaagttggattttttcactgattgccttaattattgtctttgcaatcaatgccttatcagttaaaacttttggcgaaactgaatattggttgtcagccattaaaattactgttgttgttttattcttgattattggtttcttatctatttttggaattatgggcggtcatattgacgtcgctaaaaatctttcagttggtaatcatggttttgtcggaggacttggtagtttcactaccggcggagggattctcggcgtactcttagtcgctggtttctctttccaaggaacagaattgctcggaattacagctggcgaagctgaaaatcctgaaaaatcaattcctaaagctatgaactctatcttctggcgtattcttgtcttttatatcttatctatcttcgtgatggcggctatcattccatttaccgacccacacttagttggaggaaattcagctgctcaaagccctttcacaattgtatttgaacgtgttggtctctctattgcagcttctatcatgaacgccgttgttttaacttctgtcgtttcagcagcaaattctggaatgtatgcctctactcggatgctttattcactagctaaagatggtggcgcaccaaagattttctcaaaaacttcaaaaaacgggatccctttcattgctttattagctacaactgctattgctttactcacattcttgacatcaatttacggagttagcttctttacattcctcgtctcagcctctggtttaacaggatttattgcttggattgggattgcaattagccacttccgcttccgccgcgcctatgttgctcaaggaaaagatgttaaaaaattaccttatcatgcaaaactattcccatttggtccaatcttagccttaattatgaccgttttagtcacactcggccaagacccaatgcttctttttggtaaaacttgggtgcaaggtgtcatcatgtatgccgcaattccactcttcttcatcctttacttgggttataaatttaaaaacaaaacgaaacttatcccccttaaagaggttgatttaagtcgtcataaagattaa

SEQ ID NO: 17144 - protein, 506 aa, Lactococcus lactis subsp. lactis Il1403
MSLSQTSRCRINFIRERILENSSNSTTETQVKRGLKSRHVSMIALGGTIGTGLFLTSGDVIHTAGPFGALTAYVLIGAMVYFLMTSLGEMATYLPTSGSFSDYGTRYVDPAFGFALGWNYWLNWAITVAVDLTAVALCIKFWLPDVPSWIFSLIALIIVFAINALSVKTFGETEYWLSAIKITVVVLFLIIGFLSIFGIMGGHIDVAKNLSVGNHGFVGGLGSFTTGGGILGVLLVAGFSFQGTELLGITAGEAENPEKSIPKAMNSIFWRILVFYILSIFVMAAIIPFTDPHLVGGNSAAQSPFTIVFERVGLSIAASIMNAVVLTSVVSAANSGMYASTRMLYSLAKDGGAPKIFSKTSKNGIPFIALLATTAIALLTFLTSIYGVSFFTFLVSASGLTGFIAWIGIAISHFRFRRAYVAQGKDVKKLPYHAKLFPFGPILALIMTVLVTLGQDPMLLFGKTWVQGVIMYAAIPLFFILYLGYKFKNKTKLIPLKEVDLSRHKD

SEQ ID NO: 17145 - DNA, 1470 bp, Clostridium acetobutylicum ATCC 824
  CDS (1)..(1470): transl_table=11
gtgtctgcagagttagagaaagataaaaatggtgaattaaagagaagtttaaaaacacgacatatgaatatgattgccattggaggatcaattggtacaggtttgttttttactagtggtaatacaataagtacggcgggtccaggaggtgctattgcagcctatgctattatgggggtgcttgtgtattttttaatgacatcgctgggagaaatggctacaatgataccaaacgctggttcatttgaaacctatgcctcaaagtttgtagatccagcattaggttttgcattaggttggaactactggtttaactgggcgataactgttgcagcagaattagttgcaggcggacttgttgttaagttttggttgccaaatacagggacaactatttggagtataggatttttagttattttatttggtctgaatttgctatctgcaaaagcatatggtgaaggagaatactggttttcaagtataaaagtcgtaacaattatagtatttcttattatgggagtgcttattatatttggaataatgggcggacatggagtaggttttagcaattgggtgcttaaggatggaaaagggaattcagcaccatttgtaggtggaggaatggctatattaatgagctttttaactgccggattttcttttgctggcacagaggtagtaggtttagctgctggtgaagctgaaaatccggaaaaggatgtaccaaaagcaataaattcagttttttggagaatacttattttttatattggtgcaattatagttattggttttatcattccttttaatgattctaatttgcttaaaaatggtgtatcagatatagcgtatagtccatttactatagtgtttaaaagatctggaattgctcttgcagcgtcaataatgaatgcagttatactaacttctgtgctttcctgtggtaattcaggtctttatgcaggttcacgtatgatgtatgctatggctaaagaaggaaaagcaccaaagatatttggtaaattaaataaaagtggtgtaccactaaatgctcttatttttacttctgttattgcatcaacagcgttttttgcatcgcttattggtgacggtaagatatattcaattctttacaatttatcgggtataacaacatttataacatggcttggaatagcaatttgtcattatagatttagaaaagcttatattgctcaaggaaataaaattgaagatttaaagtataaggctttattgtatccatttggtcctatatttgcaatgatactttgtacagtagttttatttggtgctaatatatgggtgtttcaagcaaaaaccttcagttggttcgattttacaactaactatggaagcattcctttatttttatgtttttattttatatataaaaaagtgcataaaacaaggatagtttctttaatggagtgtgatcttaataagtag

SEQ ID NO: 17146 - protein, 489 aa, Clostridium acetobutylicum ATCC 824
MSAELEKDKNGELKRSLKTRHMNMIAIGGSIGTGLFFTSGNTISTAGPGGAIAAYAIMGVLVYFLMTSLGEMATMIPNAGSFETYASKFVDPALGFALGWNYWFNWAITVAAELVAGGLVVKFWLPNTGTTIWSIGFLVILFGLNLLSAKAYGEGEYWFSSIKVVTIIVFLIMGVLIIFGIMGGHGVGFSNWVLKDGKGNSAPFVGGGMAILMSFLTAGFSFAGTEVVGLAAGEAENPEKDVPKAINSVFWRILIFYIGAIIVIGFIIPFNDSNLLKNGVSDIAYSPFTIVFKRSGIALAASIMNAVILTSVLSCGNSGLYAGSRMMYAMAKEGKAPKIFGKLNKSGVPLNALIFTSVIASTAFFASLIGDGKIYSILYNLSGITTFITWLGIAICHYRFRKAYIAQGNKIEDLKYKALLYPFGPIFAMILCTVVLFGANIWVFQAKTFSWFDFTTNYGSIPLFLCFYFIYKKVHKTRIVSLMECDLNK

SEQ ID NO: 17147 - DNA, 1476 bp, Clostridium acetobutylicum ATCC 824
  CDS (1)..(1476): transl_table=11
atgacgtctaaaaaagaacaaaagaatgagcttaagagaacactgacggcaaggcatatgaatatgatcgcaataggaggctctgttggaactggacttttttttgcaagtggaagtgcaataagcacagcaggaccaggaggagcgcttcttgcatatataatcacgggaattctagtttatgtactaatgatgtcactaggagaaatgtcaacactattacctatttcgggttcttttgaaacctatgctactagatttgtagatccagcacttggatttactcttggctggaactactggttttcttggtccatatgtgtggcatcggaattagttgcaggatcacttatagtgaagttttggtttcctcatactaatacaaccatttggagcataggatttttacttgtaatttttatactaaatattctttctgctaaagcttatggagaaagcgaatattggttttcaagtattaaggtagttactataatcatatttatcatagttggagtacttatgatatttggaattatgggaaatgattcacctggttttaaaaattgggttatatcgggaaatggttcgagagcaccgtttgtaggtggaatagcagcaattataaatgtttttttagttgcaggcttttcgttttcaggtacagaaatagttggacttgcagctggagaaacagaaaatcctgaggaaaacgtcccaaaggcaattaaatctgttttttggcgtatactactattttatatttgtgcaattataataataggctttctagttccttttaatgacaagaatctattaaaaagtggagttaataatatagcatatagtccatttacaatggtatttgcaaagtgtggaatagcttttgcggcaagtgctatgaatgctgtaattttaacctcagtactttcttgcggaaactcaggactttatgtatcatcacgtatgctatattctcttgcaaaagaaggaaaagcacctaagtttttagcaaaggtaaacaagcaaggtgtacctatgaatgcgttatatgcaacaactttagttgcatcctctgcatttttgtcatcacttattggtgaaggaaagatatactatgttttatacaatgcatctggaataacagcattgtttgcatggcttggtataggaatctgtcattacaggtttagaaaagcttatgtagcgcaaggaagagatttaaaggacttgaagtttaaggctaagttttatccttatggtcctattatggcaatagtgttatgcgtagtaataatatttggagctaacatatggatatttcaggctccaaagttcagttggtttgattttataagtaattacatttgtattcctatatttatagcactatatatagcatataaatacattaagaaaactaagctagttccgcttgaggaatgcgattttgaatataacggaaaagataaataa

SEQ ID NO: 17148 - protein, 491 aa, Clostridium acetobutylicum ATCC 824
MTSKKEQKNELKRTLTARHMNMIAIGGSVGTGLFFASGSAISTAGPGGALLAYIITGILVYVLMMSLGEMSTLLPISGSFETYATRFVDPALGFTLGWNYWFSWSICVASELVAGSLIVKFWFPHTNTTIWSIGFLLVIFILNILSAKAYGESEYWFSSIKVVTIIIFIIVGVLMIFGIMGNDSPGFKNWVISGNGSRAPFVGGIAAIINVFLVAGFSFSGTEIVGLAAGETENPEENVPKAIKSVFWRILLFYICAIIIIGFLVPFNDKNLLKSGVNNIAYSPFTMVFAKCGIAFAASAMNAVILTSVLSCGNSGLYVSSRMLYSLAKEGKAPKFLAKVNKQGVPMNALYATTLVASSAFLSSLIGEGKIYYVLYNASGITALFAWLGIGICHYRFRKAYVAQGRDLKDLKFKAKFYPYGPIMAIVLCVVIIFGANIWIFQAPKFSWFDFISNYICIPIFIALYIAYKYIKKTKLVPLEECDFEYNGKDK

SEQ ID NO: 17149 - DNA, 1455 bp, Staphylococcus aureus subsp. aureus Mu50
  CDS (1)..(1455): transl_table=11
atggaagataataaaatgaaccgtagtcttaactcaagacacatttccatgattgctataggtggtgcaattgggactggtctatttgtagctactggtaatatcatttctcaagctggtcctggaggcgctatactcgcttatcttgttattggtgtcatgctatatttcttaatgtcatcaattggagagttggcaacattttatccagtatcaggttcattcagctcttattcaacacgctttattgactcatctcttggctttaccatgggatggttgtattgggcattgtggtcattagttacaagtgttgatgtcatagtagcgtcaaatgtgctttatttctgggacacatttaaatttttccaccccattacttggagcttaatctttattacaattttactattattaaacattttttctgtaaaatcatttggagaaactgagttttggttatcattgattaaagtgttaacaattatcgtattcgttatttttggctttttaatgattttcggtatcttaggtggtcatacatatggatttgaaaactatacaaaaggccaagcaccgtttgttggtggtatctctggtttcttaggcgtattattagtcgccggattttcggttggtggtacagaagtagtagcagtaactgctggtgaatcagatgaccctaaaaagtctatgcctaaggcaattaaacaagtattttggcgtattcttttattctatgtcttatcaattgcagtaattggtgcaattattccgtacacagatccatcattattaagagcaagtagttcaataagtcaaagcccatttacaattgtattcgatagagtaggcatagcctttgcagcatcagtaatcaacgcggttattttaacttcattattatccgctgcaaattcaggtgtttatacaacaggcagaatgttgtattccttaagttcagacaaaaaagcaccccaatttttaagtaaattaaacaagacaactaagttacctttaagagcattattaactacttatgcagtcgttgttattgttattatttatgcaaactttaattcaaatgccgtttttaatttacttgaaattattggttcaatgattatagttgtttggggatcaagcatttggtcacaaatacgattgcgacaagctattaaaaaacaaggtcaagaccctaataaggtcctaccatataaagcacctttttatccattaggaccaatcattgtcatcactacactattattcttgctatttggtggctcagttgaatatattttaaaagatcaatggttaaatgcttttaaaaactttttacctttaatcattctagcgttgatttactttattcataaaatcattcacaaaacaaaatttgtaaagctagaaacaattaatttaaaaccacacgattatgacaatcaaaactaa

SEQ ID NO: 17150 - protein, 484 aa, Staphylococcus aureus subsp. aureus Mu50
MEDNKMNRSLNSRHISMIAIGGAIGTGLFVATGNIISQAGPGGAILAYLVIGVMLYFLMSSIGELATFYPVSGSFSSYSTRFIDSSLGFTMGWLYWALWSLVTSVDVIVASNVLYFWDTFKFFHPITWSLIFITILLLLNIFSVKSFGETEFWLSLIKVLTIIVFVIFGFLMIFGILGGHTYGFENYTKGQAPFVGGISGFLGVLLVAGFSVGGTEVVAVTAGESDDPKKSMPKAIKQVFWRILLFYVLSIAVIGAIIPYTDPSLLRASSSISQSPFTIVFDRVGIAFAASVINAVILTSLLSAANSGVYTTGRMLYSLSSDKKAPQFLSKLNKTTKLPLRALLTTYAVVVIVIIYANFNSNAVFNLLEIIGSMIIVVWGSSIWSQIRLRQAIKKQGQDPNKVLPYKAPFYPLGPIIVITTLLFLLFGGSVEYILKDQWLNAFKNFLPLIILALIYFIHKIIHKTKFVKLETINLKPHDYDNQN

SEQ ID NO: 17151 - DNA, 1494 bp, Staphylococcus aureus subsp. aureus Mu50
  CDS (1)..(1494): transl_table=11
atgtcaaaagttcaaaatgaaagtaacaatgttgtcaaaaggggacttaaagatcgtcatatttctatgattgcgattgggggttgtattggtacaggtttatttgtaacttctggtggagcaattcatgatgcaggtgctttgggtgcattaataggatacgcaattatcggaataatggtatttttcttaatgacgtcacttggtgaaatggctacgtatttaccagtatcaggttcatttagtacatatgctacaagatttgttgatccatctttagggtttgcgcttggttggaactattggtttaactgggtagtaactgtagcagcagatattacgattgcagcacaagtcattcaatattggacaccattgcaaggcatacccgcttgggcatggagtgcgttgtttttagttataatttttagtctgaattcgttatcagttcgcgtctatggtgaaagtgaatactggttggcattgataaaagtgattacagttattgttttcattgcaattggtttattaacgattgtaggaatcatgggtggtcatgttgtaggatttgaaatatttaataaaggtgaaggtcctattcttggtggcaacttaggaggaagtttgttatcaattctaggtgtattcttaatcgctggtttctcattccaaggtactgagttaattggtattacggctggtgaatcagaaaatcctgaacgtgctgtgccgaaagcaattaaacaagtattctggagaattttattattttacattttagccatttttgttatcggtatgttaattccttatgatagtagtgcattaatgggtggtagtgataatgtagcaacgtctccattcacattagtgtttaaaaatgctggatttgcgtttgcagcatcatttatgaatgcagtcattttaacgtctgtgttatcagcaggtaactcaggtatgtatgcttcaacccgaatgctatattcaatgagtaaagataaattagcgtttgaagcatttggtaaaacaaataaaaacggtgtgccatatatgtcgttactcgttacagcaatcattgtagtgattattttcgtattacaaagccttacaaaaggtgcatacgaatatatcgttgcagcaagtggtttaactggttttattgcttgggtaggtatagcagtaagtcattatcgatttagaagagcatttgataaacaaaattatgacaaatctaaattaaaatatactgctaaattattcccattcggaccattatttgctggctttttatgtattgtagtaattattggtcaagatgttgactttattaaaacaggagattttaattttagtcgcttcttaattacgtatatgggaattccagtatttttagcattctttatttatcataagcttcgatataaaacgaaaaaaattccattagaacaagtagatttacgtcaagacgtgtcaatggatgaaataaaaggttaa

SEQ ID NO: 17152 - protein, 497 aa, Staphylococcus aureus subsp. aureus Mu50
MSKVQNESNNVVKRGLKDRHISMIAIGGCIGTGLFVTSGGAIHDAGALGALIGYAIIGIMVFFLMTSLGEMATYLPVSGSFSTYATRFVDPSLGFALGWNYWFNWVVTVAADITIAAQVIQYWTPLQGIPAWAWSALFLVIIFSLNSLSVRVYGESEYWLALIKVITVIVFIAIGLLTIVGIMGGHVVGFEIFNKGEGPILGGNLGGSLLSILGVFLIAGFSFQGTELIGITAGESENPERAVPKAIKQVFWRILLFYILAIFVIGMLIPYDSSALMGGSDNVATSPFTLVFKNAGFAFAASFMNAVILTSVLSAGNSGMYASTRMLYSMSKDKLAFEAFGKTNKNGVPYMSLLVTAIIVVIIFVLQSLTKGAYEYIVAASGLTGFIAWVGIAVSHYRFRRAFDKQNYDKSKLKYTAKLFPFGPLFAGFLCIVVIIGQDVDFIKTGDFNFSRFLITYMGIPVFLAFFIYHKLRYKTKKIPLEQVDLRQDVSMDEIKG

SEQ ID NO: 17153 - DNA, 1413 bp, Bacillus subtilis subsp. subtilis str. 168
  CDS (1)..(1413): transl_table=11
atgaactctgcccacaacaagaatgagacaacctttcagagaagtatgaaaagccggcacctctttatgctttccttgggaggtgtcatcggaaccgggctgtttttaagctcaggttataccattcagcaagcaggcccggccggaacgatactcgcctacttagtcggggccggcatcgtctatctggtcatgctatgcctcggtgagctgtcagtcgccatgcctgtgaccggcgcctttcacacctatgcagccaaatacatagggccgggcaccggatttacggtcgcttggctgtattggctgacatggaccgtggcattgggatcagaattcacagcagccggcctgttaatgcagcgctggttcccccatacatcggtttggatgtggagtgccgtctttgcgctgttcatcttcttgcttaacgcattttcggtcaagtttttcgctgaatcagaattttggttttccagcatcaaagtattagccattgtattatttattcttttaggcggctctgccatgttcggcatcatcccgatcaaaggcggagaagccgctccgatgctgtccaacttcacggcggaaggcgggctttttcccaatggatttgtcccgattttgatgacgatgctgtccgtcaattttgccttttcgggaacggaactaatcggaatcgcagccggtgaaagcgttgatcctgacaagacgataccaaaagcgataaaaacaacggtctggcgtctctcgctcttctttgtcggaacaatttttgtgctgtcagggctgattccgattcaagatgcaggtgtcatcaaaagcccgtttgtcgctgtctttgacagagtcggtgtaccatacgcagccgatatcatgaactttgttatcctgacagcgatcctgtcagcggctaattccggactctacgcttcttcccggatgctgtggtctttatcaaaagaaaaaacgcttcatccgacatttgcaaagctgacgtcaaaaggaaccccttttaacgcgctggtgttcagcatgatcggcggcattctgtcgttgctgtccagcgtatttgcgccagacactgtatacgttgtgctcgtgtcgatttccggttttgccgtcgttgtcgtgtggatgggaatcgctgcttctcaattcatgttcagaaaacgttatatcgaagcgggaaacaaggttactgatttgaaatacagaacccctttgtatccgttcgtgccgattgctgcgttcctgttatgcctggcttccgtcgttggcattgcctttgatccgaatcaaagaatcgcactctattgcggcgttccatttatggccatttgctatgcaatatattatgtaaaaaaccgcaaaagccagccggctgctgatatgactcattcaaaataa

SEQ ID NO: 17154 - protein, 470 aa, Bacillus subtilis subsp. subtilis str. 168
MNSAHNKNETTFQRSMKSRHLFMLSLGGVIGTGLFLSSGYTIQQAGPAGTILAYLVGAGIVYLVMLCLGELSVAMPVTGAFHTYAAKYIGPGTGFTVAWLYWLTWTVALGSEFTAAGLLMQRWFPHTSVWMWSAVFALFIFLLNAFSVKFFAESEFWFSSIKVLAIVLFILLGGSAMFGIIPIKGGEAAPMLSNFTAEGGLFPNGFVPILMTMLSVNFAFSGTELIGIAAGESVDPDKTIPKAIKTTVWRLSLFFVGTIFVLSGLIPIQDAGVIKSPFVAVFDRVGVPYAADIMNFVILTAILSAANSGLYASSRMLWSLSKEKTLHPTFAKLTSKGTPFNALVFSMIGGILSLLSSVFAPDTVYVVLVSISGFAVVVVWMGIAASQFMFRKRYIEAGNKVTDLKYRTPLYPFVPIAAFLLCLASVVGIAFDPNQRIALYCGVPFMAICYAIYYVKNRKSQPAADMTHSK

SEQ ID NO: 17155 - DNA, 1428 bp, Escherichia coli K12
  CDS (1)..(1428): transl_table=11
atgtccatacgtttagaaggttatatgcaaacaacacaacaaaatgcgccactgaagcgcacaatgaaaacgcgtcacctgattatgctttccttgggcggcgtgattggcacaggattattcttcaataccgggtacatcatttccaccactggagcggcgggaacgctgctggcctatctgattggtgcgctggtggtctggctggttatgcagtgtctgggcgagctgtcggtcgcgatgccggagaccggagcgtttcacgtttatgccgcgcgctatcttggtccggctaccgggtataccgtggcctggctttactggctgacctggaccgtggcgctgggttcgagctttaccgccgctggattctgtatgcagtactggtttccacaggtgccggtatgggtctggtgcgtggtgttctgcgcgattatttttggtctgaatgttatctccacgcgcttttttgccgaaggggagttctggttctcgctggtcaaagtggtcactatcatcgcctttatcatcctcggtggggcggcgattttcggctttattccgatgcaggatggctcgcccgcgccggggctgagtaatatcacggcagaaggctggttcccgcacggtggcttaccgattttgatgactatggtggcagtgaactttgctttttcgggtaccgagcttatcggcattgccgccggtgaaacggaaaacccgcgcaaagttatcccggtagcgattcgtactaccatcgcgcgactgattattttctttatcggcaccgtgtttgtgctggcagcgctgatcccgatgcagcaggtgggcgtggagaaaagcccgtttgtgctggtatttgagaaagtagggatcccgtacgccgctgatatttttaacttcgtgatcctgacggctattctttctgcagcgaactccgggttatatgcctccgggcgcatgctgtggtcgttgtcgaatgaacgtacgctaccggcctgttttgcgcgagtaacgaaaaacggcgtgccactgacggcgctgtcggtcagtatgctcggtggtgtgctggcgctgttttccagcgtggtggccccggacacggtatttgttgcgctgtcggcaatctccgggtttgcggtggtagcggtgtggctgagtatctgcgcctcgcattttgtttttcgtcgccgtcatctgcaacaaggtaaggcattgagtgaattacattatcgcgcgccgtggtatccgctggtgccagtattaggttttgtgctgtgcctggtggcctgtgttgggctggcattcgatccagcgcagagaattgcgttgtggtgcgggttaccgtttgttgcgttgtgctatggtgcttatttccttactcaaccccgaaacgcaaaacaggagccagaacatgtcgcagaataa

SEQ ID NO: 17156 - protein, 475 aa, Escherichia coli K12
MSIRLEGYMQTTQQNAPLKRTMKTRHLIMLSLGGVIGTGLFFNTGYIISTTGAAGTLLAYLIGALVVWLVMQCLGELSVAMPETGAFHVYAARYLGPATGYTVAWLYWLTWTVALGSSFTAAGFCMQYWFPQVPVWVWCVVFCAIIFGLNVISTRFFAEGEFWFSLVKVVTIIAFIILGGAAIFGFIPMQDGSPAPGLSNITAEGWFPHGGLPILMTMVAVNFAFSGTELIGIAAGETENPRKVIPVAIRTTIARLIIFFIGTVFVLAALIPMQQVGVEKSPFVLVFEKVGIPYAADIFNFVILTAILSAANSGLYASGRMLWSLSNERTLPACFARVTKNGVPLTALSVSMLGGVLALFSSVVAPDTVFVALSAISGFAVVAVWLSICASHFVFRRRHLQQGKALSELHYRAPWYPLVPVLGFVLCLVACVGLAFDPAQRIALWCGLPFVALCYGAYFLTQPRNAKQEPEHVAE

SEQ ID NO: 17157 - DNA, 1461 bp, Listeria monocytogenes EGD-e
  CDS (1)..(1461): transl_table=11
gtgaaaaaagaaacacatggcgagattcgtcgtgacttaaaaacaaggcatttgtccatgattgccattggtggttcgatcgggacgggattatttttagcaagtggtaatgcgattcatactgccggacctggtggcgcgttggttgcttatgttgcaatcgggattatggtgtactttttaatgacaagtttaggcgaaatggctacttacatgcctgtatctggttcatttagtacgtatgctagtcgatttgttgacccagctttcgggtttgcacttggttggaattattggtttaactgggcaattacgctagcagtcgatatttccaccgcggcgattattgttcaattttggctaccgaatactcctgcttggctatggagcgcgattttcttaattttgatttttggcttaaatgcgctttcggtaaaagcttacggagaatcagaatattggttttcgattattaaagtggccacggttattattttccttatcgtcggcgtgctaactattgttggaattcttggcggcgaagttattggcttttctaactttacagctggcgatgctccgtttaaaggtggtttttttgccatcttaggtaccttcttaattgctggattttctttccaagggactgaaatggttggtattgcggcaggtgaaagtgctactccagaaaccagtgtgccaaaagcgattaaacaagtgttctggcggattttgttattttatatttttgcgattttcattattgggatgattattccttatactaacccgaacttacttagtgccgaggcaactgatgtggcaattagcccatttacactcgtatttgaaaaagctggtcttgcatttgcggcttcagtgatgaatgcggttatcctgacttctgttctatctgctggtaattcaggtctttacgcttccaccagaatgctttgggcgatggctcgcgataaaaaagcacctaaattcttgggaaaagtaaaccgtcgtggtattccgatggcagcattaatcgttacgacgattgttggtgccatgacattcattacaacgctaacagaaaatggcacagtaatttatacgtggttactttctgcctctggtttaactggatttatcgcttgggtcggcatcgctatcagtcattaccgtttccgaaaagcatttatcaaacaagggcatgacttaagtgaactaaaatataaagcgaaatttttcccattcggacctattttagcacttgttttatgtattttagtcattgtcggtcaagattacgcggcatttttaaaaccagaatttacgaatccggcttggtggcaaaaaatcggcatttcgtatatcggtcttcccattttcctagttttttggctatcttttaaatttacaaataaaactaaagttattccactggaagactgcaaatttgatcaaaaataa

SEQ ID NO: 17158 - protein, 486 aa, Listeria monocytogenes EGD-e
MKKETHGEIRRDLKTRHLSMIAIGGSIGTGLFLASGNAIHTAGPGGALVAYVAIGIMVYFLMTSLGEMATYMPVSGSFSTYASRFVDPAFGFALGWNYWFNWAITLAVDISTAAIIVQFWLPNTPAWLWSAIFLILIFGLNALSVKAYGESEYWFSIIKVATVIIFLIVGVLTIVGILGGEVIGFSNFTAGDAPFKGGFFAILGTFLIAGFSFQGTEMVGIAAGESATPETSVPKAIKQVFWRILLFYIFAIFIIGMIIPYTNPNLLSAEATDVAISPFTLVFEKAGLAFAASVMNAVILTSVLSAGNSGLYASTRMLWAMARDKKAPKFLGKVNRRGIPMAALIVTTIVGAMTFITTLTENGTVIYTWLLSASGLTGFIAWVGIAISHYRFRKAFIKQGHDLSELKYKAKFFPFGPILALVLCILVIVGQDYAAFLKPEFTNPAWWQKIGISYIGLPIFLVFWLSFKFTNKTKVIPLEDCKFDQK

SEQ ID NO: 17159 - DNA, 1461 bp, Listeria innocua Clip11262
  CDS (1)..(1461): transl_table=11
gtgaaaaaagaaacacatggcgagattcgtcgtgacttaaagacaaggcatctatccatgatagcaattggtggttcaatcggaacaggattatttttagcaagtggaaatgcgattcatactgctgggcctggtggagcgctagttgcttatattgcgattggcattatggtgtactttttaatgacaagcttaggtgagatggctacctatatgcctgtttccggctcatttagtacgtatgctagtcgatttgttgatccagcttttggttttgcactcggttggaactattggtttaactgggcgatcacgcttgcggtcgatatttcaacagcggcgattattgttcaattttggttgccgaatacgcctgcttggctctggagtgcgattttcttactcttgattttcgggttaaatgccctatcggtaaaagcttacggggagtcagagtactggttctcaattattaaagtagcgactgttattatttttcttatcgtcggtgtgctgacaattgttggtattcttggcggcgaagtgattggcttttctaactttacagcaggagatgcaccatttaaaggtggatttttcgcgatattaggcacgttcttgattgctggattttctttccaaggtactgaaatggttgggattgcagctggtgaaagcgctactccagaaaaaagtgttcctaaagcgattaagcaagttttctggcggattttgttattttatatttttgcgattttcattatcgggatgattattccttatactaatccgaatttactgagcgctgaggcaacagatgtggcgattagtccatttacgctcgtatttgaaaaggctgggctagcttttgcggcttcggtaatgaacgcggttatcttgacttccgttctatccgctggtaattcaggcctttacgcttccacaagaatgctttgggcaatggctcgtgataaaaaagctcctaaattcttaggcaaagtaaaccgtcgtggtatcccgatggctgcacttattgtgacaaccattgttggtgcgatgacattcattactacgcttaccgaaaatgggacagtgatttatacatggctcctttctgcctctggtttaaccggatttatcgcttgggtcggcatcgctattagccattaccgattccgtaaagctttcattaagcaaggccatgatttgaacgaactaaaatataaagccaaatttttcccttttggtccgattttagctttaatcttatgtattttagttattgtcggtcaagattacgcggcatttttaaaacctgaatttacgaatcctgcttggtggcaaaaaatcggtatttcttatatcggcctccctattttccttatcttctggttatcatttaaatttacaaataaaacaaaagtcattccactggaagactgcaaatttgatcaaaaataa

SEQ ID NO: 17160 - protein, 486 aa, Listeria innocua Clip11262
MKKETHGEIRRDLKTRHLSMIAIGGSIGTGLFLASGNAIHTAGPGGALVAYIAIGIMVYFLMTSLGEMATYMPVSGSFSTYASRFVDPAFGFALGWNYWFNWAITLAVDISTAAIIVQFWLPNTPAWLWSAIFLLLIFGLNALSVKAYGESEYWFSIIKVATVIIFLIVGVLTIVGILGGEVIGFSNFTAGDAPFKGGFFAILGTFLIAGFSFQGTEMVGIAAGESATPEKSVPKAIKQVFWRILLFYIFAIFIIGMIIPYTNPNLLSAEATDVAISPFTLVFEKAGLAFAASVMNAVILTSVLSAGNSGLYASTRMLWAMARDKKAPKFLGKVNRRGIPMAALIVTTIVGAMTFITTLTENGTVIYTWLLSASGLTGFIAWVGIAISHYRFRKAFIKQGHDLNELKYKAKFFPFGPILALILCILVIVGQDYAAFLKPEFTNPAWWQKIGISYIGLPIFLIFWLSFKFTNKTKVIPLEDCKFDQK

SEQ ID NO: 17161 - DNA, 1530 bp, Ralstonia solanacearum GMI1000
  CDS (1)..(1530): transl_table=11
atgcatacaccgatcacccccaccggcctcgagggccagtccgaactgcgccggcgcctgcgcgcgcgccacctgacgatgatcgccctcggcggcgccatcggcaccgggctgttcgtcgcctccggcgcctccatcgcgcaggccggcccgggcggcgccctgttcacctacacgctgatcggcgtgatggtctactgcctgatgacgagcctcggcgagctggcggtgcacctgccggtgtcgggctccttcgtcacgtacagccggctgtacgtggaggaagggttcggctttgcgctggggtggaattactggtttgcgctggcggtgtccgtggcggtggagctggcggcggcgcagctggtgatgaagtactggttccccggcgtctcgggcatggtctggagcgccgccttcctgctgctgatgttcgtgctcaacgcgttctcggtgcgcggcttcggtgaggcggaatactggttctcgatgatcaaggtggtgaccatcgtcgtgttcctgctgatcgggctggcgatgatcttcggcatcatgaaaggcgggccgcagtcgggctggcacaacttcacggtgggcgacgcgccgttcgtgggcggactgcctgcgatgatcggcgtggcgatgatcgccgggttctcgttccagggcgtcgagaccatcggcgtggccgccggcgaggcggagaaccccgcccgcaccattccgcgcggcatccgccagaccttctggcgcatcctgctgttctacgtgctggcgatcctgatcatcgccgtgctgctgccgtacaccgatccgaacctgctgcgcaacgaggccaccgacatcggcgtaagcccgttcgcgctggtgttccagcatgccggcctcgccttcgccgccggcatgatgaacgcggtggtgctgaccgcgctgctgtcgtccggcacctcgagcctgtatgtctcgacgcgcatcctctacgacctcgcgcttgaaggccaggcgccgcggtggttcgccagggtctcgggcaacggcgtgccgcaccgggcgctgctggccacctcggcggtgggcgcgctgtgcttcttcagctcgctcttcggcgaccaggtcgtgtacctgtggctgctcaatacctcggcggtgacgtgcttcatcgcctggttcggcatcgcgctggcgcactaccgcttccgcaagggctttctgcatcagggccacacggtcgatcagctcgaataccgctcgcccttcttcccgttcgggccgatcctggtggccgccctgtgcgtgatcatcatcctcgggcagaacaccaaggcgctgttcgcgccgatcgacaacttcggcgccttcgtcgccacgtattgcggggtgtttctgttcgtggcgatctggctggggtaccggtggcgctacaagacgcggtttgtgcggtacgagcagatgcagttcagcccgcggcacatccgggcggcgcaggccggggatggcggggccgcgctgccgggcgtggccgcggattag

SEQ ID NO: 17162 - protein, 509 aa, Ralstonia solanacearum GMI1000
MHTPITPTGLEGQSELRRRLRARHLTMIALGGAIGTGLFVASGASIAQAGPGGALFTYTLIGVMVYCLMTSLGELAVHLPVSGSFVTYSRLYVEEGFGFALGWNYWFALAVSVAVELAAAQLVMKYWFPGVSGMVWSAAFLLLMFVLNAFSVRGFGEAEYWFSMIKVVTIVVFLLIGLAMIFGIMKGGPQSGWHNFTVGDAPFVGGLPAMIGVAMIAGFSFQGVETIGVAAGEAENPARTIPRGIRQTFWRILLFYVLAILIIAVLLPYTDPNLLRNEATDIGVSPFALVFQHAGLAFAAGMMNAVVLTALLSSGTSSLYVSTRILYDLALEGQAPRWFARVSGNGVPHRALLATSAVGALCFFSSLFGDQVVYLWLLNTSAVTCFIAWFGIALAHYRFRKGFLHQGHTVDQLEYRSPFFPFGPILVAALCVIIILGQNTKALFAPIDNFGAFVATYCGVFLFVAIWLGYRWRYKTRFVRYEQMQFSPRHIRAAQAGDGGAALPGVAAD

SEQ ID NO: 17163 - DNA, 1539 bp, Ralstonia solanacearum GMI1000
  CDS (1)..(1539): transl_table=11
atgtcagaacacaccaccgcgtccgccgggacgccgggcttgcgccggactttgcgtgcgcgccacctcaccatgatcgccatcggcgggtcgatcggcaccgggctgttcgtcgcctcgggcgcgtcggtgtcgcaggccggccccggcggcgcgctggccgcctacgtgctgatcgggacgatggtctactttctgatgaccagcctcggcgagctcgccgcctacatgccggtgccgggctcgttcgccacctacggcgcgcgctacgtggacgaaggcttcggcttcgcgctgggctggaactactggtacaactgggcggtgacgatcgcggtggagctggccgccgcgcagctggtcatgcactactggtttcccgaggtgccgggcgtgctgtggagcgcgggcttcctggcggtgatgttcctgctcaacgcgatctccgtgcgcggcttcggcgaggcggaatactggttcgcgctcatcaaggtcgtcaccgtgctgtgcttcatcgcgatcggcctggcgatgatcttcggcatcatcaagggcgcgccggcatcgggcctgcacaacctgaccctcggcgaggcgccgttcgtgggcgggctgccggcgatgatcggcgtggcgatgatcgccgggttctcgttccagggcaccgagctgatcggcgtggcggcgggcgaatcggccgacccggcgcgcaccattccgcgcgcggtccggcaggtgttctggcgcatcctgctgttctatgtgctggcgatcttcatcatcggcgcgctggtgccgtacaccgatccgaacctgctgtcgacggaggtcgccaacatcggcgtgagcccgttcacgctggtcttccgccatgccggcctggcctttgccgccgggctgatgaacgcggtgatcctgacggcggtgctgtcggcgggcaattcgggcatgtatgcgtccacgcgcatgctctacaacctcgccaccgaaggccgcgcgccgcgcctgttcgcgcggctatcgaagaacggcgtgccgcgcaatgcgctgctggccaccaccgccgtgggcgcgctgtgcttcctgagctcgctgtacggcgacaagaccgtctacctgtggctgctcaacacctcgggcatgaccggcttcgtcgcgtggctgggcatcgcgatcagccattaccgcttccgcaagggcctggtgctgcagggccacgacccggcgctgctgccctaccgctcgccgttctttccgtacggcccgctgttcgcgttcgggttgtgcctggtcatcaccctgggccagaactaccaggccttcgccagcggccgggtcgactgggccgaggtgaccgccacctatatcggcatcccgatcttcttcgcggtctggctaggctaccggctggtgcgcggcggcggcatcatccgctaccaggacatgcgcttcccgcgcccgcccgtcacgcgcgacccgccgggcgaagcgcccgccgcccccgggctgccggccgccgcgacgagcccgcagcgttga

SEQ ID NO: 17164 - protein, 512 aa, Ralstonia solanacearum GMI1000
MSEHTTASAGTPGLRRTLRARHLTMIAIGGSIGTGLFVASGASVSQAGPGGALAAYVLIGTMVYFLMTSLGELAAYMPVPGSFATYGARYVDEGFGFALGWNYWYNWAVTIAVELAAAQLVMHYWFPEVPGVLWSAGFLAVMFLLNAISVRGFGEAEYWFALIKVVTVLCFIAIGLAMIFGIIKGAPASGLHNLTLGEAPFVGGLPAMIGVAMIAGFSFQGTELIGVAAGESADPARTIPRAVRQVFWRILLFYVLAIFIIGALVPYTDPNLLSTEVANIGVSPFTLVFRHAGLAFAAGLMNAVILTAVLSAGNSGMYASTRMLYNLATEGRAPRLFARLSKNGVPRNALLATTAVGALCFLSSLYGDKTVYLWLLNTSGMTGFVAWLGIAISHYRFRKGLVLQGHDPALLPYRSPFFPYGPLFAFGLCLVITLGQNYQAFASGRVDWAEVTATYIGIPIFFAVWLGYRLVRGGGIIRYQDMRFPRPPVTRDPPGEAPAAPGLPAAATSPQR

SEQ ID NO: 17165 - DNA, 1470 bp, Clostridium perfringens str. 13
  CDS (1)..(1470): transl_table=11
atgagtcaagaacaaaatactaatctaaaaagaggcttgaaatcaagacatcttagcatgattgccatgggtggtgccataggaactggtattttcttagccatgggagatacacttcatcaagccggtgtaggaggagcttttgtagcttacggaatcataggagtaatggtatatttcttgtgtacaagcttaggggagatggcaacatatatgccagaaacaggttcctttggagcttatgcaacaaaatttgttgatcctgctttaggatttgctctaggatggaattactggtataactgggctataacaatagcagcagaaatggttgcaggttctttattaatgaagttttggtttcctaatattccagcaatagtttggagcgcattattcttagtaattatattaactcttaatttattatctgccaaagcttatggagaatcagagttttggtttgcagctgtaaaagttgctactgttataatattcttaatcgtaggagttcttatgatttttggaatattaggtggagataatgtaggattcaaaaacttctatgaaaatggagggccatttattggaggagcaaaatcaattttcatgatctttttaatagctggtttctcatttcaaggaactgaattagtaggggttgctgctggagaaagtgaagatcctgaaaaaaatgtacctaaggctgttaatacaatattttggagaatcttattattttatttaggaacaattttagtaataggtgctttagtgccaaatgctcaagcaggagtagaaacaagtgcatttacaatagtatttgaaaaattaggattagctggagccgcttctattatgaatgctataatacttacatccgttttatcagctggtaactctggtatgtatgcatcgagtagaatgctttatgctatggctaaaaatggaatggcacctaagatttttgaaaaaactaattctagaggagtaccagttaatgctattataataacaacaataattgcaagtttatgtttcttaacaggtatttatgccgaaaatacagtttatgtatggcttgtagcagcctcaggattatcaggatttatagcttggcttggaatcgcaatatgtcattatagatttagaaaagcttatgtagctcaaggtaaagatatgagtagattagtttataaagctaaattattcccactagggcctataatagctttaatattatgtggaataatagttttaggtcaaggatatgcatacttagatgttagaaatggagtagactggggtggattaatttcatcttatattggattacctctattctttggattatttgcatattataaaattaaatataaaactaaaataatagacttaaaagatgttgacttaagtgtagagcatatagatactgatgagagtatagaagatgaagtattttcttactaa

SEQ ID NO: 17166 - protein, 489 aa, Clostridium perfringens str. 13
MSQEQNTNLKRGLKSRHLSMIAMGGAIGTGIFLAMGDTLHQAGVGGAFVAYGIIGVMVYFLCTSLGEMATYMPETGSFGAYATKFVDPALGFALGWNYWYNWAITIAAEMVAGSLLMKFWFPNIPAIVWSALFLVIILTLNLLSAKAYGESEFWFAAVKVATVIIFLIVGVLMIFGILGGDNVGFKNFYENGGPFIGGAKSIFMIFLIAGFSFQGTELVGVAAGESEDPEKNVPKAVNTIFWRILLFYLGTILVIGALVPNAQAGVETSAFTIVFEKLGLAGAASIMNAIILTSVLSAGNSGMYASSRMLYAMAKNGMAPKIFEKTNSRGVPVNAIIITTIIASLCFLTGIYAENTVYVWLVAASGLSGFIAWLGIAICHYRFRKAYVAQGKDMSRLVYKAKLFPLGPIIALILCGIIVLGQGYAYLDVRNGVDWGGLISSYIGLPLFFGLFAYYKIKYKTKIIDLKDVDLSVEHIDTDESIEDEVFSY

SEQ ID NO: 17167 - DNA, 1398 bp, Xanthomonas axonopodis pv. citri str. 306
  CDS (1)..(1398): transl_table=11
atgcccgagccgtcgtccgccaccgcaccgcagttccagcgcagcatgcaggtgcgccatctggtgatgctgtcgctgggcggggtgatcggcaccggcctgttcttcaacactgggtacatcattgccagcaccggcgcgctgggcacggtactggcgtatctgatcggcgcactggtggtgtacctggtgatgcaatgcctgggcgagctggcggtggcgatgccgcaaaccggtgcgtttcatgtgtatgccgcgcgctacctcggcccggcgaccggctatgtggtggcgtggttgtattggttgacctggacggtggcattgggttcgagcctgacggccgcagcgttctgcatgcagtactggtttccgcacagcctggcgtggccgtggtgtctgctgttctgcgcgctgatcttcggcctgaatacagtttcggcgcgctggtttgccgaaggcgagttctggttttcgttgatcaaggtgatcaccatcctggtgttcatcgtgcttggcggcgcggcggtgatcggtctgttgccactggccgacggttcgcccgcacccgggctgcgccatctgcgcgccaacggctggttcgcgcacggtacgctcccgatcttgatgacgatggtggcggtgaatttcgcattttccggcaccgagttgatcggcgtggcggccggcgaaaccgcacagcctgcacgcgcgattccgctggcaatccgcacaacgctggtgcggctggtggtgctgttcgtcggcacggtgctggtgctggcggcgctgctgcctgccagacgagcggccgtggaaaccagcccgttcgtgcgcgccttcgagctgttgggcattccatatgcagccgacatcttgaatgcggtgatcctcaccgcgatcctgtcggcggccaattccgggctgtatgcggccgcgcgcatgctgtggtcgttggccaatgaaggcacgttgccgagcggcctggcgcgcttgaccggccgcggcatcccgttgcgtgccgtgtcgctgagcatgctgggcggcttgctggcgctgctcaccggcgtgtatgcgcccgaaacggtgttcgttgcgatctcggcagtctcgggcttcgccgtcgtggtggtgtggctgagcatttgcgccgcgcattaccgcttccgtcgccaatggctgcgcgatggcgctgcgctggaaacgctggcgtatcgcgcgccgtggtacccgtggaccccgattctgggcttttcgctgtgtctgctcgcctgcatcgggttggcattcgatccgcagcagcgcattgcgttgtggtgcggtattccgttcgtcgcgctgtgctatggcgcctacgcacttacccaatggcttgcggcccggagactgtacgcatga

SEQ ID NO: 17168 - protein, 465 aa, Xanthomonas axonopodis pv. citri str. 306
MPEPSSATAPQFQRSMQVRHLVMLSLGGVIGTGLFFNTGYIIASTGALGTVLAYLIGALVVYLVMQCLGELAVAMPQTGAFHVYAARYLGPATGYVVAWLYWLTWTVALGSSLTAAAFCMQYWFPHSLAWPWCLLFCALIFGLNTVSARWFAEGEFWFSLIKVITILVFIVLGGAAVIGLLPLADGSPAPGLRHLRANGWFAHGTLPILMTMVAVNFAFSGTELIGVAAGETAQPARAIPLAIRTTLVRLVVLFVGTVLVLAALLPARRAAVETSPFVRAFELLGIPYAADILNAVILTAILSAANSGLYAAARMLWSLANEGTLPSGLARLTGRGIPLRAVSLSMLGGLLALLTGVYAPETVFVAISAVSGFAVVVVWLSICAAHYRFRRQWLRDGAALETLAYRAPWYPWTPILGFSLCLLACIGLAFDPQQRIALWCGIPFVALCYGAYALTQWLAARRLYA

SEQ ID NO: 17169 - DNA, 1377 bp, Streptococcus agalactiae 2603V/R
  CDS (1)..(1377): transl_table=11
atggaaaatcatcgttatgaagatgaaggtaaattccagcgtaagatgaccagtcgtcatctctttatgttatcgctaggtggtgttatcgggactgggcttttcttgagttcaggttataccattgcacaggctggtccgcttggagctgtgctgtcttatttgattggtgccgttgtggtttatttggtcatgctatcacttggggaattggcggttgccatgccggtgacggggtcattccacacttatgccactaagtttatcagtcctggaacaggttttactgttgcttggctatattggatttgttggacggtcgccttggggactgaatttttaggtgctgccatgctgatgcagcgctggttcccaaatgtgccggcttgggcatttgcttccttttttgcccttgtgatttttggtttaaatgctcttagcgtacgcttttttgcagaagcagagtctttcttctcaagtattaaggttattgctatcattatctttattatcttgggcttaggtgctatgtttggtctagtttcctttgaaggtcagcacaaggctattctcttcactcatctgactgccaatggtgcctttccaaatggtatcgttgcagttgtctcagtcatgttggctgttaactatgccttctctggtactgagttaattggtattgcggctggtgaaacggataatcccaaagaagctgtaccaagggctattaaaacgacaatcggtcgcttggttgttttctttgtactgacaattgttgtcctagcttcgctattgccaatgaaagaggcaggcgtatccacagcaccattcgttgatgtctttgacaagatgggaatcccttttacggcggatatcatgaacttcgttatcttgacagccatcctgtctgctggtaactcaggtctctacgcatcaagccgtatgctctggtcccttgccaatgaaggtatgttgtcaaaatctgttgtgaaaatcaataaacacggtgtcccaatgcgtgctcttctcttgtcaatggcaggagcagtgctgtcgctcttttcaagtatttacgctgcagacacagtttatctagccttggtttcaatcgcgggctttgctgttgttgtcgtatggctagccattccagtcgcacaaatcaatttccgcaaggaattcttgaaagagaatcaactagaagatttgtcttacaaaacaccttttacaccagttctcccttatatcacaatcattttgctcttgatttcgattgtagggattgcttgggatagctcacaacgtgctgggctttacttcggtgttccatttattattttctgctatatttatcacaaactacgttacaagaaatggtga

SEQ ID NO: 17170 - protein, 458 aa, Streptococcus agalactiae 2603V/R
MENHRYEDEGKFQRKMTSRHLFMLSLGGVIGTGLFLSSGYTIAQAGPLGAVLSYLIGAVVVYLVMLSLGELAVAMPVTGSFHTYATKFISPGTGFTVAWLYWICWTVALGTEFLGAAMLMQRWFPNVPAWAFASFFALVIFGLNALSVRFFAEAESFFSSIKVIAIIIFIILGLGAMFGLVSFEGQHKAILFTHLTANGAFPNGIVAVVSVMLAVNYAFSGTELIGIAAGETDNPKEAVPRAIKTTIGRLVVFFVLTIVVLASLLPMKEAGVSTAPFVDVFDKMGIPFTADIMNFVILTAILSAGNSGLYASSRMLWSLANEGMLSKSVVKINKHGVPMRALLLSMAGAVLSLFSSIYAADTVYLALVSIAGFAVVVVWLAIPVAQINFRKEFLKENQLEDLSYKTPFTPVLPYITIILLLISIVGIAWDSSQRAGLYFGVPFIIFCYIYHKLRYKKW

SEQ ID NO: 17171 - DNA, 1401 bp, Bifidobacterium longum NCC2705
  CDS (1)..(1401): transl_table=11
atggcggcagccggcacacccaaggacgataccggccttgaacggaagatggagtcgcgtcacctgacgatgatctccctgggcggcgtgatcggcaccggcctgttcgtcagctccggctacgcgattcatcaggcgggaccgttgggcgcgatcctcgcttacgcggccggctccctgctcgtctactgcgtgatggtgtcgttgggcgagctgtccgtggccatgccgtacgccggcagcttccacatgtatgcgaagcggttcatcggccccggcaccgcgttcaccatcgccatcctgtattggctgaactgggcggtggcgctcgcctccgaattcacggccgcagggctgttgatgcagcgatggttcccgcattcgccgtcctgggtgtggtcggccgtgttcattgtggtggtgttcgcgctcaacatcatgtccgtgcggctgtacggcgaggcggaattctggttcgcgtcaatcaaggtgttcgccatcatcgcgttcattgtgatcggcctgctggcgatcttcggcgccataccgattgccggtcatgattccgcgccgttgctgggcaacttcgtggccggcggctggttcccgagcggcatcgcgccgattttctcgactttgctgaccgtggtgttcgcgttctccggcaccgaagtggtgggcgtggcggccggcgaaaccaaggatccctcgcgtgcgattcccaaggccgtgcacaccacggtgctgcgcctggcgattttcttcatcggctcgattctggtgatggcggccttgatcccctggcatcaggccggcgtggatacgagcccgttcgtgctggtgttccagtcaatcggtatgccgttcgccggcgacatcatgaacttcgtggtgttgacggccgtgctttccgccgcgaactccggcctgtacgtgtgttcgcgcatggtgtggtcgctggccaaggagcggctgattcccgaacgttttgctaggacgaatttccgtggtgtgccggtgtgggccgtgctgttcagcatggcgggctcactgctggcgttgctgtcttccgtgatcgccgcctcgaccgtgtatctggtgttggtcgccgtgtcaggtttggcgacgctggtggtgtggttctccgtatgcgtgtgccatatccgtttccggcgcgaatgggcgcgggatgggcacagcgccgatgagctcggctatcgtgcgcccggtttcccggtgctgccgtggctggccatcgtgatgtgcatcggcgcgctggtgctcgtggtgctcgatgatacgcagcgttcgaccctgtattgcatgatcccgttcgtcgcctgctgctacgcggcttattacgcactcgaacggcagcgcaaacgcgaaaacaacgcctaa

SEQ ID NO: 17172 - protein, 466 aa, Bifidobacterium longum NCC2705
MAAAGTPKDDTGLERKMESRHLTMISLGGVIGTGLFVSSGYAIHQAGPLGAILAYAAGSLLVYCVMVSLGELSVAMPYAGSFHMYAKRFIGPGTAFTIAILYWLNWAVALASEFTAAGLLMQRWFPHSPSWVWSAVFIVVVFALNIMSVRLYGEAEFWFASIKVFAIIAFIVIGLLAIFGAIPIAGHDSAPLLGNFVAGGWFPSGIAPIFSTLLTVVFAFSGTEVVGVAAGETKDPSRAIPKAVHTTVLRLAIFFIGSILVMAALIPWHQAGVDTSPFVLVFQSIGMPFAGDIMNFVVLTAVLSAANSGLYVCSRMVWSLAKERLIPERFARTNFRGVPVWAVLFSMAGSLLALLSSVIAASTVYLVLVAVSGLATLVVWFSVCVCHIRFRREWARDGHSADELGYRAPGFPVLPWLAIVMCIGALVLVVLDDTQRSTLYCMIPFVACCYAAYYALERQRKRENNA

SEQ ID NO: 17173 - DNA, 1575 bp, Bifidobacterium longum NCC2705
  CDS (1)..(1575): transl_table=11
atgagtcagcccgacaccgacacggcggcacagtcgccgtcctcgcaacaggaaccgcagattcagacggatggccgtcgaagccattcggaacagatgaatcaaccagcgcaaaccagccagtccgagtcgtcacatgatggcaaagacgagcacgccctacataccaacctgaagcgcggcatggaatcccgccacctgcagatgatctcattaggcggcgtaatcggcaccggcctgttcctgagctccggatacaccatccagcaggcgggccccatcggcacgatcctggcatacagcatcggcgcgctgatcgtctatctggtcatgcttacgctcggcgaattgtccgtggccatgccggtgaccggctccttccacgtgtatgccgaaaagttcatcggccccggcaccggcttcgtgatcgcaatccagtattggctcacctggacggtggcgctcggctccgaattcaccgccgccggcctgctcatgcaacgctggttcccggacagccccacatgggtgtggagcgcggcgtgcatcattctcatcttcaccttaaacgccttgtcggtgcggctcttcgccgaagcggaattctggttcgcctcgatcaaggtgttcgctatctgcgcgttcatcgtcatcggcctgctcgccatattcggcgttattccgattgccggctaccagcatgctccgatgttcggcaacctcgttaaggacggcatcttccccaacgggttcatgccagtgttcgccacgattctgaccgtcaacttcgcgttctccggcaccgagctcatcggcgtgaccgccggcgagacgcgcgacccggaaaccaccgtgccgaaggccatccacaccacgctgtggcgcctggtgctgttcttcatcggctcgatcaccgtgatgtgcgcgctgatcccgtggcgccaggccggcgtgggcgaaagcccgttcgtgctcgtcttcaacagcatcggcatcccctatgcgggcgacatcatgaatttcgtggtgctgacggccgtgctttccgcctcgaattccggcctgtacgcctccacgcgcatggtgtggtcgatgggcaacgaaggcatgattccgcgctggttcgccaaaacgaaccgtcgcggcgtgccgatgctcgccttgtgcgccgcgatggccggtggcctgctggcgctcctgtcttccgtgatcgccgcctcgactgtgtacctggtgctggtggcgctttccggcctgtccgccgtggtggtgtggatcgccatcgcctactgccagatcgtgttccgtcgccgttggctggagtccggccattccaccagcgaactcaaataccgcacgcccggctatccgtacgtgtcttgggcggcgttcatcctgtgcaccgcatcgttcgtattggtgattttcgacgtggagcaacggttcgcgctcgtggccgagctcgtgttcatcgtggcctgctatggggcgtatttcctgcaacagtgggtacgcaagcgcaaaaaggcgaccgaggccgacgacctcgatacgctttgggtcgcgcgcgactga

SEQ ID NO: 17174 - protein, 524 aa, Bifidobacterium longum NCC2705
MSQPDTDTAAQSPSSQQEPQIQTDGRRSHSEQMNQPAQTSQSESSHDGKDEHALHTNLKRGMESRHLQMISLGGVIGTGLFLSSGYTIQQAGPIGTILAYSIGALIVYLVMLTLGELSVAMPVTGSFHVYAEKFIGPGTGFVIAIQYWLTWTVALGSEFTAAGLLMQRWFPDSPTWVWSAACIILIFTLNALSVRLFAEAEFWFASIKVFAICAFIVIGLLAIFGVIPIAGYQHAPMFGNLVKDGIFPNGFMPVFATILTVNFAFSGTELIGVTAGETRDPETTVPKAIHTTLWRLVLFFIGSITVMCALIPWRQAGVGESPFVLVFNSIGIPYAGDIMNFVVLTAVLSASNSGLYASTRMVWSMGNEGMIPRWFAKTNRRGVPMLALCAAMAGGLLALLSSVIAASTVYLVLVALSGLSAVVVWIAIAYCQIVFRRRWLESGHSTSELKYRTPGYPYVSWAAFILCTASFVLVIFDVEQRFALVAELVFIVACYGAYFLQQWVRKRKKATEADDLDTLWVARD

SEQ ID NO: 17175 - DNA, 1377 bp, Streptococcus mutans UA159
  CDS (1)..(1377): transl_table=11
atggaaaaccacaattttgaaaatgaaggtcagtttaagcgaaaaatgaccagtcgtcatctctttatgttgtccttaggcggtgttattggaacagggcttttcttaagttcaggttatacaattgctcaagctggtcccttaggagcggtaatttcttatttagttggtgctattgttgtttaccttgtgatgctttctttgggtgaattagcagtagctatgcctgttacaggttcttttcatacctatgctaccaaattcatcagtcctggaactggttttaccattgcttggctttattggatttgttggacggttgctttagggacagagtttcttggtgcaggtatgttgatgggacggtgggttccttatgttcccacttgggtctttgcagcactttttgccttgcttatttttggtctcaatgctctcagtgttcgttcttttgctgaagcagaatccttcttttctagtataaaggttttagctattcttgtttttattattcttggttttggagccatgcttggtttggtttcttttaatggtaagcacgaagtatttctttttagtcatttgacagctcatggagctctgccaaagggacttccagcattaatgtcagtcatgctggcagttaattatgccttttctggaacagagctcatcgggattgcagcgggagaaacgaacaatcctaaagaagctgttcccaaggctattaaaacaacaattggtcgtttagtgattttctttgtattgacaattgttgtcttagcatcgtttttaccaatgaaagaagcaggtgtatccagtgctccttttgttgatgtttttgataagatgggcattccttttgctgctgatatcatgaatttcgttattttgacagctattttgtctgctggtaattcaggactttatgcttccagccgcatgctttggtctttggccaacgaaggtatgattagtccgagggttgttaaaatcaatgaacacggtgttcctatgagagctttgctcctatcgatggcaggtgctgttttatccttgttttcaagtatctatgcggcagataccgtttatttggctctgatgtcaatcgctggctttgctgttgttgtagtctggttgtccattcctatggcacaaattaattttcgtaaggaatggctgaaaagtcatgcccaagaagacttgttttataaaacgccttttactccaattctgccttacattacgattatgctattgttgatttcgattattggtattgcttgggatgcatcacaaagagcgggtctttatttcggtataccttttattctactttgttatctttattattattggcggcataagacattgtaa

SEQ ID NO: 17176 - protein, 458 aa, Streptococcus mutans UA159
MENHNFENEGQFKRKMTSRHLFMLSLGGVIGTGLFLSSGYTIAQAGPLGAVISYLVGAIVVYLVMLSLGELAVAMPVTGSFHTYATKFISPGTGFTIAWLYWICWTVALGTEFLGAGMLMGRWVPYVPTWVFAALFALLIFGLNALSVRSFAEAESFFSSIKVLAILVFIILGFGAMLGLVSFNGKHEVFLFSHLTAHGALPKGLPALMSVMLAVNYAFSGTELIGIAAGETNNPKEAVPKAIKTTIGRLVIFFVLTIVVLASFLPMKEAGVSSAPFVDVFDKMGIPFAADIMNFVILTAILSAGNSGLYASSRMLWSLANEGMISPRVVKINEHGVPMRALLLSMAGAVLSLFSSIYAADTVYLALMSIAGFAVVVVWLSIPMAQINFRKEWLKSHAQEDLFYKTPFTPILPYITIMLLLISIIGIAWDASQRAGLYFGIPFILLCYLYYYWRHKTL

SEQ ID NO: 17177 - DNA, 1377 bp, Streptococcus agalactiae NEM316
  CDS (1)..(1377): transl_table=11
atggaaaatcatcgttatgaagatgaaggtaaattccagcgtaagatgaccagtcgtcatctctttatgttatctctaggtggtgttatcgggactgggcttttcttgagttcaggttataccattgcacaggctggtccgcttggagctgtgctgtcttatttgattggtgccgttgtggtttatttggtcatgctatcacttggtgaattggcagttgccatgccggtgacggggtcattccacacttatgccactaagtttatcagtcctggcacaggttttactgttgcctggctatattggatttgttggacggtcgccttgggaactgaatttttaggtgctgccatgctcatgcagcgctggttcccagatgtgccggcttgggcatttgcttctttctttgcccttgtgatttttggcttaaatgctctcagtgtgcgcttttttgcagaagcagagtctttcttctcaagtattaaggttattgctatcattatctttattatcttgggcttaggtgctatgtttggtctagtttcctttgaaggtcagcacaaagctattcttttcactcatctgactgccaatggtgactttccaaatggtatcgttgcagttgtctcagtcatgttggctgttaactatgccttctctggtactgagttgattggtattgcggcaggtgaaacggataatccaaaagaagctgtgccaagggctattaaaacgacaatcggtcgcttggttgttttctttgtactgacaattgttgtcctagcttcgctattgccaatgaaagaggcaggcgtatccacagcaccattcgttgatgtctttgacaagatgggagtcccttttgcggcggatatcatgaactttgttatcttgacagccatcctgtctgctggtaactcaggtctctacgcatcaagccgtatgctctggtcccttgccaatgaaggtatgttgtcaaaatctgtcgtgaaaatcaataaatacggtgtcccaatgcgtgctcttctcttgtcaatggcaggagcagtgctgtcgctcttttcaagtatttacgctgcagacacagtttatctagccttggtttcaatcccgggctttgctgttgttgtcgtatggctagccattccggtcgcacaaatcaatttccgcaaggaattcttgaaagagaatcgactagaagatttgtcttacaaaacaccctttacaccagttctcccttatatcacaatcgttttgcttttgatttcgattgtggggattgcttgggatagctcacaacgtgctgggctttacttcggtgttccatttattattttatgttatatttatcacaaactacgttacaagacatggtga

SEQ ID NO: 17178 - protein, 458 aa, Streptococcus agalactiae NEM316
MENHRYEDEGKFQRKMTSRHLFMLSLGGVIGTGLFLSSGYTIAQAGPLGAVLSYLIGAVVVYLVMLSLGELAVAMPVTGSFHTYATKFISPGTGFTVAWLYWICWTVALGTEFLGAAMLMQRWFPDVPAWAFASFFALVIFGLNALSVRFFAEAESFFSSIKVIAIIIFIILGLGAMFGLVSFEGQHKAILFTHLTANGDFPNGIVAVVSVMLAVNYAFSGTELIGIAAGETDNPKEAVPRAIKTTIGRLVVFFVLTIVVLASLLPMKEAGVSTAPFVDVFDKMGVPFAADIMNFVILTAILSAGNSGLYASSRMLWSLANEGMLSKSVVKINKYGVPMRALLLSMAGAVLSLFSSIYAADTVYLALVSIPGFAVVVVWLAIPVAQINFRKEFLKENRLEDLSYKTPFTPVLPYITIVLLLISIVGIAWDSSQRAGLYFGVPFIILCYIYHKLRYKTW

SEQ ID NO: 17179 - DNA, 1440 bp, Pseudomonas putida KT2440
  CDS (1)..(1440): transl_table=11
atgtccgtgcagacaaccacaactagaaatgcctcggcgcataccttcaagcaggatatgcaaacccgccacatcgtcatgctggcgctgggcggagtgataggcaccggcctgtttctcacgtcgggctacaccgttaaccaggccggcccgttgggcgcggtcatcgcttacatactcggcgcaatcatggtgtacctggtcatgatgtgcctgggcgagctggcggtacacatgccggaagtcggctcgttcagcagttacgccacgcgttacctcggcccgggcaccggctacatggtggcctggatgtactggctgacctggacggtggcaatcggctccgaattcaccgccgcgggcatcctgatggtgcgctggttccccgacacgccggtatggatgtggagtgcgctgttcggcgctgcggtgttcatcagcaatatcatttcggtgcgatcgttcgccgaaaccgaattctggttgtcactggtcaaggtgttggccgtcatcgcctttctggtggtgggcggcggggccattctgggtggcttcgagatccagcaggcgcacagtgcagggctgggcaatttcacccgtgaagggttgttccccaccggtttctggtccattgcaatgaccctgctggcagtggccttcgcgttctcgggtaccgagctgatcggcatcgctgccggcgaaaccaaagacccggaaaagaacgtgcccaaggccattcgcaccacggtcctgcgcctggcgctgttcttcatcggcaccatctttgtactggccaccttgctgccgcgtgaacaggccggggttattgaaagcccgttcgtgatggtctttgcgatgattggtatcccgtatgcggccgatatcatgaacttcgtcatcatcaccgcgctgctgtctgccgccaactccggcctctacgccgcttcgcgcatgctctggaccctcagcgaccaaggcaacatgccccgccgttacgccacgctgtcgcgccgcggcacccccttcaatgcgatcgtgctgagcatggctggcggcatggcttcgctgttgagcagtgtgtttgcccccgacaccatctacctggcgctggtgtcgatttcagggttggccgtggtagtggtgtggatcagcatcgcggccagccagatcgcattccgccgtcattacatcgccagcggcggcaagctcgaggacctcaagttccgggtgcgtggctacccgttcgtaccactgggggccattttctgctgcgtactggcctgcgtcggcattgccttcgacccagctcagcgggttgccctgtacttcggcttgcccttcattgcctggtgctacctggcctattggctgacgtgcaagtaccgcagccgccgtacggccccgctggaaatcgtcgccccaggttccgaggccgcctga

SEQ ID NO: 17180 - protein, 479 aa, Pseudomonas putida KT2440
MSVQTTTTRNASAHTFKQDMQTRHIVMLALGGVIGTGLFLTSGYTVNQAGPLGAVIAYILGAIMVYLVMMCLGELAVHMPEVGSFSSYATRYLGPGTGYMVAWMYWLTWTVAIGSEFTAAGILMVRWFPDTPVWMWSALFGAAVFISNIISVRSFAETEFWLSLVKVLAVIAFLVVGGGAILGGFEIQQAHSAGLGNFTREGLFPTGFWSIAMTLLAVAFAFSGTELIGIAAGETKDPEKNVPKAIRTTVLRLALFFIGTIFVLATLLPREQAGVIESPFVMVFAMIGIPYAADIMNFVIITALLSAANSGLYAASRMLWTLSDQGNMPRRYATLSRRGTPFNAIVLSMAGGMASLLSSVFAPDTIYLALVSISGLAVVVVWISIAASQIAFRRHYIASGGKLEDLKFRVRGYPFVPLGAIFCCVLACVGIAFDPAQRVALYFGLPFIAWCYLAYWLTCKYRSRRTAPLEIVAPGSEAA

SEQ ID NO: 17181 - DNA, 1407 bp, Pseudomonas putida KT2440
  CDS (1)..(1407): transl_table=11
atgactgacagcgttgaaaaaatccagctcacccgcgccctgaaaagccggcacatcttcatgctgtcgctgggtggggttattggaaccggcctgttcatgggctcgggcgtaaccatcaatcagggcgggccggtgggcgcgatcctggcttacctggtcgcaggcttgctgatgtacctggtgatggtctgcctgggcgagctgtcggtgcagatgccggtgtccggttcgtttcaggcccacgccaccaaatacattggcccggccaccgggttcatgatcggctgggtgtactggatgagctgggccaccaccgtaggcctggagttcaccgctgccggcatgttgatgacccgctggttcccggaggtgccgatctggtactggtcggcgctgttcgtggtggtgctgttcgggctcaacgccctggccacgcgtgcctttggcgaggccgagtactggttctcgggcatcaaggtggcaaccatcctcggcttcatcgtcattggcctgctggtgatcttcggtgccatccccctgagcagcggggcacccgcaccgatgctgaacaacctggtgggcgagtcgctgttcccccatggcctgtcggcagtgttcgcggtgatgatgaccgtggtgtatgccttccagggctgcgaaatcatgggggtggctgccggtgagaccgagcacccggaaaagagcatcccgcgggcggtgcgcaatgtggtgttccgcgtgctgatcttctatgtgctggcgattgccgtgctgtcggccattgtgccgcacgagcaggccgggctgatggaaagcccgttcgtgcaggtgttcgacatggtcggcatcccttacgccgccgacttgatgaacttcgtcatcctcacggccatcctctcggtgggcaactccgggttgtatgcctccacgcgtatcctctgggccatgtccaagactggcatggcaccgaaaagcctgtcgccgctgagcaagcgtggcgtgccgctgcgggcgctgagcatcaccctgtgctttgcgctgatctcgctgatgaccagcttcgtcgcggctgacacgctgttcatggtgctgatggcggtgagcggcatgtccggcaccgtgacctggatcgtcatcgccctggcgcagtaccgtttccgcaaggcctggctgcgtgacggcgggcaactgcaggacctgaagtacaaggcgccgctgtacccactggtgccgctgctgtgcatcaccctgtgcagttcgctgttcgtgttcctggcgctggatgaaacccaacggccgtcgctgtactggggctttggcttcattgccctgtgctatgcggcgtacttcttcgtcaaccgccgtcggcagggggccttcgcacccagcacaccaggggtttga

SEQ ID NO: 17182 - protein, 468 aa, Pseudomonas putida KT2440
MTDSVEKIQLTRALKSRHIFMLSLGGVIGTGLFMGSGVTINQGGPVGAILAYLVAGLLMYLVMVCLGELSVQMPVSGSFQAHATKYIGPATGFMIGWVYWMSWATTVGLEFTAAGMLMTRWFPEVPIWYWSALFVVVLFGLNALATRAFGEAEYWFSGIKVATILGFIVIGLLVIFGAIPLSSGAPAPMLNNLVGESLFPHGLSAVFAVMMTVVYAFQGCEIMGVAAGETEHPEKSIPRAVRNVVFRVLIFYVLAIAVLSAIVPHEQAGLMESPFVQVFDMVGIPYAADLMNFVILTAILSVGNSGLYASTRILWAMSKTGMAPKSLSPLSKRGVPLRALSITLCFALISLMTSFVAADTLFMVLMAVSGMSGTVTWIVIALAQYRFRKAWLRDGGQLQDLKYKAPLYPLVPLLCITLCSSLFVFLALDETQRPSLYWGFGFIALCYAAYFFVNRRRQGAFAPSTPGV

SEQ ID NO: 17183 - DNA, 1449 bp, Staphylococcus epidermidis ATCC 12228
  CDS (1)..(1449): transl_table=11
atggaagataataatatgaaacgtggtctcaattcgagacatatatctatgatagctataggtggcgctataggtactggactttttgtggcaactggaagtgtcatttctcaagctggcccaggaggagctatattagcttatatactaattggtattatgctttattttttaatgtcatcaataggagaattagcaactttctatccggtttctggttcttttagttcatactctaccagatttgttgattcgtcacttggttttacaatgggttggttgtattggggtatgtggtcacttgtaacaagtgtagatatcattgttgcttccaatgtattacaatattgggatgtatttaaagttttaaatccacttacatggagcttaattttcttaactctgttgtttttaattaatattttttctgttaaagcttttggagaaactgagttttggttatcactgatcaaagtcattactataattgtatttattatttttggaattatgatgattttcggtattcttggtggtcatacatatggctttgagaattatactaaaggtcaagcaccttttgtcggtggaatatcaggcatattaagcgttcttttagttgcaggtttttcagttggtggtactgaagtagtcgcagtaacagctggtgaatcaaataatcccgaaaaatcaatgcctaaagctataaaacaggtattttggagaatattactcttttacgtattgtctatagctgtgatagctgccatcattccatatacggatccacttttacttaatgaaaatgagtctgtatcacaaagtccgtttacaattgttttcgataaaatagggatcgcttttgctgcatccgtcatcaacgctgttatcttaacatcattattatcagcagctaactctggtatttatacaacaagtagaatgctattttctttaagtgctgataaacaagcacctaaattctttggaaaactcaatgataaaactaaattacctatgcgtgcattaattacaacatatattattattgtattagtcattgtttatgctaattttaatgctaatgctgtatttaacttattaaatatcataggatctatggttattgtagtttggggatctagtatttggtcacaaattagattaagacaagcaattaaaaaacagggtaaaaatccagataaactgttgccatataaagcacctttttacccagtcggacctattattgtccttttcacattattattcttattattaggtagttcctttggtagtatcgcatctggtgatattttaggtgtcattcgaaactttacaccattatttattctagctatcatctatattgctcataaattaatcaaacggacacattttgtcaaactggaagaaatagatttaactccgcataattacaagaattaa

SEQ ID NO: 17184 - protein, 482 aa, Staphylococcus epidermidis ATCC 12228
MEDNNMKRGLNSRHISMIAIGGAIGTGLFVATGSVISQAGPGGAILAYILIGIMLYFLMSSIGELATFYPVSGSFSSYSTRFVDSSLGFTMGWLYWGMWSLVTSVDIIVASNVLQYWDVFKVLNPLTWSLIFLTLLFLINIFSVKAFGETEFWLSLIKVITIIVFIIFGIMMIFGILGGHTYGFENYTKGQAPFVGGISGILSVLLVAGFSVGGTEVVAVTAGESNNPEKSMPKAIKQVFWRILLFYVLSIAVIAAIIPYTDPLLLNENESVSQSPFTIVFDKIGIAFAASVINAVILTSLLSAANSGIYTTSRMLFSLSADKQAPKFFGKLNDKTKLPMRALITTYIIIVLVIVYANFNANAVFNLLNIIGSMVIVVWGSSIWSQIRLRQAIKKQGKNPDKLLPYKAPFYPVGPIIVLFTLLFLLLGSSFGSIASGDILGVIRNFTPLFILAIIYIAHKLIKRTHFVKLEEIDLTPHNYKN

SEQ ID NO: 17185 - DNA, 1452 bp, Lactobacillus plantarum WCFS1
  CDS (1)..(1452): transl_table=11
atggcagaaaaacaacatcaggaagtgcatcgttccttacagacgcggcatttatccatgattgcattaggtggtagtatcgggaccgggctgtttgtcgcgtccggttcggcaatttcaacggctgggccagggggagcattactggcctacgttggtattggagtgatggtttactttttaatgactagtctgggcgaaatggcaacttatttgcccgtttcaggttcgttttccacgtatgccacgaagtttgttgacccggcacttgggtttgcgatgggctggaattactggttcaactgggcaatcacgttagcggtcgatattagtacggcggcgattgtcatgcagttctggttgccatccgtgccggggtgggtttttagtctgattgcgctcgttttgatttttacgatcaacgcgctgtcagtccggtcgtttggagaaactgagtactggctttcgctaattaaagtggtgaccgtgctcgtattcttggttatcggtgtcttgacgatcgtgggaatcatgggcggtcatgccactggcctcagtaactttacctataaaaaggcaccatttgtcggtggaattccaacgattttgagtgtcttcgtggtcgctggtttttcgtttcaaggaaccgaattaattgggatcacggccggggagtcagcaacaccggagaaaagtattccggcggctattaaacaagttttctggcgtattttgttattttacattttagccattttcgtgattgcggcgattattccttatacgtcgaaagatcttctagggtcatcagcgagcgatattgccatcagtccgttcacgttagtctttaaacgggctgggttggcggctgcggccagtgtgatgaacgcagtgatcttgacgtccgtattgtcagctgctaattcggggatgtacgcctcgacacggatgttatattctttgtcattacagggttatgcccccaagacatttggtcgggtcaatcgtcgtgggattccaatcatggcattattaggaacgacggtgattggattactcacgttcttgtcgagtctattcggtgaacggatttatattttcctcgtttcggccagtgggttaacgggttttatcgcttggctaggaatcgctatttcgcatctgcgtttccgtcgcgcgtttgttaagcaggggcatcaattgagtgaattgcggtaccatgccaagtggttcccatttggcccgtggttcgcctttatcttgtgtgtcgtggtcattattggtcaagacttacattcatttgcaacgcttgattggcaggctattggggtgacctatatgagcatcccgttattcatcatcttgtatgtctattataagattcgctatcatactaagatgattccgctagacaaggttgatttgacacgcaaacgacaccatcaagattaa

SEQ ID NO: 17186 - protein, 483 aa, Lactobacillus plantarum WCFS1
MAEKQHQEVHRSLQTRHLSMIALGGSIGTGLFVASGSAISTAGPGGALLAYVGIGVMVYFLMTSLGEMATYLPVSGSFSTYATKFVDPALGFAMGWNYWFNWAITLAVDISTAAIVMQFWLPSVPGWVFSLIALVLIFTINALSVRSFGETEYWLSLIKVVTVLVFLVIGVLTIVGIMGGHATGLSNFTYKKAPFVGGIPTILSVFVVAGFSFQGTELIGITAGESATPEKSIPAAIKQVFWRILLFYILAIFVIAAIIPYTSKDLLGSSASDIAISPFTLVFKRAGLAAAASVMNAVILTSVLSAANSGMYASTRMLYSLSLQGYAPKTFGRVNRRGIPIMALLGTTVIGLLTFLSSLFGERIYIFLVSASGLTGFIAWLGIAISHLRFRRAFVKQGHQLSELRYHAKWFPFGPWFAFILCVVVIIGQDLHSFATLDWQAIGVTYMSIPLFIILYVYYKIRYHTKMIPLDKVDLTRKRHHQD

SEQ ID NO: 17187 - DNA, 1383 bp, Lactobacillus plantarum WCFS1
  CDS (1)..(1383): transl_table=11
atgtcaaaacaaacccacctcagtcgccagatggaatcacggcacgtactgatgatttcgctcggtggcgtgattgggaccggattatttttaagttccggttacacgattcatcaagcggggccaattgggaccctgctcgcctataccattggagccatcctcgtctatctcgtcatgctctgtctaggtgagctgtcagttgcaatgccctacaccggggcgtttcacgtctatgcgaaaaaatatattggtcccggcacaggctttacggttgccatcctatattggttgacttggacgattgccctcggttcagaatttacagcagcggggctcatcatgcaaacgtggtttccgcacattgcgacctggatctggagcctcgtctttatggtggtcatcttcaccgttaacgccctctccgtacgctggtttgcggaaacggaattctggtttgccagtatcaaagtcatcgcgatcattgcttttattgtgttaggcggactggcaatggtcggtatcctgccacttcacggtcataccagtgccccgtttctgagcaactatacgcgtaacggttggttccccaatggttttggtggcgtctttacaactatgctaacggtcaactttgccttttctggaactgagctaattggaattacagctggtgagactaaggatccggcccacaccattccgaccgcaatcaaaacgaccctctggcgcctgattattttcttcatcggtagcatgttcgtcatggccgcactgattccttacaaacaagcaggtgtgacgcaaagtccattcgtgctcgtcttcaaagcgattgggattccctacgccgctgatttaatgaatttcgtcgtattgaccgccattatgtcggccgctaattctggcctctacgcgtctacccgcatgctgtggtcacttgcgaacgagggaaccattccaaaggttttcaaacgaaccacgaagcgtgatgtgccgttagtcgccctaattactagcatgctgggtggcattctggccctattgtcgagtgtctatgccgccggttcggtgtacctggtcttagtatccatttcaggacttgccgtcgtcattgtttggatggcaattgccctttcggagatcaacttccgcaaagcctacctgaaaagtgggcagtcgcttgatcaattgacttttaaaacgcccggctacccggtcgtcccgtggctggcctttatcttaagtgggctctcttgtatcttgatttggtttgaccctaaccagcggattgccttgtattacaccattcccttcgtggcgatttgctatctaggctactatctcaatcaacgttatcgacggacccacgccgcaaagtaa

SEQ ID NO: 17188 - protein, 460 aa, Lactobacillus plantarum WCFS1
MSKQTHLSRQMESRHVLMISLGGVIGTGLFLSSGYTIHQAGPIGTLLAYTIGAILVYLVMLCLGELSVAMPYTGAFHVYAKKYIGPGTGFTVAILYWLTWTIALGSEFTAAGLIMQTWFPHIATWIWSLVFMVVIFTVNALSVRWFAETEFWFASIKVIAIIAFIVLGGLAMVGILPLHGHTSAPFLSNYTRNGWFPNGFGGVFTTMLTVNFAFSGTELIGITAGETKDPAHTIPTAIKTTLWRLIIFFIGSMFVMAALIPYKQAGVTQSPFVLVFKAIGIPYAADLMNFVVLTAIMSAANSGLYASTRMLWSLANEGTIPKVFKRTTKRDVPLVALITSMLGGILALLSSVYAAGSVYLVLVSISGLAVVIVWMAIALSEINFRKAYLKSGQSLDQLTFKTPGYPVVPWLAFILSGLSCILIWFDPNQRIALYYTIPFVAICYLGYYLNQRYRRTHAAK

SEQ ID NO: 17189 - DNA, 1470 bp, Salmonella enterica subsp. enterica serovar Typhi Ty2
  CDS (1)..(1470): transl_table=11
atgggttccaaaactaaaaccacagaagcgcccgcgctacgtcgcgaattaaaggcgcgtcacctgacgatgattgccattggcggctccatcgggacaggtcttttcgttgcatctggtgcgacaatttctctggcggggccaggcggcgcgctgttttcttatattctgattggtttgatggtctacttcctgatgaccagtcttggcgagctggcggcctatatgccggtatctggctcgtttgcgacatatggtcagaactatgtggaagaaggctttggtttcgcgctgggctggaactactggtacaactgggcggtgactatcgctgttgacctggttgccgcacaattggtgatgggctggtggttcccggacacgccgggctggatctggagcgcgctattcctctgcgtcattttcttgctgaactacatttctgtacgcggttttggcgaggcggagtactggttctcgttaattaaagtcgcgaccgttattatcttcatcatcgttggcgtagcgatgattatcggcatctttaaaggtgtcgagccggtcggctggagcaactggacgacgggcgatgcgcctttcgctggcggttttgcggcaatgattggcgtcgcgatgatcgtgggcttctctttccagggaactgagctgattggtattgccgccggggaatctgaaaacccggagaagaatattccgcgcgcggtgcgtcaggtgttctggcgtattctgctgttttatgttttcgcgattttgattatcagcctgatcattccttataccgatccaaacctgctgcgtaacgacgtcaaagacattagcgtcagtccgtttaccttagtgttccagcatgcgggcttgttgtctgcggcggcgataatgaatgcggttatcctgacggcggtactgtctgcgggtaactccgggatgtatgcctcgacccgtatgctctacaccctggcctgtgacggtaaggccccgcgtatttttgcgaaattgtcccgcggcggcgtaccgcgcaatgcgctttatgccaccaccgtgattgccggtctttgctttttgacctcaatgttcggcaaccagacggtctatctgtggctgttgaacacctccggtatgacgggcttcatcgcctggctggggattgccattagccattatcgcttccgtcgcggttacgtgttacaagggtatgatgtgaatgatttgccgtaccgttccgggttcttcccgctggggccgattttcgcctttgtactgtgcctgattattacgttggggcagaactatgaagcgttcctgaaagataccatcgactggggcggcgtcgcggcgacctatatcggtattccgctgttcctgcttatctggttcggctacaagctgataaaaggcacgcatttcgtgcgctatagcgaaatgcacttcccggaacgcgttaaaaagtaa

SEQ ID NO: 17190 - protein, 489 aa, Salmonella enterica subsp. enterica serovar Typhi Ty2
MGSKTKTTEAPALRRELKARHLTMIAIGGSIGTGLFVASGATISLAGPGGALFSYILIGLMVYFLMTSLGELAAYMPVSGSFATYGQNYVEEGFGFALGWNYWYNWAVTIAVDLVAAQLVMGWWFPDTPGWIWSALFLCVIFLLNYISVRGFGEAEYWFSLIKVATVIIFIIVGVAMIIGIFKGVEPVGWSNWTTGDAPFAGGFAAMIGVAMIVGFSFQGTELIGIAAGESENPEKNIPRAVRQVFWRILLFYVFAILIISLIIPYTDPNLLRNDVKDISVSPFTLVFQHAGLLSAAAIMNAVILTAVLSAGNSGMYASTRMLYTLACDGKAPRIFAKLSRGGVPRNALYATTVIAGLCFLTSMFGNQTVYLWLLNTSGMTGFIAWLGIAISHYRFRRGYVLQGYDVNDLPYRSGFFPLGPIFAFVLCLIITLGQNYEAFLKDTIDWGGVAATYIGIPLFLLIWFGYKLIKGTHFVRYSEMHFPERVKK

SEQ ID NO: 17191 - DNA, 1428 bp, Bacillus cereus ATCC 14579
  CDS (1)..(1428): transl_table=11
atgcagcaaccaacgaatgagaaattacatcgtacgatgaagagtagacatttatttatgatcgcacttggtggtgtaatcggaactggtttcttcttaggttcaggttacaccattaatcaggctggaccagggggagccatcctttcatatttagtaggcggatttattatgtatttaacaatgctttgtcttggagagttaacggtagcgatgccggtttcaggatctttccaaaagtatgcgacgaagtttattggaccaggaacgggctttatgattggctggttatactggctcggctgggcagtaacagtgggtctagaattaacgtcaatcggtttaatgatgaaaagatggtttccaaatgttgatgtttgggtatggtgccttgtattcggcgttattttatatgcttcaaacgcaatttcggcgaaaagttatgctgaattagaattttggttctctagtattaaagtaattacaattcttgcatttgttgtgcttggtggtagtgcattattaggatttatatcatatgacggaaaagaagcagcacctcttttctctaactttgtaagcaatggtggacttttcccgaatggactagctgccgtattacttacaatgattacagttaacttctcgttccaaggaacagagttaatcggaattgcagcgggagaaagtgaaaatccagaaaaaacaattccacgtgcgattcgtaatacagtatggcgcattatgttattcttcattttaacaatgacgattttagtaggattaatttcttggaaagaagcaggcgtaattgaaagtccattcgtagtcgtatttgataaaattggtattccatacgcagctgatattatgaacttcgttattattactgcgttattatctgtagcgaactctggattatatgcagcgacgcgtatactatggtcacttgcaaatgagggaatggcaccaacttccttccagaaagtaaataagcgtggtattccaattacagcgctagtcgtaacgattgcggtagctggattatctctattcacaagtttccttgcagaagatacagtatacatgtatttattatcgatagctggtttatcggctgtttcaagttggatcattattgctctatcgcaacttcgctttagaagtcagtatataaaaggcggaggaaagttagaggacttaaagtatagaacaccactatacccaattgtcccgattttagccttaattacaaatagcattgttgttattagtttagcgtttattcctgaacaaagaatggcgttatactgtggtattccatttatcattttctgctatatatattattatattagtaagaaacggcagaaaccgatgaaagtggagatggaaaaaacaaatgaaactaacaatcaaacacgatga

SEQ ID NO: 17192 - protein, 475 aa, Bacillus cereus ATCC 14579
MQQPTNEKLHRTMKSRHLFMIALGGVIGTGFFLGSGYTINQAGPGGAILSYLVGGFIMYLTMLCLGELTVAMPVSGSFQKYATKFIGPGTGFMIGWLYWLGWAVTVGLELTSIGLMMKRWFPNVDVWVWCLVFGVILYASNAISAKSYAELEFWFSSIKVITILAFVVLGGSALLGFISYDGKEAAPLFSNFVSNGGLFPNGLAAVLLTMITVNFSFQGTELIGIAAGESENPEKTIPRAIRNTVWRIMLFFILTMTILVGLISWKEAGVIESPFVVVFDKIGIPYAADIMNFVIITALLSVANSGLYAATRILWSLANEGMAPTSFQKVNKRGIPITALVVTIAVAGLSLFTSFLAEDTVYMYLLSIAGLSAVSSWIIIALSQLRFRSQYIKGGGKLEDLKYRTPLYPIVPILALITNSIVVISLAFIPEQRMALYCGIPFIIFCYIYYYISKKRQKPMKVEMEKTNETNNQTR

SEQ ID NO: 17193 - DNA, 1416 bp, Bacillus cereus ATCC 14579
  CDS (1)..(1416): transl_table=11
atgaatcaacaaattgaacaaacagatttaaaacgaacaatgaaaagtagacacctatttatgattgcactcggcggtgttatcggaaccgggttatttatgggatctggtcaaattgtccataatgccggacctggtggtgctattcttgcatttttagtcggtggatttgttatgtatttaacgatgttatgtcttggtgaattatccgtcgctatgccagaagcaggttcattccaaagttatgcaagcaaattcatttcacctggttttggatttgttgtcggttggatgtattggttaaattgggctgttacagttggcgtagagttaacaactgtaagtattttaatgaaacgctggtttccagacgtttcttcctggatttggtgcgttacatttgcagcagcactcttcctcgtaaacgctttatcagcaaaagcatatgcagaagcagagttttggttcgcaagtgtaaaagtcgcaacaattgttattttcatcgtacttggcggcgctgttatgttcggtctactagactttaatggaaagccagctccaatgcttcataatttcactgaaaatggcgggctatttccaaatggtgcattagctgttcttcttacgatgattacagtaaattactccttccaaggaacagaattaatcggaatcgcttcaggcgaaagtgaaaatcctgaaaaaacaattccaaaagcaattaaaaacacaatttggcgaactctcttcttcttcgtcttagcgatatcagttgttgtaggtttactcccatggcaagaggctaatctagtcgaaagtccctttgtacttgtatttgatgtagccggtgtcccatatgcagcagacattatgaactttgttattattacagctgtattatccgttgctaactctggtctctacgcaaattctcgtatgctgtgggcgatggcaaaacaaggaatggcaagtccagcatttacgaaattaactaaaaaaggtgtaccgctaaatgcattaattttcagcctaattttcgctagcctgtccttactaacaagtgtatttgcggcagatactgtctttctagttttaacatctattgcagcaatggctgccgttgtcgtttggatgtcaatcgccgcttcacagtttttcttccgtagaaatttcgtgaaaaacggtggcaacataaatgatttaaaatatcgtacaccgctctatccactagttccaatcgtagcgttttcgctgaatttcattacatttgttagtttggctttcattccagatcaaagaattgctctttattgtggcattccatttatgattatttgttacattttatatcaagttaaatataaaaaaattgtcacacttgaacagccacgaactgtcatacgagaaataaactaa

SEQ ID NO: 17194 - protein, 471 aa, Bacillus cereus ATCC 14579
MNQQIEQTDLKRTMKSRHLFMIALGGVIGTGLFMGSGQIVHNAGPGGAILAFLVGGFVMYLTMLCLGELSVAMPEAGSFQSYASKFISPGFGFVVGWMYWLNWAVTVGVELTTVSILMKRWFPDVSSWIWCVTFAAALFLVNALSAKAYAEAEFWFASVKVATIVIFIVLGGAVMFGLLDFNGKPAPMLHNFTENGGLFPNGALAVLLTMITVNYSFQGTELIGIASGESENPEKTIPKAIKNTIWRTLFFFVLAISVVVGLLPWQEANLVESPFVLVFDVAGVPYAADIMNFVIITAVLSVANSGLYANSRMLWAMAKQGMASPAFTKLTKKGVPLNALIFSLIFASLSLLTSVFAADTVFLVLTSIAAMAAVVVWMSIAASQFFFRRNFVKNGGNINDLKYRTPLYPLVPIVAFSLNFITFVSLAFIPDQRIALYCGIPFMIICYILYQVKYKKIVTLEQPRTVIREIN

SEQ ID NO: 17195 - DNA, 1425 bp, Bacillus cereus ATCC 14579
  CDS (1)..(1425): transl_table=11
atggcgcaagtaagcaatacaaacaatgaattaaaacgtacgatgaaaagtagacacttattcatgattgcactcggtggtgtgattggaaccgggttatttaacggatctggctttattataagtcaggctggacctggtggatccgtacttgcctttattgctggtggattattaatgtatttcgttatgctatgtcttggtgaacttgctgtagccatgcctgtttcaggttcctttcaggaatatgctactaaatttatcaatcctgcaactggctttacaatcggatggttgtattggttaagctgggcgaatacgaccggtcttgaatttacaactgccggtattacaatgcagcgctggtttcctgatattcctgtttgggtttggtgtttaatatttggcgttaccatcttcactattaacgcattatctgctcgtagttatgcagaaacagaattttggttttcaagtataaaagtatctgccattatagcttttatacttcttggtggcgccgctatgttcggttttattgatttaaaaggcgatgaaccagctccacttctttcaaatttcgtaaatcatggtggtttatttccgaatggacttgcagctattctattaacaatggttacagtcaattattccttccaaggtacagagcttgtcggaatcgcagcaggtgaaagtgaagatccagcaaaaactttacctcgttctattagaaatattatatggcgcacaatgtttttcttcgtcttagcaatctttgttcttgttgctttaattccttgggaagaagctggattaacaaagagtccattcgttgctgtttttgataatatcggtattccatatgcagctgatattatgaactttgttattcttactgctgttctttctgtcgcaaactcaggactatacgctgctactcgaatgctttggtctttatcaaaaaacgaaatggctccagcatttttaaagaaattatcatcacgtgggattcctctcaacgctttaatcatgacaatagctatttctgctttttctcttttgacaagtgtagtagctgctgaaactgtttacttgtggctcatttcaatttccggagtcattaccattattgtttggatgtcaatttgtgtttctcaattctttttccgcaaacattatttagcagacggcggaaaattagaagacttaaaatttaaaacgccactttatccactcgtaccaattcttggttttggattgtatggcattatattaatcagtcttatttttatcccagaacaacgacttggaatctattgcactgtcccatttatcatcttttgctacacttactatcactttaaagttaagaaaagaaattctactaacactcatagtgaaactaaaattagcgagacttcgtaa

SEQ ID NO: 17196 - protein, 474 aa, Bacillus cereus ATCC 14579
MAQVSNTNNELKRTMKSRHLFMIALGGVIGTGLFNGSGFIISQAGPGGSVLAFIAGGLLMYFVMLCLGELAVAMPVSGSFQEYATKFINPATGFTIGWLYWLSWANTTGLEFTTAGITMQRWFPDIPVWVWCLIFGVTIFTINALSARSYAETEFWFSSIKVSAIIAFILLGGAAMFGFIDLKGDEPAPLLSNFVNHGGLFPNGLAAILLTMVTVNYSFQGTELVGIAAGESEDPAKTLPRSIRNIIWRTMFFFVLAIFVLVALIPWEEAGLTKSPFVAVFDNIGIPYAADIMNFVILTAVLSVANSGLYAATRMLWSLSKNEMAPAFLKKLSSRGIPLNALIMTIAISAFSLLTSVVAAETVYLWLISISGVITIIVWMSICVSQFFFRKHYLADGGKLEDLKFKTPLYPLVPILGFGLYGIILISLIFIPEQRLGIYCTVPFIIFCYTYYHFKVKKRNSTNTHSETKISETS

SEQ ID NO: 17197 - DNA, 1476 bp, Bacillus cereus ATCC 14579
  CDS (1)..(1476): transl_table=11
gtgttgaacatgaatagcgcaacaaatcaagctacctctaaaacagaaactacacaaggaaaaggtgaattaagacgcggtctaaaatcaaggcaccttacgatgatttctctcggtggtacaattggtaccggactatttcttgccagcggtggtgtcatccattcagctggacctggtggtgcattaattgcatacgccgcaattggaattatggtttacttcttaatgacaagcttagctgaactcgcagcttacatgcctgttactggatcttttagcacgtacgcaacaaaatttgttgatccatcacttggctttgcacttggatggaactattggtataactgggcaattacgattgctgctgaactagctgctgtaacattaattatgaaattttggttcccagataccccttctcttatttggagcggattatgtttagctattattttccttttaaactatttatctgttaaagggtttggtgaatctgaatattggttcgcacttattaaagtagttacgattattatctttttaattgttggtttcatgatgatttttggaattatgggcggcgaaacggttggcttcaaaaacttcactgttgcagatgcaccatttaacggcggtatcatggcaattatcggtgtgtttatggcagctggtttctcattccaaggtactgaactattaggagtagctgctggtgaaacatctgatccagaacgtaatatcccaaaagcaattcgttcaatcttttggcgtattcttttattctatatccttgcgattctcgttatcggtttattaattccttatacaactgaaagtcttgctgcaagtgatgtaacagtaagtccatttacacttattttcgaaaaagcgggcgttgcctttgctgcttctgttatgaacgctgttattttaacggcagtactatctgctggtaactctggtatgtatgcatcaactcgtatgctttgggatttagctcgccaagggaaggcaccaaagtttcttggtaaattagatagccgcggtgtacctgttaacgcattaatcgtaacatcgattgtcggtagtattgctttcattgcttctttattcggtgacggtgttgtatacatttggttattaaatgcatcaggaatgtctggctttatcgcttgggtcggcattgcaattagtcattaccgtttccgtaaagcgtatatcgcacaaggaaaagatttaaatgacttaccatatagagcaaaatggttccccttcggtccaatctttgcatttacactttgtatcatcgtaattttaggacaaaactacggggcatttatgggtgagtcaatcgactggaacggtgtactcgtttcttacatcggtttaccactcttcttagtactatggttaggttataaatttacgaaaaaaacaaaagtgattccacttgataaatgtgaactaaaataa

SEQ ID NO: 17198 - protein, 491 aa, Bacillus cereus ATCC 14579
MLNMNSATNQATSKTETTQGKGELRRGLKSRHLTMISLGGTIGTGLFLASGGVIHSAGPGGALIAYAAIGIMVYFLMTSLAELAAYMPVTGSFSTYATKFVDPSLGFALGWNYWYNWAITIAAELAAVTLIMKFWFPDTPSLIWSGLCLAIIFLLNYLSVKGFGESEYWFALIKVVTIIIFLIVGFMMIFGIMGGETVGFKNFTVADAPFNGGIMAIIGVFMAAGFSFQGTELLGVAAGETSDPERNIPKAIRSIFWRILLFYILAILVIGLLIPYTTESLAASDVTVSPFTLIFEKAGVAFAASVMNAVILTAVLSAGNSGMYASTRMLWDLARQGKAPKFLGKLDSRGVPVNALIVTSIVGSIAFIASLFGDGVVYIWLLNASGMSGFIAWVGIAISHYRFRKAYIAQGKDLNDLPYRAKWFPFGPIFAFTLCIIVILGQNYGAFMGESIDWNGVLVSYIGLPLFLVLWLGYKFTKKTKVIPLDKCELK

SEQ ID NO: 17199 - DNA, 1575 bp, Bordetella parapertussis 12822
  CDS (1)..(1575): transl_table=11
atggctccaccgggccacgtcgtccccagcccggcgaacggccaccgccatgacgcccggcccgccacgcgcctgcccgaaccgacgagcctgcgccgcaccctgtcggcgcgccacctgaccatgatcgcggtcggcggctcgatcggcaccggcctgttcgtcgcctcgggcgccaccatcgcccaggccggcccgggcggcgccctgctggcctacttgctggtcggcatcatggtgtacttcctgatgaccagcctggacgaactggcggccagcatgccggtggcgggctcgttctccacctacggcgccaagtatgtcgacgaaggcttcggcttcgcgctgggctggaactattggtacaactgggccgtgaccgtcgcggtggacctggttgccgcgcagctggtcatggcctattggtttcccgaaatgcccggcgtgctctggagcgccgccttcctggcgctgatcgtcgggctgaacgccctgtcggcgcgcggcttcggcgaggccgagttctggttcgcgctgatcaaggtgatcgcggtgctggcgttcattgccatgggcgtgctgatgctgctgggcatcatccgcggcggcgagcacggcggcctggcctactggaccctggacgacgcgccattcgccggcggattcgccgcgctgatcggcgtggccatggtagtgggcttttcgttccagggcaccgagctgatcggcatcgccgccggcgaatccaaggacccggcccgcaacctgccgcgcgccgtgcgccaggtgttctggcgcatcctgctcttctacgtgctggccatcgccgtcatcggcctgctgattccctataccgatccgcaattgctgcgcaacgaggtgtccgacgtcagcgtcagcccgtttgcgctgatcttcgagcgcgccggcctgctggcggccgcctccatcatgaatgcggtggtgctgacgtcggtgctgtcggcaggcaattccggcatgtacgccgccacccgcatgctgtacagcctggcccgcgacggcaaggcgccggcgcgcttcggccgcctgtcgcgcagcggcgtgcccctgtgggcgctgctggccaccaccgcggtcgccgcgctgtgttttctgtcgttcctgttcagccccaaggcggtgtacatctggctgctgaacacctcgggcatgaccggattcatcgcctggctgggcatcgccatcagccactaccggtttcgccgcggctatgtcgcccagggcaacaacctggccgacctgccgtatgtctcgcccttcttcccgttcggcccgctgttcgcgttcgtcctgtgcctggtcatcacgctgggccagaactaccacgccttcctgcaggaccgcatcgactggaccggcgcggccgccacctatgtcggcattccgctgttcctggcgatctgggcgggctatcgcctggtgcgcggctcgcgcttcgtgcgctaccgcgacatgcagttccccgacctgcgcatgcgcaaccgcgagttgaacgccatgctcagcggcgactgcgccgagccccgccgctag

SEQ ID NO: 17200 - protein, 524 aa, Bordetella parapertussis 12822
MAPPGHVVPSPANGHRHDARPATRLPEPTSLRRTLSARHLTMIAVGGSIGTGLFVASGATIAQAGPGGALLAYLLVGIMVYFLMTSLDELAASMPVAGSFSTYGAKYVDEGFGFALGWNYWYNWAVTVAVDLVAAQLVMAYWFPEMPGVLWSAAFLALIVGLNALSARGFGEAEFWFALIKVIAVLAFIAMGVLMLLGIIRGGEHGGLAYWTLDDAPFAGGFAALIGVAMVVGFSFQGTELIGIAAGESKDPARNLPRAVRQVFWRILLFYVLAIAVIGLLIPYTDPQLLRNEVSDVSVSPFALIFERAGLLAAASIMNAVVLTSVLSAGNSGMYAATRMLYSLARDGKAPARFGRLSRSGVPLWALLATTAVAALCFLSFLFSPKAVYIWLLNTSGMTGFIAWLGIAISHYRFRRGYVAQGNNLADLPYVSPFFPFGPLFAFVLCLVITLGQNYHAFLQDRIDWTGAAATYVGIPLFLAIWAGYRLVRGSRFVRYRDMQFPDLRMRNRELNAMLSGDCAEPRR

SEQ ID NO: 17201 - DNA, 1575 bp, Bordetella bronchiseptica RB50
  CDS (1)..(1575): transl_table=11
atggctccaccggaccacgtcgtccccagcccggcgaacggccaccgccatgacgcccggcccgccacgcgcctgcccgaaccgacgagcctgcgccgcaccctgtcggcgcgccacctgaccatgatcgcggtcggcggctcgatcggcaccggcctgttcgtcgcctcgggcgccaccatcgcccaggccggcccgggcggcgccctgctggcctacttgctggtcggcatcatggtgtacttcctgatgaccagcctgggcgaactggcggccagcatgccggtggcgggctcgttctccacctacggcgccaagtatgtcgacgaaggcttcggcttcgcgctgggctggaactattggtacaactgggccgtgaccgtcgcggtggacctggttgccgcgcagctggtcatggcctattggtttcccgaaatgcccggcgtgctctggagcgccgccttcctggcgctgatcgtcgggctgaacgccctgtcggcgcgcggcttcggcgaggccgagttctggttcgcgctgatcaaggtgatcgcggtgctggcgttcattgccatgggcgtgctgatgctgctgggcatcatccgcggcggcgagcacggcggcctggcctactggaccctggacgacgcgccattcgccggcggattcgccgcgctgatcggcgtggccatggtagtgggcttttcgttccagggcaccgagctgatcggcatcgccgccggcgaatccaaggacccggcccgcaacctgccgcgcgccgtgcgccaggtgttctggcgcatcctgctcttctacgtgctggccatcgccgtcatcggcctgctgattccctataccgatccgcaattgctgcgcaacgaggtgtccgacgtcagcgtcagcccgtttgcgctgatcttcgagcgcgccggcctgctggcggccgcctccatcatgaatgcggtggtgctgacgtcggtgctgtcggcaggcaattccggcatgtacgccgccacccgcatgctgtacagcctggcccgcgacggcaaggcgccggcgcgcttcggccgcctgtcgcgcagcggcgtgcccctgtgggcgctgctggccaccaccgcggtcgccgcgctgtgttttctgtcgttcctgttcagccccaaggcggtgtacatctggctgctgaacacctcgggcatgaccggattcatcgcctggctgggcatcgccatcagccactaccggtttcgccgcggctatgtcgcccagggcaacaacctggccgacctgccgtatgtctcgcccttcttcccgttcggcccgctgttcgcgttcgtcctgtgcctggtcatcacgctgggccagaactaccacgccttcctgcaggaccgcatcgactggaccggcgcggccgccacctatgtcggcattccgctgttcctggcgatctgggcgggctatcgcctggtgcgcggctcgcgcttcgtgcgctaccgcgacatgcagttccccgacctgcgcatgcgcaaccgcgagttgaacgccatgctcagcggcgactgcgccgagccccgccgctag

SEQ ID NO: 17202 - protein, 524 aa, Bordetella bronchiseptica RB50
MAPPDHVVPSPANGHRHDARPATRLPEPTSLRRTLSARHLTMIAVGGSIGTGLFVASGATIAQAGPGGALLAYLLVGIMVYFLMTSLGELAASMPVAGSFSTYGAKYVDEGFGFALGWNYWYNWAVTVAVDLVAAQLVMAYWFPEMPGVLWSAAFLALIVGLNALSARGFGEAEFWFALIKVIAVLAFIAMGVLMLLGIIRGGEHGGLAYWTLDDAPFAGGFAALIGVAMVVGFSFQGTELIGIAAGESKDPARNLPRAVRQVFWRILLFYVLAIAVIGLLIPYTDPQLLRNEVSDVSVSPFALIFERAGLLAAASIMNAVVLTSVLSAGNSGMYAATRMLYSLARDGKAPARFGRLSRSGVPLWALLATTAVAALCFLSFLFSPKAVYIWLLNTSGMTGFIAWLGIAISHYRFRRGYVAQGNNLADLPYVSPFFPFGPLFAFVLCLVITLGQNYHAFLQDRIDWTGAAATYVGIPLFLAIWAGYRLVRGSRFVRYRDMQFPDLRMRNRELNAMLSGDCAEPRR

SEQ ID NO: 17203 - DNA, 1527 bp, Chromobacterium violaceum ATCC 12472
  CDS (1)..(1527): transl_table=11
atgagcaagaaacaagacgcgccggagctgcggcgctcgctgcaggctcgacacctgtcgatgatcgccatcggcggctcgatcggcaccggcctgttcctggcgtccggcgccaccatctcgggcgcgggcgccggcggcgcgctgctggcctacgcgctggtcggcctgatggtgtacttcctgatgaccagcctgggcgaaatggccgccttcatgccggtgtccggctccttccaggcctacggctcgcgtttcgtcgatccggccttcggcttcgcgcagggctggaactactggtacaactgggcgatcaccgtcgcggtggaactggccgcggccgccatcatcatgaactactggtatcccgggataccgggcgtggtgtggagcgggggcttcctggccatcatcttcgcgctcaactatttctcggtgaagggcttcggcgaggccgagttctggtgctcgatgctgaaggtggccaccatcatcgccttcatcgtcatcggcttcctgatgattctgggcatcatgaccgagccgaacccgagccgcatcgcgccgggtctgcaagtgatgatgcagggcgaggggcccttcgtcggcggcctggcggccttcgtcggcgtggccatggtggtgggcttctccttccagggcaccgagctgatcggcgtcgccgcgggcgagtcggccaaccccggccgcaccattccgcgcgccgtgcgccagatcttctggcgcatcctgatgttctacatgctgtccatcctgatcatcggtctgatcctgccgcacaacgatccgtcgctgctgaagaacgacatgaaggatgtcggcgccagcccgttcacgctggtgttcaaccgcgccggcctcgctttcgccgccagtctgatgaacgcggtgatcctgtccgccatcctgtcggccggcaactccggcatgtacgcgtccacccgcatgctgtacgcgatggccaagaacggcatggcgcccaaggttttcggcaagctgaccgacaacggcgtgccgcgcaacgcgctgtacgccaccacgctggtggcctgcctgtgcttcctgacgtcgttgttccagagcaacgctgtctacatgtggctgttgaactcgtccggcatgaccggcttcatcgcctggctgggcgtggcgatcagccattaccgcttccgccgcgcctacgtgaagcagggctacagcctggacgacctgccgtacaaggccaaatggttcccgctgggcccgctgttcgccttcgcgctgtgcctgctgatcatgctgggccagaactacaccgccttcaccgccgccaaggtggattggaacggcgtcatcgccacctatctgggcattccgctgttcctggcgctgtggtggggctaccgcgtcaagcacaatacccgcatggtgcccttggaaaaggtggaactggcggaggcgcatcgcaacgccttgatgcagcgagaggaaaatcgcggcggcaagcccgccgccgcccaggcctga

SEQ ID NO: 17204 - protein, 508 aa, Chromobacterium violaceum ATCC 12472
MSKKQDAPELRRSLQARHLSMIAIGGSIGTGLFLASGATISGAGAGGALLAYALVGLMVYFLMTSLGEMAAFMPVSGSFQAYGSRFVDPAFGFAQGWNYWYNWAITVAVELAAAAIIMNYWYPGIPGVVWSGGFLAIIFALNYFSVKGFGEAEFWCSMLKVATIIAFIVIGFLMILGIMTEPNPSRIAPGLQVMMQGEGPFVGGLAAFVGVAMVVGFSFQGTELIGVAAGESANPGRTIPRAVRQIFWRILMFYMLSILIIGLILPHNDPSLLKNDMKDVGASPFTLVFNRAGLAFAASLMNAVILSAILSAGNSGMYASTRMLYAMAKNGMAPKVFGKLTDNGVPRNALYATTLVACLCFLTSLFQSNAVYMWLLNSSGMTGFIAWLGVAISHYRFRRAYVKQGYSLDDLPYKAKWFPLGPLFAFALCLLIMLGQNYTAFTAAKVDWNGVIATYLGIPLFLALWWGYRVKHNTRMVPLEKVELAEAHRNALMQREENRGGKPAAAQA

SEQ ID NO: 17205 - DNA, 1482 bp, Photorhabdus luminescens subsp. laumondii TTO1
  CDS (1)..(1482): transl_table=11
atgtctcaacaacaaaaaagtgtttcccggaaacccgcaacgcaacatttgcgacgtgaattgaaagctcggcatctagcgatgattgccattggcggatcaataggcaccgggttattcgtggcttcaggtgcgacagtttcacaagcagggcctggcggagcattactttcctatgcattaattggcttgatggtttatttcctgatgaccagtttgggtgaactggccgcttatatgccggtttccggttctttctcaacttatggttccaaatatgttgaagaagggtttggttttgccttgggttggaactattggtacaactgggcggtgactatcgcggtggatttggttgcagcccaattggttatgggttattggctgccggatatgccgggttggatctggagtgcgttattcctcgcgttgattttcctactgaattttatttcagtgaaaggatttggtgaagctgaatactggttctccttgattaaagtcagcacggttattgtttttattgtggtcggattactgatgatagccggcatcatgaaaggggcagaaggtgctggatggcataactggactgttggtgatgcaccttttgccggtggtttctctgccatgattggcgtggcaatgatagttgggttttcttttcagggaactgagctaattggcattgcggcgggtgagtcaaaagatccggcaaaaaatgttcccagtgctgtacgtaaggtattctggcgtattctgctattctatatttttgcgatcctgattatcagcctgattattccttatactgatccaagcctactgcgtaatgaggtcggtgatatcagtgttagtccgtttacgttggtatttgaaaacgctggtttgttatccgccgcagctatgatgaatgcggttattttgacggctgtgttgtctgcgggtaattcaggtatgtatgcatcgactcgtatgttgttcacattggcaaaagagggtaaagcaccgaggatttttggcaaattatccaaaggtggtgtaccgcgtaatgccttgtatgcaacaacggtggttgctgcgttgtgtttcctcagttcaatgtacggtaaccagaccgtctatctgtggttgttgaatacttctgggatgaccggttttattgcctggttggggattgctattagtcattatcgtttccgccgtggttatgtcgctcaggggttggatttaagtaaattaccttatcgttcaggatttttccccgttggcccaatttttgcgtttgttttgtgtctaaccatcacattaggacagaattatcaggcatttctacaagataaaattgactggtatggtgtcactgcaacttatgttggtattccactcttcctgttgatttggtttggttacaaattagctaggaaaactcactttatcaaatatagcgagatgaaatttcctgatatcgagaatcagtga

SEQ ID NO: 17206 - protein, 493 aa, Photorhabdus luminescens subsp. laumondii TTO1
MSQQQKSVSRKPATQHLRRELKARHLAMIAIGGSIGTGLFVASGATVSQAGPGGALLSYALIGLMVYFLMTSLGELAAYMPVSGSFSTYGSKYVEEGFGFALGWNYWYNWAVTIAVDLVAAQLVMGYWLPDMPGWIWSALFLALIFLLNFISVKGFGEAEYWFSLIKVSTVIVFIVVGLLMIAGIMKGAEGAGWHNWTVGDAPFAGGFSAMIGVAMIVGFSFQGTELIGIAAGESKDPAKNVPSAVRKVFWRILLFYIFAILIISLIIPYTDPSLLRNEVGDISVSPFTLVFENAGLLSAAAMMNAVILTAVLSAGNSGMYASTRMLFTLAKEGKAPRIFGKLSKGGVPRNALYATTVVAALCFLSSMYGNQTVYLWLLNTSGMTGFIAWLGIAISHYRFRRGYVAQGLDLSKLPYRSGFFPVGPIFAFVLCLTITLGQNYQAFLQDKIDWYGVTATYVGIPLFLLIWFGYKLARKTHFIKYSEMKFPDIENQ

SEQ ID NO: 17207 - DNA, 1422 bp, Bacillus cereus ATCC 10987
  CDS (1)..(1422): transl_table=11
atgatggatcaaaaccaaggattaaaaagggaattgaaaagcagacacatatttatgattgcacttggaggagttattggtaccggactttttttaggatcggggtatacaattcatgaagctgggcctggaggagcgattgtagcttatcttgttggaggatttgttatgtatttaacgatgctctgtctcggagaattagctgttgcgatgcctgacgcaggatcttatcaaacgtatgctacgaagcatatttcccctgcagcgggttatgtagtcggatggatgtcgtggctaaactggtcggctacaataggtattgaactcattgcagttagtattttaatgaaacgatggtttcctgatgtaccgtcttggatttggtgcgtagtgtttgcggtactactttttgctattaacgcgttatcttcaagaagttttgcagaagttgaattttggtttgcaagtattaaagtcattacaatcattgcatttattattttgggcggggcagcaatgtttggttttctagatatgaaaggaaatgaaccagcaccaatgttttctagctttactgattatggtgggttatttccaaatggattatccgctattttaattacgatgattgctgttaatttttccttccaaggaacagagctagttggtattgcagctggagagagtgaaaatccagaaaagacaatcccgaaggcaattaataatacagtttggcgtatacttgtgttctttgtattatctattttcattcttgcaggattattcccatggcaacaagcaggagtgatagaaagtccattcgtagttgtatttgataaaattggtattccttatgcagctgatattatcaatttcgttatcattacagcagtattatccgttgcgaattcagggctatatgcaacttctcgtatgctatggtctatgtctaatcaaggaatgattagtccgatttttagtaagttatctaaaagcggcgttccaatttatgcattgattgtaagtacaattgtaggttgtctctcattactatcaggtatttatgcggaagatacagtttatttatggttgctttctattgctggatttggagcaatactagtttgggcatctattgctctatctaacttattagctagaagggcgtatataaagcagggcggggatgtgaaagacttgaaatttaaaacaccgctatatccattcgtaccacttcttgcattagtattaaatgtaacagtaattgttgctatggcctttattccagaacaaagaatggcattgtattgtggtattccctttatgattgtttgtttactgttttaccgtgcgacaagaaataaggggagtaacttagagcatattgaaaagacaaagacaacagaaatagagagtttataa

SEQ ID NO: 17208 - protein, 473 aa, Bacillus cereus ATCC 10987
MMDQNQGLKRELKSRHIFMIALGGVIGTGLFLGSGYTIHEAGPGGAIVAYLVGGFVMYLTMLCLGELAVAMPDAGSYQTYATKHISPAAGYVVGWMSWLNWSATIGIELIAVSILMKRWFPDVPSWIWCVVFAVLLFAINALSSRSFAEVEFWFASIKVITIIAFIILGGAAMFGFLDMKGNEPAPMFSSFTDYGGLFPNGLSAILITMIAVNFSFQGTELVGIAAGESENPEKTIPKAINNTVWRILVFFVLSIFILAGLFPWQQAGVIESPFVVVFDKIGIPYAADIINFVIITAVLSVANSGLYATSRMLWSMSNQGMISPIFSKLSKSGVPIYALIVSTIVGCLSLLSGIYAEDTVYLWLLSIAGFGAILVWASIALSNLLARRAYIKQGGDVKDLKFKTPLYPFVPLLALVLNVTVIVAMAFIPEQRMALYCGIPFMIVCLLFYRATRNKGSNLEHIEKTKTTEIESL

SEQ ID NO: 17209 - DNA, 1422 bp, Bacillus cereus ATCC 10987
  CDS (1)..(1422): transl_table=11
atgcagcaacaaacgaatgagaaattacatcgtacgatgaagagtagacatttatttatgatcgcactaggtggtgtaatcggaactggttttttcttaggttcaggttacaccattaatcaggctggaccagggggagccatcctttcatatttagtaggcggatttattatgtatttaacaatgctatgccttggagagttaacggtagcaatgccagtttcaggttctttccaaaagtatgcgacgaagtttattggaccaggaacgggctttatgatcggttggctatattggcttggctgggcagtaacagtaggactagaattaacgtcaatcggtttaatgatgaaaagatggtttccgaatgctgatgtttgggtatggtgccttgtattcggtgttattttatatgcttcaaacgcaatttcggcgaaaagttatgctgaattagaattttggttttctagtattaaagtaattacaattcttgcatttgttgttcttggtggtagtgcattattagggtttatatcatatgacggaaaagaagcagcacctcttttctctaactttgtaagtgaaggcgggttattcccgaatggactagctgccgtattacttacaatgattacagtgaacttctcgttccaaggaacagagttaatcgggattgcagcgggagaaagcgaagagcctgaaaaaacaattccacgtgcaattcgtaatacagtatggcgcattatgttattcttcattttaacaatgacgattttagtaggattaatttcttggaaagaagctggcgtaattgaaagtccgttcgtagttgtatttgataaaatcggtattccatatgcagctgatattatgaacttcgttattattactgcgttattatctgtagcgaactctggattatatgcagcgacgcgtatactatggtcacttgcaaatgaaggaatggcaccaaagtctttccagaaagtaaataagcgtggtattccaattacagcactagttgtaacaattgctgtagctgctttatctttattaacaagcttccttgcagaagatacagtatacatgtacttattatctatagctggtttatcagctgtatcaagttggattattattgccctgtcgcaacttcgctttagaagtcagtatataaaaggcggaggaaagttagaggacttaaaatataaaacaccgttatatccaatcgttcctattttagctttaattacaaatagtatcgttgttattagtttagcgtttattccagaacaaagaatggcgttatattgtggtattccatttatcattttctgctacatatattattatataaataagaaacggcagaaaccgatgaaggtggagacaacaaatgaaactaaccatcaaacaagatga

SEQ ID NO: 17210 - protein, 473 aa, Bacillus cereus ATCC 10987
MQQQTNEKLHRTMKSRHLFMIALGGVIGTGFFLGSGYTINQAGPGGAILSYLVGGFIMYLTMLCLGELTVAMPVSGSFQKYATKFIGPGTGFMIGWLYWLGWAVTVGLELTSIGLMMKRWFPNADVWVWCLVFGVILYASNAISAKSYAELEFWFSSIKVITILAFVVLGGSALLGFISYDGKEAAPLFSNFVSEGGLFPNGLAAVLLTMITVNFSFQGTELIGIAAGESEEPEKTIPRAIRNTVWRIMLFFILTMTILVGLISWKEAGVIESPFVVVFDKIGIPYAADIMNFVIITALLSVANSGLYAATRILWSLANEGMAPKSFQKVNKRGIPITALVVTIAVAALSLLTSFLAEDTVYMYLLSIAGLSAVSSWIIIALSQLRFRSQYIKGGGKLEDLKYKTPLYPIVPILALITNSIVVISLAFIPEQRMALYCGIPFIIFCYIYYYINKKRQKPMKVETTNETNHQTR

SEQ ID NO: 17211 - DNA, 1416 bp, Bacillus cereus ATCC 10987
  CDS (1)..(1416): transl_table=11
atgaatcaacaagtagaacaaacagatttaaaacgtacaatgaaaagtagacacctatttatgattgcacttggtggtgttatcggaactggcctatttatgggatctggtcaaatcgtccataacgccggccctggtggtgctattcttgcatttttagtcggtggatttgttatgtatttaacgatgttatgtcttggtgaattatctgttgctatgccagaagcaggttcattccaaagctatgcaagcaaatttatttcacctggttttggttttgttgtcggttggatgtattggttaaattgggctgttacagttggagtagagttaacaactgtaagtattttaatgaaacgctggtttccagatgtttcttcgtggatttggtgtgttacatttgcagcagcactctttcttgtaaacgccctatcagcaaaagcatatgcagaagcagaattttggttcgctagtgtaaaagtcgcaaccatcgttattttcatcgtactcggtggtgcagttatgttcggtctactagactttaacggaaaaccagctccaatgcttcacaatttcactgaaaatggcggattatttccgaatggtgcattggctgttcttcttacgatgattacagtgaattattctttccaaggaacagaattaatcggaatcgcttcaggagaaagtgagaatcctgaaaaaacaattccaaaagcaatcaaaaataccatttggcgaacgctattcttcttcgtcctagccatatcagttgttgtaggtttactcccgtggcaagaggctaatctagtcgaaagtccatttgtacttgtatttgatgtagctggtattccatatgcagcagacattatgaactttgttattattacagctgtattatccgtagccaattctggtctatacgcaaattcacgtatgctttgggcaatggcaaaacaaggaatggcaagtccagcatttacgaagctaacgaaaaaaggtgtaccattaaacgcattgattttcagtctaatctttgcaagtttatccctattaacaagtatatttgcagcagatactgtctttttagttttaacatctatcgcagcaatggctgccgttgtcgtttggatgtcaattgcggcttcacagtttttcttccgtagaaacttcgtgaaaaacggtggtgacatcaatgatttaaaatatcgcacaccactttatccgctcgttccaatcgtagcattctcactcaatttcattacatttgtaagtttagctttcattccagatcagagaatcgctctttattgcggtattccatttatggttatttgttacattttatatcaagtgaaatataaaaaaattgtcacatttgaacaacaaataagtctaaaaaaagaagtaaactaa

SEQ ID NO: 17212 - protein, 471 aa, Bacillus cereus ATCC 10987
MNQQVEQTDLKRTMKSRHLFMIALGGVIGTGLFMGSGQIVHNAGPGGAILAFLVGGFVMYLTMLCLGELSVAMPEAGSFQSYASKFISPGFGFVVGWMYWLNWAVTVGVELTTVSILMKRWFPDVSSWIWCVTFAAALFLVNALSAKAYAEAEFWFASVKVATIVIFIVLGGAVMFGLLDFNGKPAPMLHNFTENGGLFPNGALAVLLTMITVNYSFQGTELIGIASGESENPEKTIPKAIKNTIWRTLFFFVLAISVVVGLLPWQEANLVESPFVLVFDVAGIPYAADIMNFVIITAVLSVANSGLYANSRMLWAMAKQGMASPAFTKLTKKGVPLNALIFSLIFASLSLLTSIFAADTVFLVLTSIAAMAAVVVWMSIAASQFFFRRNFVKNGGDINDLKYRTPLYPLVPIVAFSLNFITFVSLAFIPDQRIALYCGIPFMVICYILYQVKYKKIVTFEQQISLKKEVN

SEQ ID NO: 17213 - DNA, 1542 bp, Bacillus cereus ATCC 10987
  CDS (1)..(1542): transl_table=11
ttgacttttctttttaattatctgaaaattataacaagatttcacatcacggaatatattccacaatacggaaaaacatcaaactttattctatcaactacgaaagtgaggaaaacaatggcgcaagtaaataatacaaacaatgaattaaaacgtacgatgaaaagtagacacttattcatgattgcactcggtggtgtgattggaacggggttatttaacggatctggctttattataagtcaagctggacctggtggatccgtacttgcctttatggccggtggattattaatgtatttcgttatgctatgtcttggtgagctcgctgtagccatgcctgtttcaggctctttccaggaatatgccactaagtttattaatcctgcaactggctttacaatcggatggttgtattggttaagctgggcaaatacaaccggccttgaatttacaactgccggcattacaatgcagcgctggtttcctgatattcctgtttgggtttggtgtttaatatttggcgttacaatcttcacaattaacgcattatctgctcgtagttatgcagaaacagaattttggttttcaagtataaaagtatctgccattatcgcttttattattcttggcggcgccgctatgttcggttttatcgatttaaaaggcgacgaaccagcaccgctattatcaaatttcgtgaatcatggtggtttatttccaaatggacttgcagctatcctattaacaatggttacagtcaattattccttccaaggtacagaacttgtcggaatcgcagcaggtgaaagtgaagatccagcaaaaactttacctcgttctattagaaatattatatggcgcacgatgtttttcttcgtcttagcaatctttgttctcgttgctttaattccttgggaagaagcaggattaacaaaaagtccgttcgttgctgtatttgataatatcggtattccatatgccgctgatattatgaactttgttattcttactgctgttctttcggtcgccaattcaggattgtacgcagcaactcgcatgctttggtcattatccaaaaatgaaatggctccagcctttttaaagaaattatcatcacgaggaatacctttgaatgctttaattatgacaattgctatttctgctttttctcttttaacaagcgttgtagctgctgaaacggtttacttatggctcatttccatttctggcgtcataacaatcattgtttggatgtcaatttgtgtctctcaattctttttccgtaaacattatttagcagacggcggaaaattagaggacttaaagttcaaaactccactttatccacttgtaccaatacttggttttggattgtacggcattatattaatcagtctaatctttatcccagaacaacgacttggaatctattgcactgtaccatttattatcttttgctacacttattatcacttaaaagttaagaaaagaatttctactaacactaatagtgagactaaaattagcgagacgatgtaa

SEQ ID NO: 17214 - protein, 513 aa, Bacillus cereus ATCC 10987
MTFLFNYLKIITRFHITEYIPQYGKTSNFILSTTKVRKTMAQVNNTNNELKRTMKSRHLFMIALGGVIGTGLFNGSGFIISQAGPGGSVLAFMAGGLLMYFVMLCLGELAVAMPVSGSFQEYATKFINPATGFTIGWLYWLSWANTTGLEFTTAGITMQRWFPDIPVWVWCLIFGVTIFTINALSARSYAETEFWFSSIKVSAIIAFIILGGAAMFGFIDLKGDEPAPLLSNFVNHGGLFPNGLAAILLTMVTVNYSFQGTELVGIAAGESEDPAKTLPRSIRNIIWRTMFFFVLAIFVLVALIPWEEAGLTKSPFVAVFDNIGIPYAADIMNFVILTAVLSVANSGLYAATRMLWSLSKNEMAPAFLKKLSSRGIPLNALIMTIAISAFSLLTSVVAAETVYLWLISISGVITIIVWMSICVSQFFFRKHYLADGGKLEDLKFKTPLYPLVPILGFGLYGIILISLIFIPEQRLGIYCTVPFIIFCYTYYHLKVKKRISTNTNSETKISETM

SEQ ID NO: 17215 - DNA, 1467 bp, Bacillus cereus ATCC 10987
  CDS (1)..(1467): transl_table=11
atgaatagcgcaacgaatcaagctacctctaaaacagaaactacaaaaggaaaaggtgaattaagacgcggtctaaaatctcggcaccttacgatgatttctctcggcggtacaattggtaccggactatttcttgccagcggtggtgtcatccattcagctggacctggtggcgcattaattgcatacgccgcaatcggaattatggtttactttttaatgacaagcctagctgaactcgcagcttacatgcctgttactggatcttttagcacgtacgcaacaaaatttgttgatccatcacttggctttgcacttggatggaactattggtataactgggcaattactatcgctgctgaactagcggctgtaacattaattatgaaattttggttcccaaataccccttctcttatttggagcggattatgtttagctattattttccttttaaactacttatctgttaaagggtttggtgaatctgaatattggttcgcacttattaaagtcgttactattattatctttttaattgtcggctttatgatgattttcggaattatgggcggtgaaactgttggatttaaaaacttcactgttgcagacgcaccatttaacggtggtattatggcaattattggtgtatttatggcagctggtttctcattccaaggaacagaattacttggggtagctgctggtgaaacttctgatccagagcgcaatattccgaaagcaattcgttcaattttctggcgtattctcttattctatatccttgcgattctcgttatcggtttattaattccttatacaactgaaagccttgctgcaagtgatgtaacagtaagtccatttacacttatttttgaaaaagcgggcgttgccttcgctgcttctgttatgaacgctgttattttaacggcagtactgtctgctggtaactctggtatgtatgcttcaactcgtatgctttgggatttagctcgccaaggaaaagcaccaaaattcttaggaaaattagatagccgcggtgtacctgttaacgcattaatcgtaacatcaattgtcggtagtatcgctttcattgcttctttattcggtgatggtgttgtatacatttggttattaaacgcatctggaatgtctggctttatcgcatgggtcggcattgcaattagtcattaccgtttccgtaaagcatatatcgcacaaggaaaagatttaaaagacttaccttataaagcaaaatggttcccattcggtccactcttcgcttttacgctttgtattatcgtaattttaggacaaaactacggcgcatttatgggcgaatcaatcgactggaacggtgtactcgtttcttacatcggtttaccactcttcttagtactatggttaggatataaatttacgaaaaaaacgaaagtgattccacttgataaatgtgaactgaaataa

SEQ ID NO: 17216 - protein, 488 aa, Bacillus cereus ATCC 10987
MNSATNQATSKTETTKGKGELRRGLKSRHLTMISLGGTIGTGLFLASGGVIHSAGPGGALIAYAAIGIMVYFLMTSLAELAAYMPVTGSFSTYATKFVDPSLGFALGWNYWYNWAITIAAELAAVTLIMKFWFPNTPSLIWSGLCLAIIFLLNYLSVKGFGESEYWFALIKVVTIIIFLIVGFMMIFGIMGGETVGFKNFTVADAPFNGGIMAIIGVFMAAGFSFQGTELLGVAAGETSDPERNIPKAIRSIFWRILLFYILAILVIGLLIPYTTESLAASDVTVSPFTLIFEKAGVAFAASVMNAVILTAVLSAGNSGMYASTRMLWDLARQGKAPKFLGKLDSRGVPVNALIVTSIVGSIAFIASLFGDGVVYIWLLNASGMSGFIAWVGIAISHYRFRKAYIAQGKDLKDLPYKAKWFPFGPLFAFTLCIIVILGQNYGAFMGESIDWNGVLVSYIGLPLFLVLWLGYKFTKKTKVIPLDKCELK

SEQ ID NO: 17217 - DNA, 1692 bp, Eremothecium gossypii
  CDS (1)..(1692)
atggcgccaaaggatacggcggtgtcggagacctctacgcggtctcgctatatcaaaaagggcaagactttagagaatgacattgagctacagtcggtgacgccagccaccggggagttccccgaggaccacacggaagagggcgactaccaggagacggaggtcaagagggcgctgaaggcgcggcacatctcgatgatcgcgctgggcgggacgataggcacaggcctgttcattgtgattgcatccccgctgcggacagcggggccagtggggtcgctgttggcgtacatcttcatcggtacggtggtgtactcgatcacgcagtcgctgggggagatggcgacgttcattcctgtgacgtcgtcggtgacggtattttcaaagcggtttctgtcgcctgcgtttggcgtggcaaacgggtatatgtactggttcaactgggcgatcacgtttgctgtcgagctttctgtggttggccagatcatacagtactggacggaccgcgtgccaatcgcggcgtggattgtgattttctgggtcctggtgacgctagttaacttcttcccggtgcgcttctacggtgagatagagttctggattgcgtcggtcaaggtgctgaccattgtgggctatcttatttacgcgttcattattgtctgtggcggctccaagcagggcccaatcgggcttcccgccactggcgggatccccgcccgtggggcaagggcgtcatctcgcacaaccagaaagaggcacggcttcctcggctgggtctcgtcgctgatcaaggctgcgtttacgtaccaggggacagagcttgtcggtatcactgcaggtgagtccacgaacccaagaaagaacgtccccaaggccatcaacaaggtcttcttccggattctattcttctacattggctcactgctattcgttggcctgctggtgccctacgatgaccctcggttaaacagcgagtctagcacggacgtcaatgcctcaccatttgtgatctccattaagaatgcaggtacaaagattttgcccgacatctttaacgctgtcgtgctgatcaccgtcatttccgcagcgaactccaacgtttacattggctctcgtgttgcatactctctggcgctcgctggcaacgctcccaagcagcttgccttcgtcaccaagcagggtgtgccctacttcggcgttctgatcacgtcgctaatgggcctgatgtccttcctcgtgctcaaccacaacgccagcaccgcattcgactggctggttaacatttccacccttgcaggcttgtgcgcctggcttttcatctcgctcgcccacatccgcttcatgcagtgcctcaagcatcgcggcatttcgcgcgacgacctgccgttcaaggccaagttcatgccctgggccgcatactacgcaaccttctttgtcacggtcatcatcttcatccagggctacactgccttcactccgaagttcgacgttaccaccttcttcacctcctacatctctctatttttgatgctgctggtgttcatcggctgccagatctactacaagtgtcgctttctgtgggcggttgaggacatcgacatcgacagcgaccgccgcgagatcgacgccatcgtctgggaagaggatgaacccaagaacatttgggacaagttttggtctgctgtggcctag

SEQ ID NO: 17218 - protein, 563 aa, Eremothecium gossypii
MAPKDTAVSETSTRSRYIKKGKTLENDIELQSVTPATGEFPEDHTEEGDYQETEVKRALKARHISMIALGGTIGTGLFIVIASPLRTAGPVGSLLAYIFIGTVVYSITQSLGEMATFIPVTSSVTVFSKRFLSPAFGVANGYMYWFNWAITFAVELSVVGQIIQYWTDRVPIAAWIVIFWVLVTLVNFFPVRFYGEIEFWIASVKVLTIVGYLIYAFIIVCGGSKQGPIGLPATGGIPARGARASSRTTRKRHGFLGWVSSLIKAAFTYQGTELVGITAGESTNPRKNVPKAINKVFFRILFFYIGSLLFVGLLVPYDDPRLNSESSTDVNASPFVISIKNAGTKILPDIFNAVVLITVISAANSNVYIGSRVAYSLALAGNAPKQLAFVTKQGVPYFGVLITSLMGLMSFLVLNHNASTAFDWLVNISTLAGLCAWLFISLAHIRFMQCLKHRGISRDDLPFKAKFMPWAAYYATFFVTVIIFIQGYTAFTPKFDVTTFFTSYISLFLMLLVFIGCQIYYKCRFLWAVEDIDIDSDRREIDAIVWEEDEPKNIWDKFWSAVA

SEQ ID NO: 17219 - DNA, 1713 bp, Neurospora crassa
  CDS (1)..(1713)
atggcggtgcgagaaagtacgccgccggcgccagcgagtcccggctcctccgctgccggatcgccacccggaagcgcaaccaaaaaggactttgtcaaggaacagtcggccgctgatgacgatgcggcctccttcgccgagcacaacgccggccccgagctgaagcgcaggctcaagtctcgccatttgcaaatgattgccattggtatcataggtggtactattggtactggtctcttcatcggttccggcagcgccctcgccaagtcgggccctgctggcgtcctcatcggctactgctttatcgcctccattgtttacagcatcatgatgtccctcggtgaaatggccacctacgtccccgtcaccggcggtttcaccacgtacgcggctcgctttgtcgacagctctctcggtttctccatgtcgtggatctactggttttcgtgggccattacctttgcgctcgagctggtcgctactggtctgatcattcagtattgggacgactctctgtccatcggtattttcatcgccatcttctgggtcgtcattttcgtcatcaacctgttccccgtgtcctggtacggcgaggcggaattctggatgtcctctgtcaaggtcatcaccgtcctcggcttcctcatcttcggcatctgcatcaacgccggcgccggtcagcagggctacattggcttcaagtactggcacgagccgggtgcttttgctccctacattgttgaccctagccgccctgtcgccaagtgggttggcttctggtccgtcatgatccaggccggcttctccttccagggcaccgagcttgtcggtatcgctgctggcgagaccgaagacccgcgccgcaacgtcccccgtgcgatccgcatgaccttttaccgtatcttcctcttcttcatcatgaccgtcttcttcatcggcatcctcatcccctacgacaacaaggacctgaacaatggcggctacaccgcggctgcctctccctttgtcattgcggcccagctcgccggcgtcaaggtcctacccgacatcatcaacgctgtcttgcttactgtcgtcctctctgccgccaactccaacgtctactcgggctctcgtgtcctcgtctccctcgccaacgacggcatggcccccaagtggttcaagatgaccaccaagtccggcgtcccctatattgccgtcatgtttacctcggcgttcggtttcctcggcttcctcaacctctctcccaacggcagccaggccttcgactggcttctcaacatttcgggcgtcgcgggtttcattgcctggtccggcatcctcatcgcccacctccgcttcatgaagggtcttgaggcgcacggcatcccccgctccaagctgccctatcgcgccacctgggccccttactacgtctactacgccctgttcttctgcatcttgatcaccctgacccaaggcttcaccgcgttcatgccctggagcgtcgaagaattctttgtggcgtacgtttcgctcatcatttttgctgtcatgtacctgggccacaagctctataccctcattgtctacggcgccgcggcgtgtaagccggtctctgccaaggacatggatgttactactgggtctttggatctggatgccgagatccccgacgaggtcgaggagcctacgagtatctggaagaagattggaacgggtatcatgggttaa

SEQ ID NO: 17220 - protein, 570 aa, Neurospora crassa
MAVRESTPPAPASPGSSAAGSPPGSATKKDFVKEQSAADDDAASFAEHNAGPELKRRLKSRHLQMIAIGIIGGTIGTGLFIGSGSALAKSGPAGVLIGYCFIASIVYSIMMSLGEMATYVPVTGGFTTYAARFVDSSLGFSMSWIYWFSWAITFALELVATGLIIQYWDDSLSIGIFIAIFWVVIFVINLFPVSWYGEAEFWMSSVKVITVLGFLIFGICINAGAGQQGYIGFKYWHEPGAFAPYIVDPSRPVAKWVGFWSVMIQAGFSFQGTELVGIAAGETEDPRRNVPRAIRMTFYRIFLFFIMTVFFIGILIPYDNKDLNNGGYTAAASPFVIAAQLAGVKVLPDIINAVLLTVVLSAANSNVYSGSRVLVSLANDGMAPKWFKMTTKSGVPYIAVMFTSAFGFLGFLNLSPNGSQAFDWLLNISGVAGFIAWSGILIAHLRFMKGLEAHGIPRSKLPYRATWAPYYVYYALFFCILITLTQGFTAFMPWSVEEFFVAYVSLIIFAVMYLGHKLYTLIVYGAAACKPVSAKDMDVTTGSLDLDAEIPDEVEEPTSIWKKIGTGIMG

SEQ ID NO: 17221 - DNA, 1593 bp, Gibberella zeae PH-1
  CDS (1)..(1593)
atggcttattattctgaaaaagacaagtcgccaggcggcggcgacgtcgagaataccccagacagcgatggcttgtccagacgaggtcccacgcagtcagacctgctaagccgttcgctctcggcgcgacaggtccagatgattgccattggaggtacaatcggtacaggtttattcctgggtactggaaagtcactcgctacaggtggcccagcgtcgatattgattgcttacgctattgtgggtggcattgtttttactaccatgttagctcttggtgagatggcggcgtttattcccgtggcaggtagtttctgtacttttgcaggtcgcttcgtggatgatgcttttggtttcgctctgacttggaattactggttcaacgatgctgtatctacagcctcggatctcgtcgcactgcagctcattctccaatactggaccgacaacttccccggctgggctctgagtcttattttctgggttgttctcatcgctctcaacatcatttccgtcaaggcctacggtgaagtcgagtactggctcagtctgctcaaggtcatcaccattgttgtctttatcgtcatgggtattgtcgtcaactgtggcggcaacgaaactggagagtatattggtggcaaatactggcatttgcctgatgcgccttttgttggtggtattggaggttttgcctctgtttttgttactgcttcttttgcttatggtggaacagagagtatcgccatcactgctggtgagaccaaggatcctaccaaaaacatccccaaagttgtcaagaacgtcttttggcgtatcctcctattctatatcctttcaattctcatcatcggcctcaatgtcccctacaactaccccgatctcaactccaaggaaacccgcacttcgccatttaccattgtctttgagatgacaggcgccaaagctgctggaagtgttatcaacgctgttattctaaccagtgttctttcggccggaaaccacgctctttttgctggtgtgagactgatgtacactctcgctcttgagggacatgcgcctaaagtactcggaaaactcaacaggaacagagtcccttgggttgctgttttggtcaccggttttgtagctggtctttgcttcggctcaagtttcattggcgctggacaactgtggtcctggctacaaaacatcgtcggtgtatccaaccaactaagctggatctccatcggaatcacatcaatccgcttccgccaagccctcgagctccaaggcaaaacgcatcttctgccattcaagaattggacgtacccctatggcccatggatctgcgtcttcctcaacagcttcctggtgctagtgcagggctggagctgtttcagtcccaagtttgacgttgtcagctttatcagcttttacatcgagctacccgtcatgctcatcatgtatatcgggtggaagcttctcaaaaagacaaaggttgttaagttgagcgagatggatcttgagacggatgtacatactattgaggagaaggttactgaggaggcggggtggaagaataagctgaagaatgcggttacttggttgttttaa

SEQ ID NO: 17222 - protein, 530 aa, Gibberella zeae PH-1
MAYYSEKDKSPGGGDVENTPDSDGLSRRGPTQSDLLSRSLSARQVQMIAIGGTIGTGLFLGTGKSLATGGPASILIAYAIVGGIVFTTMLALGEMAAFIPVAGSFCTFAGRFVDDAFGFALTWNYWFNDAVSTASDLVALQLILQYWTDNFPGWALSLIFWVVLIALNIISVKAYGEVEYWLSLLKVITIVVFIVMGIVVNCGGNETGEYIGGKYWHLPDAPFVGGIGGFASVFVTASFAYGGTESIAITAGETKDPTKNIPKVVKNVFWRILLFYILSILIIGLNVPYNYPDLNSKETRTSPFTIVFEMTGAKAAGSVINAVILTSVLSAGNHALFAGVRLMYTLALEGHAPKVLGKLNRNRVPWVAVLVTGFVAGLCFGSSFIGAGQLWSWLQNIVGVSNQLSWISIGITSIRFRQALELQGKTHLLPFKNWTYPYGPWICVFLNSFLVLVQGWSCFSPKFDVVSFISFYIELPVMLIMYIGWKLLKKTKVVKLSEMDLETDVHTIEEKVTEEAGWKNKLKNAVTWLF

SEQ ID NO: 17223 - DNA, 1671 bp, Yarrowia lipolytica CLIB99
  CDS (1)..(1671)
atgtctcgtctttcaacagacggtaacatcactgtggaagcagtgccagtcaaacacgacattggtgtcgacctggaaaaataccctaaggccttcaatgagttctccgatgatgccaactcacaaacagcagaccataccgtcttccccgtcgaccaggatcgtctctcaagatctctgtctggaagacaggtgcagatgattgctatcgccggcgtgattggtacaggtctgtttctgggcactggaaagtcgctggcgaacggaggaccagcttcaatgctcatttgctacaccattatgggctttctcgtgtatttgacaatgctgtcgcttggtgaaatggccacttacatgcctgtggcaggttctttctgctcctacgcttcgcggttcgtgtctgagtctgtgggcttttccctcacctggaactattggtttaatgacgtcacctccacagcctccgatctggtcgccctccagctcgtgttcaagtactggtccgaattccctggctgggccatctctctcattttctgggtctttctgatcgtgctcaacgtgatccatgtcaaggcatatggagagctcgagtactggctggccctgctgaaggtggtcaccatcatcgtgttcatcattctcggcattgtcgtcaactgtggaggaaaccatgaccacgagtaccttggattctcgtactggcacctcgagggagctccgtttgtgaacggcttcaagggctttgcgtctgtgtttgtcactgctgcctttgcctacggaggaactgagtccattggaatcactgccggagaacaaaagaaccccacaaagtccatgccccgtgtcatcaagacagtcttctggcgtatcatcatcttctacgtcctgtcgattttactgatcggcatcaacgtgccctacaactaccccaatctgtcttccaaggaaaccaccacctccccattcacccttgtgttccaaaaggccggctccaaggttgcaggatctttcatcaacgccgtcatcatgacctctgttctctcagctggtaaccacgctctgtttgcaggaactcgactattgtacactttggccatccagggatacgcccccaagtttttcggtaaactgaccaaggccaaggtcccttacgttgctttgctcttcacttcgctactctcgggtctctgtttcggctcttctttcattggagcaggtacactctggtcctggctccagaaccttgtcggagtgtctaaccagctgtcttggatgctcattggagtcacctccatcagatttagaaaggcgctcgacatccagggcaaggtccaccagctcaagtacgtcaactggacctacccttggggaccctgggtggtggttattctctcagcagttatcattctgatccagggatggagttcgttcgcaccctggaatgtctcagatttcttttcctattacattgaactgcttgtcttccctttgctttggctgggatggcaactgtggtcccgaactactctgcttattaagccggaagatgtcgatgtcgagactgaccgctaccacgatactccagaggacctggccgagatggaatacgaggcccagttcaagggatggcgtaaggccgtccacctagcaaagtctttctttgtctag

SEQ ID NO: 17224 - protein, 556 aa, Yarrowia lipolytica CLIB99
MSRLSTDGNITVEAVPVKHDIGVDLEKYPKAFNEFSDDANSQTADHTVFPVDQDRLSRSLSGRQVQMIAIAGVIGTGLFLGTGKSLANGGPASMLICYTIMGFLVYLTMLSLGEMATYMPVAGSFCSYASRFVSESVGFSLTWNYWFNDVTSTASDLVALQLVFKYWSEFPGWAISLIFWVFLIVLNVIHVKAYGELEYWLALLKVVTIIVFIILGIVVNCGGNHDHEYLGFSYWHLEGAPFVNGFKGFASVFVTAAFAYGGTESIGITAGEQKNPTKSMPRVIKTVFWRIIIFYVLSILLIGINVPYNYPNLSSKETTTSPFTLVFQKAGSKVAGSFINAVIMTSVLSAGNHALFAGTRLLYTLAIQGYAPKFFGKLTKAKVPYVALLFTSLLSGLCFGSSFIGAGTLWSWLQNLVGVSNQLSWMLIGVTSIRFRKALDIQGKVHQLKYVNWTYPWGPWVVVILSAVIILIQGWSSFAPWNVSDFFSYYIELLVFPLLWLGWQLWSRTTLLIKPEDVDVETDRYHDTPEDLAEMEYEAQFKGWRKAVHLAKSFFV

SEQ ID NO: 17225 - DNA, 1728 bp, Cryptococcus neoformans var. neoformans JEC21
  CDS (1)..(1728)
atgtcaagcgcaattgaaaaagaaggaagtattagggggagaacatcccaagaggtcgtcagcgcgggatacgacccaaagaaaggtggcgatggtgtagacacagtggtcacccctgcacatgcggaaaaaggcagttatgaaggcgaaggcatccatgttggcgaaggaactgttcatcgtcagttgaagcagcgtcatatggccatgatcgctcttggtggagcgattggtactggtctcttcgttggttctgggtctgctttggccagcggtggtcctgtgggcgtgtggcttggttatatcttcatggcgtctatggtatacgcgatgatggtggcgcttggagaaatggcagctttatacccggtttctggtgccttcactcattacgcgtcacgtttcgtcgatccttctcttggtttcgcgcttggtttcaactactggtattcttacgctatcaccattccgactgaggttgttgctgccagtattgtgatctcatattgggatacaacaacgaatgtcgccgtttacattaccgtatgccttgtgctgatttggttcattaacttctggggagccagagcgtatggtgaagcagaattttggttctcttccatcaaggttatcaccatcgtgggcctcattatcttaggaatcgttttgatgtgtggtggcggtcccaaccatgacgctattggtttccgatactggcgtaacccaggaccatttgcgcaaatcacaattaataatggtgacggtgttatccccggacgatggggtcagttcctcgccttctggaatgtctttgtacaggctgctttctctttcatcggtactgaaatcattgctaccactttgggtgaggccgagaaccccaggaagacggtccctcgagcgatcaagcgtgttttcttccgtttgctcttcttctacgtctttggcatttttatcatctcggtccttgttccgtacaccgagcccaatctcctcaatggaactggcaccgctgccgcttctcctttcgtcattgctattgagaacgcgggtattaaagctcttccttccattgtcaacgctgtgctccttatttctgcttggtcggctggtaactcagatctctatgcttcttctcgaaccctatatgctctcgcgctcgagcgccagatgcctcgtttctttcgacgatgcaccaaaaggggtcttcccatctggtgtgttgtaatcacaggtctttttggttttctttcatacatgaacactggcggtgagacggctgagaaggcatttgactggttgtacaacttgtctgccattacaggtatcatcacgtggtgggctattctgctttcgtatcttcgattctactatggtttgaagaagcagggtctcagtcgagacgatttcccataccgcgctcctttccagccttggctttcttggtatggctttatcttcttcactctcatcattcttttcaacggtttcactgtcttcttgaagggcaactgggatgcctcttcctttgttgctgcctatattacgctgcccatcttcgctgtctgctggattggatggaaacttgttaagaagaccagggtagttcctttggccgagatcgacttccacagtggacgaagggaattggatgagcttgaagcattggatgcggaaaggtttaaggcggagaccaagtaccaaaaaattatcagtatcttgttttaa

SEQ ID NO: 17226 - protein, 575 aa, Cryptococcus neoformans var. neoformans JEC21
MSSAIEKEGSIRGRTSQEVVSAGYDPKKGGDGVDTVVTPAHAEKGSYEGEGIHVGEGTVHRQLKQRHMAMIALGGAIGTGLFVGSGSALASGGPVGVWLGYIFMASMVYAMMVALGEMAALYPVSGAFTHYASRFVDPSLGFALGFNYWYSYAITIPTEVVAASIVISYWDTTTNVAVYITVCLVLIWFINFWGARAYGEAEFWFSSIKVITIVGLIILGIVLMCGGGPNHDAIGFRYWRNPGPFAQITINNGDGVIPGRWGQFLAFWNVFVQAAFSFIGTEIIATTLGEAENPRKTVPRAIKRVFFRLLFFYVFGIFIISVLVPYTEPNLLNGTGTAAASPFVIAIENAGIKALPSIVNAVLLISAWSAGNSDLYASSRTLYALALERQMPRFFRRCTKRGLPIWCVVITGLFGFLSYMNTGGETAEKAFDWLYNLSAITGIITWWAILLSYLRFYYGLKKQGLSRDDFPYRAPFQPWLSWYGFIFFTLIILFNGFTVFLKGNWDASSFVAAYITLPIFAVCWIGWKLVKKTRVVPLAEIDFHSGRRELDELEALDAERFKAETKYQKIISILF

SEQ ID NO: 17227 - DNA, 1767 bp, Candida albicans SC5314
  CDS (1)..(1767): transl_table=12
atgccagaaaaggaattagattacattaggtccacagatgctgctggatccaccgaaaaagacggtggaatttatattgatgcctttgacaaacaagataacgccccaccaaagaaagggtttgccaaattcattgatggtttcagacgtgctgatgctgaagaattaggtattgatcctaacttgtcagaagcagaaaaaattgccattatgactgcaaactccccattgactcgttcattgaaaaatagacatttacaaatgattgctattggtggtagtattggtactggtcttttcgttggttcgggttcttctttacatactgggggtccagctgggcttttgattgcttatatacttattggaactatgatttattgtacagttatgtcccttggggaattggctgttactttccctgtatctggtgcttttgttacttataatagtcgttttattgatccaagttgggggtttgccatggcttggaattatgctatgcaatggctagtggtgttgcccttggaattggttgctgcagcaatgacggtgaaatattgggatgccaaaacaaacctggcggcgttcgtggttattttctatgttttgattgttgctattaacttttttggtgtccgtggttacggtgaagctgaatttatatttagtgccgttaaagttttggctgttttgggtttcattattttgggtattgtattgtgtgctggtggtggtccacaaggtggttatattggaggtaaaaactggtatattgaaggtgctccattccctaatggtgctaaaggtgtcataacggtgtttgtgaatgctgcctttgctttcgctggtactgaattgtgtggattggctgctgctgaaaccgaaaacccaagaaaatcattaccaaaagcttgtaagcaagttttctggagaatcactttattctatgtcatctgtttgactttagttgggttattggttccatggaatgatgaaagattattgggtagttcttctgctgatgcttctgcttctccattcgtcatttcaattagaaatgctggtattaaaggtttaccatcagttatgaatgttgttattatgattgctgtcttatctgttggtaactcctctgtctatggttcctcaagaactttggctgctttggctgcttccaaccaagctccaaaaatatttggttacattgataaacaaggtagaccgttagttggtattattgcccaattgcttgttggtttattatgtttccttgctgcatccgataaacaaggtgaagttttcaattggttgttggccttgtctggtttgtcttctattttcacttggggatcaattaatgtttgtttgattagattcagaagagcattggctgctcaaggtagagacactggtgaattggttttcacttctcaagttggtgttattggtgctatttggggtgcttttttgaacactgttgttctttgtttacaattctggattgctgtgtggccattgcattcttccccaagtgctgaagctttcttcagtgcttacttgactgttcctgttgttattgttttctacgttggtcataaactctggaccaagaattggcaagtctacatttgtgccaaggatattgatatcgatactggtagaagagaattggacttggacttggtcaaacaagaagttgccgaagaaaaggcttacattgcttctttgccattctacagaagagtctacaatgcttggtgttga

SEQ ID NO: 17228 - protein, 588 aa, Candida albicans SC5314
MPEKELDYIRSTDAAGSTEKDGGIYIDAFDKQDNAPPKKGFAKFIDGFRRADAEELGIDPNLSEAEKIAIMTANSPLTRSLKNRHLQMIAIGGSIGTGLFVGSGSSLHTGGPAGLLIAYILIGTMIYCTVMSLGELAVTFPVSGAFVTYNSRFIDPSWGFAMAWNYAMQWLVVLPLELVAAAMTVKYWDAKTNSAAFVVIFYVLIVAINFFGVRGYGEAEFIFSAVKVLAVLGFIILGIVLCAGGGPQGGYIGGKNWYIEGAPFPNGAKGVITVFVNAAFAFAGTELCGLAAAETENPRKSLPKACKQVFWRITLFYVICLTLVGLLVPWNDERLLGSSSADASASPFVISIRNAGIKGLPSVMNVVIMIAVLSVGNSSVYGSSRTLAALAASNQAPKIFGYIDKQGRPLVGIIAQLLVGLLCFLAASDKQGEVFNWLLALSGLSSIFTWGSINVCLIRFRRALAAQGRDTGELVFTSQVGVIGAIWGAFLNTVVLCLQFWIAVWPLHSSPSAEAFFSAYLTVPVVIVFYVGHKLWTKNWQVYICAKDIDIDTGRRELDLDLVKQEVAEEKAYIASLPFYRRVYNAWC

SEQ ID NO: 17229 - DNA, 1677 bp, Aspergillus fumigatus Af293
  CDS (1)..(1677)
atgacagttcatgatattgaaaaatatccccctcatgctccccaagagcctctgagcggaaaggccgcaggcgctgagccctttgaattcaatcaacatgtcaacgccgacaggctcgctcgtaagctctccgcccgccaggtgcagatgatcgccatcggcggcacaattgggacgggactcttcctgggaacaggcaaagctctcgcgacaggtgggcctgcgtcgatgcttatttcgtatgccatatgtggtgggattgtgttcgtcacgatgttaagcctgggggagatggcggcgtttattcccattgcgggttcgttctgtactttcgcagggcgcttcgttgacgatgctcttggtttcgctctgacttggaattactggtttaatgacgctgtctcaacggcggcggatgtcattgcactgcaactattgctgcagtattggacggataacttcccaggctgggcgatcagcttaatctttctgatttttgttattttacttaatgtgatgtctgtgagaatctacggagagattgaatattggctcagcttactcaaggtcatcacgattataatcttcatcattctcgggattgttgtcaactgcgggggcaataaggaccacaaatacatcggtgacaagtacttctatgtcggcgatgcccccttcgtaggtggaatcggtggattcgcctccgtctttgtcacggcatcgtttgcttatggcggcacggaatccattgccatcacagcgggagaaaccaaagacccagctaaaaacctgccgcgagtcgtccgcaatgtcttctggcgcatcgtcctcttctacatcatctccatcattctcatcggtctcaatgttccctacaactaccccaacctgtcaaagaaaaccaccgccaccagcccgttcaccatcgtcttcatggaagctggcagcgccgtggcaggcagcttcatcaacgccgtgctaatgaccagcgtcatctccgccgccaaccatgccctcttcgcagggtcccggcttctctacacgctcgcggtagacggccacgcccctcatttctttggccacctcaaccgcttccagatcccctgggtcgccgtgctagccacatccctcgtcagcggtctctgcttcggagccagctacatcggagccggccagctctggacctggttgcaaaacatcgtcggcgtctccaaccaaatctcgtgggtctgcatcggcatcgcctccctgcgcttccgcgccgccatccgccggcagaacctcgagcatctcctccccttcaagaactggacgtaccccgtcggccccatcatcgccgtcgggctgaatatcgtcctgatcctcgtgcagggctggtcctgcttcagcccgtccttccaggccgtcgactttgtgtcgttctacatcgagatccctatcatgattgtcatgtttttggcctggaagctggttaagcagacgaggttcgtgcatctggatgagatggacttggttactgatcggtatgatctgaatgcggagcatgctgaaagcgatggcaatgccgatggtgatagcccgtcgcgggtcgggaggattctgcatatcaaacagttgcagagtgaaaagggcgtgctcgggaagctgaagcgagttgggatgtggctgttcctatag

SEQ ID NO: 17230 - protein, 558 aa, Aspergillus fumigatus Af293
MTVHDIEKYPPHAPQEPLSGKAAGAEPFEFNQHVNADRLARKLSARQVQMIAIGGTIGTGLFLGTGKALATGGPASMLISYAICGGIVFVTMLSLGEMAAFIPIAGSFCTFAGRFVDDALGFALTWNYWFNDAVSTAADVIALQLLLQYWTDNFPGWAISLIFLIFVILLNVMSVRIYGEIEYWLSLLKVITIIIFIILGIVVNCGGNKDHKYIGDKYFYVGDAPFVGGIGGFASVFVTASFAYGGTESIAITAGETKDPAKNLPRVVRNVFWRIVLFYIISIILIGLNVPYNYPNLSKKTTATSPFTIVFMEAGSAVAGSFINAVLMTSVISAANHALFAGSRLLYTLAVDGHAPHFFGHLNRFQIPWVAVLATSLVSGLCFGASYIGAGQLWTWLQNIVGVSNQISWVCIGIASLRFRAAIRRQNLEHLLPFKNWTYPVGPIIAVGLNIVLILVQGWSCFSPSFQAVDFVSFYIEIPIMIVMFLAWKLVKQTRFVHLDEMDLVTDRYDLNAEHAESDGNADGDSPSRVGRILHIKQLQSEKGVLGKLKRVGMWLFL

SEQ ID NO: 17231 - DNA, 1836 bp, Ustilago maydis 521
  CDS (1)..(1836)
atggtcgacaatcccagcagcgatcttgtcgtcgagcagcctgctgacgctcgctcacccatgaccgtcaacaactcgaaagcctctagcaatatggatcaagatattgctcccaccttgtccaaggttggctctcagaccagtaccatcggctttgggtccacacacccacccatcaccgatgctgctcttcaacaggttcgcttgcgccgtgctttgggcgagcgtactatccagatgattgccctcgcaggcaccattggcacaggtctcttcctcggttctggcaaagcactcgccacttctggtcctctctcgatcctgatctcgtactcgctcgtcggtgtcattgtctaccttaccatgatagccatgggcgaaatggctgcgcttgtccccacctctggtgcttttggcgtcttcaccactcgctttgtgagcgttcatgcagggttttctgtcaatctgaattactggctgaatgacgcgatcagcgtagcttcagacctaacggcgatgcagatcctgaaaaactactgggtctccgacgacgtctttcctggctgggccctatctctcatttccctcgcgttcctgatttccgtcaatgttatctctgtgcgcggatatgcagagctcgagtatcttctttcgcttctcaagattgccaccatcattgcctttatcattgtcggtatcgtcgtcaatgccggtgtcaatgatacccattcttaccttggtttcaggtattggaccatcggcgatgcacccttcgtcggtggtttcggtggttgggtctcctctttcgtcaccgcttcctttgcattcggcggaaccgagtcccttaccatcaccgccggagaaacgcgcaacccatccaagacaatcccgaagaccatacgcaacgtcttttggcggatcattctcttctacatcctcgccctcttcatcattggcatcaacatcccttacaacaccccagggcttaagtccaagaacaccgctgtctccccttttactctcgtattcaagcaggctggctcccacggcgcggctagtttcatgaacgccgttgttctcacatcagctctgtcggctggtaatcacgcgctttatgccgggacccggattcttcattcaatggcaacaaacggtcaggcccccaagatttttgcgactgtctccaaaagcactcgtgtaccttgggttgctctggcctgtacagcgagcatctccggtctgtgcttcggctcgagttatatcggcgccggcgacctttggaactggctacagaatcttgtgggtgtcagcaatcagctttcctgggccgcgattggggtctcgtccatccgctttcacaaagccgtcgttaagcaagggaaacagtcgtcacttatctacaagaattggacgcaaccgtggggtccttacgttgccgtcataggctctgttctcatgatcctcgttcaaggatggaccgccttcaagccttttaacgtctcggactttttctcttactatatcgagctcgtcttcttcgcattagcattcttaggatggaagctgtggaaaaagactaagctgatcccaatcgaagaggtcgatctctacacggacactgttcagtacgaaaaagatcttcgaagaaggagaagggatctcatcagggacggtgccggtgacaagttacccgtcttgctcgaagacgaggaaatgccggaggatgacgatgaccgagaggcacagaaggagcaggagaaggaccagaagcatcgagataagaagcaaaggttcaaagcgatggcaagtagggcttctcagtatctgtgcttttag

SEQ ID NO: 17232 - protein, 611 aa, Ustilago maydis 521
MVDNPSSDLVVEQPADARSPMTVNNSKASSNMDQDIAPTLSKVGSQTSTIGFGSTHPPITDAALQQVRLRRALGERTIQMIALAGTIGTGLFLGSGKALATSGPLSILISYSLVGVIVYLTMIAMGEMAALVPTSGAFGVFTTRFVSVHAGFSVNLNYWLNDAISVASDLTAMQILKNYWVSDDVFPGWALSLISLAFLISVNVISVRGYAELEYLLSLLKIATIIAFIIVGIVVNAGVNDTHSYLGFRYWTIGDAPFVGGFGGWVSSFVTASFAFGGTESLTITAGETRNPSKTIPKTIRNVFWRIILFYILALFIIGINIPYNTPGLKSKNTAVSPFTLVFKQAGSHGAASFMNAVVLTSALSAGNHALYAGTRILHSMATNGQAPKIFATVSKSTRVPWVALACTASISGLCFGSSYIGAGDLWNWLQNLVGVSNQLSWAAIGVSSIRFHKAVVKQGKQSSLIYKNWTQPWGPYVAVIGSVLMILVQGWTAFKPFNVSDFFSYYIELVFFALAFLGWKLWKKTKLIPIEEVDLYTDTVQYEKDLRRRRRDLIRDGAGDKLPVLLEDEEMPEDDDDREAQKEQEKDQKHRDKKQRFKAMASRASQYLCF

SEQ ID NO: 17233 - DNA, 1461 bp, Listeria monocytogenes str. 4b F2365
  CDS (1)..(1461): transl_table=11
gtgaagaaagaaacacatggcgagattcgtcgtgacttaaaaacaaggcatttgtccatgattgccattggtggttcaatcgggacgggattatttttagcaagtggtaatgcgattcatacagcaggacctggtggcgctttagttgcttatatagcaatcgggattatggtgtactttttaatgacaagtttaggcgaaatggctacttacatgcctgtatctggttcatttagtacctatgctagtcgatttgttgacccagctttcggttttgcgcttggttggaattattggtttaactgggccattacacttgcggttgatatttccactgctgcaattatcgttcaattttggctaccgaacacccccgcttggctatggagcgcgattttcttaattttgattttcggcttaaacgcgctttcggtaaaagcatacggagaatcagagtattggttttcaattattaaagtggccacggttattattttccttatcgtcggcgtgcttactattgtcggaattcttggcggcgaagttattggcttttctaactttactgctggcgatgctccgtttaaaggtggattttttgccatcttaggtaccttcttaattgctggattttctttccaagggactgaaatggttggtattgcagctggtgaaagtgctactccagaaaccagcgtgccaaaagcgattaaacaagtattctggcggattttgctattttatatttttgcgattttcattattgggatgattattccttatactaacccgaatttacttagtgccgaggcaacagatgtggcaattagcccatttacactcgtatttgaaaaagctggtcttgcatttgcggcttccgtaatgaatgcggttatcctgacttctgttttatctgctggtaattcaggtctttacgcttccacaagaatgctttgggcaatggctcgtgataaaaaagcgcctaaattcttgggtaaagtaaaccgtcgtggcattccgatggctgctttaattgttacgacgattgttggtgcaatgacattcattacaacgctaacagaaaacggcacagtgatttatacgtggttactttccgcctctggtttaaccggatttattgcttgggtcggcatcgctatcagtcattaccgtttccgaaaagcatttatcaaacaaggacatgacttaagtgaactaaaatataaagcaaaatttttcccattcggacctattttagcactaattttatgtattttagttattgtcggtcaagattacgcggcatttttgaaaccagaatttacgaatcctgcttggtggcaaaaaatcggtatttcttatatcggcctccctattttccttgttttctggctatcttttaaatttacaaataaaacaaaagttattccactggaagactgcaaatttgatcaaaaataa

SEQ ID NO: 17234 - protein, 486 aa, Listeria monocytogenes str. 4b F2365
MKKETHGEIRRDLKTRHLSMIAIGGSIGTGLFLASGNAIHTAGPGGALVAYIAIGIMVYFLMTSLGEMATYMPVSGSFSTYASRFVDPAFGFALGWNYWFNWAITLAVDISTAAIIVQFWLPNTPAWLWSAIFLILIFGLNALSVKAYGESEYWFSIIKVATVIIFLIVGVLTIVGILGGEVIGFSNFTAGDAPFKGGFFAILGTFLIAGFSFQGTEMVGIAAGESATPETSVPKAIKQVFWRILLFYIFAIFIIGMIIPYTNPNLLSAEATDVAISPFTLVFEKAGLAFAASVMNAVILTSVLSAGNSGLYASTRMLWAMARDKKAPKFLGKVNRRGIPMAALIVTTIVGAMTFITTLTENGTVIYTWLLSASGLTGFIAWVGIAISHYRFRKAFIKQGHDLSELKYKAKFFPFGPILALILCILVIVGQDYAAFLKPEFTNPAWWQKIGISYIGLPIFLVFWLSFKFTNKTKVIPLEDCKFDQK

SEQ ID NO: 17235 - DNA, 1425 bp, Bacillus anthracis str. 'Ames Ancestor'
  CDS (1)..(1425): transl_table=11
atgtcgcaagtaaacaatacaaacaatgaattaaaacgtacgatgaaaagtagacacttattcatgattgcactcggtggtgtgattggaacggagttatttaacggatctggctttattataagtcaagctggacctggtggatccgtacttgcctttatggctggtggattattaatgtatttcgttatgctttgtcttggtgaactcgctgtagctatgcctgtttcaggttcttttcaggaatatgcaactaagttcatcaatcctgcaactggatttacaatcggctggttatattggttaagctgggcaaatacgaccggtcttgaatttacaactgctggcattacaatgcagcgctggttccctgatattcctgtttgggtttggtgtttaatatttggtgttacaatcttcatgattaatgcattatctgctcgtagttatgcagaaacagaattttggttttcaagtataaaagtatctgccattatagcttttattattcttggcggcgccgctatgttcggtttaattgatttaaaaggcgacgaaccagccccattattatcaaatttcgtaaatcatggcggtttattcccaaatggacttgcagctattctattaacgatggttacagttaattattccttccaaggtacagaacttgtcggaatcgcagcaggtgaaagtgaagatccagcaaaaactttacctcgttctattagaaatattatatggcgtacgatgtttttcttcgtcttagcaatctttgttcttgttgctttaattccttgggaagaagcaggattaacaaaaagcccgttcgttgctgtttttgataatatcagtattccatatgcagctgatattatgaactttgttattcttacagctgttctttctgtcgcaaactcaggactttacgcggcaactcgtatgctttggtcattatcaaaaaatgaaatggctccagcctttttaaagaaattatcatcacgaggaatacctttaaacgctttaattttgacaatttctatttctgctttttctcttttaacaagcgtcgtagctgctgaaacagtttacttatggttaatttccatttctggcgtcattacaattattgtttggatgtcaatttgtgtttctcaattctttttccgtaaacattatgtagcagacggtggaagattagaagacttaaaatttaaaacgccactttatccacttgtaccaattcttggttttggattgtatggcattatattagtaagtcttatctttatcccagatcaaagactaggcatttattgtactgtaccatttatcatcttttgctacacttactatcactttaaagtgaagaaaagaatttctactaacacttctagtgaaaataaaattagcgagactatataa

SEQ ID NO: 17236 - protein, 474 aa, Bacillus anthracis str. 'Ames Ancestor'
MSQVNNTNNELKRTMKSRHLFMIALGGVIGTELFNGSGFIISQAGPGGSVLAFMAGGLLMYFVMLCLGELAVAMPVSGSFQEYATKFINPATGFTIGWLYWLSWANTTGLEFTTAGITMQRWFPDIPVWVWCLIFGVTIFMINALSARSYAETEFWFSSIKVSAIIAFIILGGAAMFGLIDLKGDEPAPLLSNFVNHGGLFPNGLAAILLTMVTVNYSFQGTELVGIAAGESEDPAKTLPRSIRNIIWRTMFFFVLAIFVLVALIPWEEAGLTKSPFVAVFDNISIPYAADIMNFVILTAVLSVANSGLYAATRMLWSLSKNEMAPAFLKKLSSRGIPLNALILTISISAFSLLTSVVAAETVYLWLISISGVITIIVWMSICVSQFFFRKHYVADGGRLEDLKFKTPLYPLVPILGFGLYGIILVSLIFIPDQRLGIYCTVPFIIFCYTYYHFKVKKRISTNTSSENKISETI

SEQ ID NO: 17237 - DNA, 1467 bp, Bacillus anthracis str. 'Ames Ancestor'
  CDS (1)..(1467): transl_table=11
atgaatagcgcaacgaatcaaactacctctcaaacagaaactacaaaaggaaaaggtgaattaagacgcggtctaaaatcaaagcaccttacgatgatttctctcggcggtacaattggtaccggactatttcttgccagcggtggtgtcattcattcagctggacctggcggcgcattaattgcatacgccgcaattggaattatggtttactttttaatgacaagcttagccgaactcgcagcttacatgcctgttactggatcttttagcacgtacgcaacaaaatttgttgatccatcacttggctttgcacttggatggaactattggtataactgggcaattactatcgctgctgaactagcggctgtaacattaattatgaaattttggtttccagatactccttccctcatttggagcggattatgtttagctattattttccttttaaactacttatctgttaaaggatttggtgaatctgaatattggttcgcacttattaaagtagctacgattattatctttttaattgtcgggtttatgatgattttcggaattatgggcggcgaaactgttggatttaaaaacttcactgttgcagatgcaccatttaacggcggcatcatggcaattatcggtgtatttatggcagctggtttctcattccaaggtactgaattattaggtgtagctgctggtgaaacatctgatccagagcgtaatattccaaaagcaattcgttcgatcttttggcgtatccttttattctatatccttgcgattctcgttatcggtttattaattccttatacaactgaaagtcttgccgcaagtgatgtaacagtaagtccatttacacttatttttgaaaaagcgggcgttgccttcgctgcttctgttatgaacgctgttattttaacggcagtactatctgctggtaactctggtatgtatgcatcaactcgtatgctttgggacttagctcgccaagggaaagcaccaaagtttcttggtaaattagatagccgcggcgtacctgttaacgcattaatcgtaacatcgattgtcggtagtatcgctttcattgcttctttattcggtgacggtgttgtatacatttggttactaaatgcatcaggaatgtctggctttatcgcatgggttggaatcgcaattagtcattaccgtttccgcaaagcatatatcgcacaaggaaaagatttaaatgacttaccttatagagcaaaatggttcccattcggaccaatcttcgcttttgcgctttgcgtcatcgtaattttaggtcaaaactacggcgcatttatgggcgaatcaatcgattggaacggcgtactcgtttcttacatcggtttaccactcttcttagtactttggttaggatacaaatttacgaaaaaaacaaaagtcattccacttgataaatgtgaactaaaataa

SEQ ID NO: 17238 - protein, 488 aa, Bacillus anthracis str. 'Ames Ancestor'
MNSATNQTTSQTETTKGKGELRRGLKSKHLTMISLGGTIGTGLFLASGGVIHSAGPGGALIAYAAIGIMVYFLMTSLAELAAYMPVTGSFSTYATKFVDPSLGFALGWNYWYNWAITIAAELAAVTLIMKFWFPDTPSLIWSGLCLAIIFLLNYLSVKGFGESEYWFALIKVATIIIFLIVGFMMIFGIMGGETVGFKNFTVADAPFNGGIMAIIGVFMAAGFSFQGTELLGVAAGETSDPERNIPKAIRSIFWRILLFYILAILVIGLLIPYTTESLAASDVTVSPFTLIFEKAGVAFAASVMNAVILTAVLSAGNSGMYASTRMLWDLARQGKAPKFLGKLDSRGVPVNALIVTSIVGSIAFIASLFGDGVVYIWLLNASGMSGFIAWVGIAISHYRFRKAYIAQGKDLNDLPYRAKWFPFGPIFAFALCVIVILGQNYGAFMGESIDWNGVLVSYIGLPLFLVLWLGYKFTKKTKVIPLDKCELK

SEQ ID NO: 17239 - DNA, 1422 bp, Bacillus anthracis str. Sterne
  CDS (1)..(1422): transl_table=11
atgatgaatcaaaaccaaggattaaaaagagaattgaagagcaggcacatatttatgattgcacttggaggagttattggtactggcctttttttaggatctgggtatacaattcatgaagctgggcctggaggagcgattgtagcgtatcttgtcggaggatttgttatgtatttaacgatgctctgtcttggagagttagctgttgcaatgcctgacgcagggtcttatcaaacgtatgcaactaagcacatttcccctgcagcgggttatgtagtcggatggatgtcgtggttgaactggtcagctacgataggtattgaactaattgcagttagtattttaatgaaacgatggtttccagatgtaccgtcatggatttggtgcgtagtgtttgcggtactgctttttgctattaatgcgttatcttcaagaagttttgcagaagttgaattttggtttgcaagtattaaagtcattacaatcattgcatttattattttgggcggggcagcaatgtttggttttctagatatgaaaggaaatgaaccagcaccaatgttctctagttttactgattatggtggattgtttccaaatggattatccgctattttaattacgatgattgctgttaacttttccttccaaggaacagaactagtcggtattgcagcaggtgagagtgaaaatccagagaaaacaatcccgaaggcaattaataatacagtttggcgtatactcgtgttctttgtattatctattttcattcttgcaggattattcccttggcaacaggcgggagtaatagaaagtccattcgtagttgtatttgataaaattggtattccttatgcagccgatattatcaatttcgttattattacagcggttctatccgttgcgaattcaggattatacgcaacttctcgtatgctatggtctatgtctaatcaaggaatgattagtccgatttttggtaagttatctaaaaatggtgttcctatttatgcattgattgtaagtacaattgtaggttgcctttcattactatcaggtatttatgcggaagatacagtttatttatggctactttctattgccgggttcggagcgatattagtttgggcatctattgctctatctaacttattagctagaaggtcatatataaagcagggcggagatgtgaaagacttgaaatttaaaacaccactgtatccattcgtaccgctgcttgcattagtattaaatgtaacagtaattgttggtatggcctttattccagaacaaagaatggcgttatattgtggaattccatttatgattgtttgcttactgttttaccgtgcgacaagaaataaggcacataaagtagaacatattgaaaagacagatacaacagaagtagacagtttataa

SEQ ID NO: 17240 - protein, 473 aa, Bacillus anthracis str. Sterne
MMNQNQGLKRELKSRHIFMIALGGVIGTGLFLGSGYTIHEAGPGGAIVAYLVGGFVMYLTMLCLGELAVAMPDAGSYQTYATKHISPAAGYVVGWMSWLNWSATIGIELIAVSILMKRWFPDVPSWIWCVVFAVLLFAINALSSRSFAEVEFWFASIKVITIIAFIILGGAAMFGFLDMKGNEPAPMFSSFTDYGGLFPNGLSAILITMIAVNFSFQGTELVGIAAGESENPEKTIPKAINNTVWRILVFFVLSIFILAGLFPWQQAGVIESPFVVVFDKIGIPYAADIINFVIITAVLSVANSGLYATSRMLWSMSNQGMISPIFGKLSKNGVPIYALIVSTIVGCLSLLSGIYAEDTVYLWLLSIAGFGAILVWASIALSNLLARRSYIKQGGDVKDLKFKTPLYPFVPLLALVLNVTVIVGMAFIPEQRMALYCGIPFMIVCLLFYRATRNKAHKVEHIEKTDTTEVDSL

SEQ ID NO: 17241 - DNA, 1437 bp, Bacillus anthracis str. Sterne
  CDS (1)..(1437): transl_table=11
gtgaggaaaacaatgtcgcaagtaaacaatacaaacaatgaattaaaacgtacgatgaaaagtagacacttattcatgattgcactcggtggtgtgattggaacggagttatttaacggatctggctttattataagtcaagctggacctggtggatccgtacttgcctttatggctggtggattattaatgtatttcgttatgctttgtcttggtgaactcgctgtagctatgcctgtttcaggttcttttcaggaatatgcaactaagttcatcaatcctgcaactggatttacaatcggctggttatattggttaagctgggcaaatacgaccggtcttgaatttacaactgctggcattacaatgcagcgctggttccctgatattcctgtttgggtttggtgtttaatatttggtgttacaatcttcatgattaatgcattatctgctcgtagttatgcagaaacagaattttggttttcaagtataaaagtatctgccattatagcttttattattcttggcggcgccgctatgttcggtttaattgatttaaaaggcgacgaaccagccccattattatcaaatttcgtaaatcatggcggtttattcccaaatggacttgcagctattctattaacgatggttacagttaattattccttccaaggtacagaacttgtcggaatcgcagcaggtgaaagtgaagatccagcaaaaactttacctcgttctattagaaatattatatggcgtacgatgtttttcttcgtcttagcaatctttgttcttgttgctttaattccttgggaagaagcaggattaacaaaaagcccgttcgttgctgtttttgataatatcagtattccatatgcagctgatattatgaactttgttattcttacagctgttctttctgtcgcaaactcaggactttacgcggcaactcgtatgctttggtcattatcaaaaaatgaaatggctccagcctttttaaagaaattatcatcacgaggaatacctttaaacgctttaattttgacaatttctatttctgctttttctcttttaacaagcgtcgtagctgctgaaacagtttacttatggttaatttccatttctggcgtcattacaattattgtttggatgtcaatttgtgtttctcaattctttttccgtaaacattatgtagcagacggtggaagattagaagacttaaaatttaaaacgccactttatccacttgtaccaattcttggttttggattgtatggcattatattagtaagtcttatctttatcccagatcaaagactaggcatttattgtactgtaccatttatcatcttttgctacacttactatcactttaaagtgaagaaaagaatttctactaacacttctagtgaaaataaaattagcgagactatataa

SEQ ID NO: 17242 - protein, 478 aa, Bacillus anthracis str. Sterne
MRKTMSQVNNTNNELKRTMKSRHLFMIALGGVIGTELFNGSGFIISQAGPGGSVLAFMAGGLLMYFVMLCLGELAVAMPVSGSFQEYATKFINPATGFTIGWLYWLSWANTTGLEFTTAGITMQRWFPDIPVWVWCLIFGVTIFMINALSARSYAETEFWFSSIKVSAIIAFIILGGAAMFGLIDLKGDEPAPLLSNFVNHGGLFPNGLAAILLTMVTVNYSFQGTELVGIAAGESEDPAKTLPRSIRNIIWRTMFFFVLAIFVLVALIPWEEAGLTKSPFVAVFDNISIPYAADIMNFVILTAVLSVANSGLYAATRMLWSLSKNEMAPAFLKKLSSRGIPLNALILTISISAFSLLTSVVAAETVYLWLISISGVITIIVWMSICVSQFFFRKHYVADGGRLEDLKFKTPLYPLVPILGFGLYGIILVSLIFIPDQRLGIYCTVPFIIFCYTYYHFKVKKRISTNTSSENKISETI

SEQ ID NO: 17243 - DNA, 1467 bp, Bacillus anthracis str. Sterne
  CDS (1)..(1467): transl_table=11
atgaatagcgcaacgaatcaaactacctctcaaacagaaactacaaaaggaaaaggtgaattaagacgcggtctaaaatcaaagcaccttacgatgatttctctcggcggtacaattggtaccggactatttcttgccagcggtggtgtcattcattcagctggacctggcggcgcattaattgcatacgccgcaattggaattatggtttactttttaatgacaagcttagccgaactcacagcttacatgcctgttactggatcttttagcacgtacgcaacaaaatttgttgatccatcacttggctttgcacttggatggaactattggtataactgggcaattactatcgctgctgaactagcggctgtaacattaattatgaaattttggtttccagatactccttccctcatttggagcggattatgtttagctattattttccttttaaactacttatctgttaaaggatttggtgaatctgaatattggttcgcacttattaaagtagctacgattattatctttttaattgtcgggtttatgatgattttcggaattatgggcggcgaaactgttggatttaaaaacttcactgttgcagatgcaccatttaacggcggcatcatggcaattatcggtgtatttatggcagctggtttctcattccaaggtactgaattattaggtgtagctgctggtgaaacatctgatccagagcgtaatattccaaaagcaattcgttcgatcttttggcgtatccttttattctatatccttgcgattctcgttatcggtttattaattccttatacaactgaaagtcttgccgcaagtgatgtaacagtaagtccatttacacttatttttgaaaaagcgggcgttgccttcgctgcttctgttatgaacgctgttattttaacggcagtactatctgctggtaactctggtatgtatgcatcaactcgtatgctttgggacttagctcgccaagggaaagcaccaaagtttcttggtaaattagatagccgcggcgtacctgttaacgcattaatcgtaacatcgattgtcggtagtatcgctttcattgcttctttattcggtgacggtgttgtatacatttggttactaaatgcatcaggaatgtctggctttatcgcatgggttggaatcgcaattagtcattaccgtttccgcaaagcatatatcgcacaaggaaaagatttaaatgacttaccttatagagcaaaatggttcccattcggaccaatcttcgcttttgcgctttgcgtcatcgtaattttaggtcaaaactacggcgcatttatgggcgaatcaatcgattggaacggcgtactcgtttcttacatcggtttaccactcttcttagtactttggttaggatacaaatttacgaaaaaaacaaaagtcattccacttgataaatgtgaactaaaataa

SEQ ID NO: 17244 - protein, 488 aa, Bacillus anthracis str. Sterne
MNSATNQTTSQTETTKGKGELRRGLKSKHLTMISLGGTIGTGLFLASGGVIHSAGPGGALIAYAAIGIMVYFLMTSLAELTAYMPVTGSFSTYATKFVDPSLGFALGWNYWYNWAITIAAELAAVTLIMKFWFPDTPSLIWSGLCLAIIFLLNYLSVKGFGESEYWFALIKVATIIIFLIVGFMMIFGIMGGETVGFKNFTVADAPFNGGIMAIIGVFMAAGFSFQGTELLGVAAGETSDPERNIPKAIRSIFWRILLFYILAILVIGLLIPYTTESLAASDVTVSPFTLIFEKAGVAFAASVMNAVILTAVLSAGNSGMYASTRMLWDLARQGKAPKFLGKLDSRGVPVNALIVTSIVGSIAFIASLFGDGVVYIWLLNASGMSGFIAWVGIAISHYRFRKAYIAQGKDLNDLPYRAKWFPFGPIFAFALCVIVILGQNYGAFMGESIDWNGVLVSYIGLPLFLVLWLGYKFTKKTKVIPLDKCELK

SEQ ID NO: 17245 - DNA, 1422 bp, Bacillus thuringiensis serovar konkukian str. 97-27
  CDS (1)..(1422): transl_table=11
atgatggatcaaaataaaggattaaaacgggaattgaaaagcaggcacatatttatgattgcacttggaggagttattggtaccggtctttttttaggatctgggtatacaattcatgaagctgggcctggaggagcgattgtagcgtatcttgtcggaggatttgttatgtatttaacgatgctctgtcttggagagttagctgttgcaatgcctgacgcaggatcttatcaaacgtatgctacgaagcatatttcccctgcagcgggttatgtagtcggatggatgtcgtggttaaactggtcggctacaataggtattgaactaattgcagttagtattttaatgaaacgatggtttcctgatgtaccgtcttggatttggtgcgtagtgtttgcggtactactttttgctattaacgcgttatcttcaagaagttttgcagaagttgaattttggtttgcaagtattaaagtcattacaatcattgcatttattattttgggcggggcagcaatgtttggttttttagatatgaaaggaaatgaaccagcaccaatgttttctagctttattgattatggtgggttgtttccaaatggattatccgctattttaattacgatgattgcagttaatttttccttccaaggaacggaactagtcggtattgcagcaggtgagagtgaaaatccagagaaaacgatcccgaaggcaattaataatacagtttggcgtatactcgtgttctttgtattatctattttcattcttgcaggattattcccttggcaacaggcgggagtaatagaaagtccattcgtagttgtatttgataaaattggtattccttatgcagccgatattatcaatttcgttattattacagcggttctatccgttgcgaattcaggattatatgcaacttctcgtatgctatggtctatgtctaatcaaggaatgattagtccgatttttggtaagttatctaaaaatggtgttcctatttatgcattgattgtaagtacaattgtaggttgcctttcattactatcaggtatttatgcggaagatacagtttatttatggctactttctattgccgggttcggagcgatattagtttgggcatctattgctctatctaacttattagctagaaggtcatatataaagcagggcggagatgtgaaagacttgaaatttaaaacaccactgtatccattcgtaccgctgcttgcattagtattaaatgtaacagtaattgttggtatggcctttattccagaacaaagaatggcgttatattgtggaattccatttatgattgtttgcttactgttttaccgtgcgacaagaaataaggcacataaagtagaacatattgaaaagacaaatacaacagaagtagaaagtttataa

SEQ ID NO: 17246 - protein, 473 aa, Bacillus thuringiensis serovar konkukian str. 97-27
MMDQNKGLKRELKSRHIFMIALGGVIGTGLFLGSGYTIHEAGPGGAIVAYLVGGFVMYLTMLCLGELAVAMPDAGSYQTYATKHISPAAGYVVGWMSWLNWSATIGIELIAVSILMKRWFPDVPSWIWCVVFAVLLFAINALSSRSFAEVEFWFASIKVITIIAFIILGGAAMFGFLDMKGNEPAPMFSSFIDYGGLFPNGLSAILITMIAVNFSFQGTELVGIAAGESENPEKTIPKAINNTVWRILVFFVLSIFILAGLFPWQQAGVIESPFVVVFDKIGIPYAADIINFVIITAVLSVANSGLYATSRMLWSMSNQGMISPIFGKLSKNGVPIYALIVSTIVGCLSLLSGIYAEDTVYLWLLSIAGFGAILVWASIALSNLLARRSYIKQGGDVKDLKFKTPLYPFVPLLALVLNVTVIVGMAFIPEQRMALYCGIPFMIVCLLFYRATRNKAHKVEHIEKTNTTEVESL

SEQ ID NO: 17247 - DNA, 1437 bp, Bacillus thuringiensis serovar konkukian str. 97-27
  CDS (1)..(1437): transl_table=11
gtgaggaaaacaatgtcgcaagtaaataatacaaacaatgaattaaaacgtacgatgaaaagtagacacttattcatgattgcactcggtggtgtgattggaacggggttatttaacggatctggctttattataagtcaagctggacctggtggatccgtacttgcctttatggctggtggattattaatgtatttcgttatgctttgtcttggtgaactcgctgtagccatgcctgtttcggggtctttccaggaatatgcaactaagttcatcaatcctgcaactggctttacaatcggatggttgtattggttaagctgggcaaatacgaccggtcttgaatttacaactgctggcattacaatgcagcgctggttccctgatattcctgtttgggtttggtgtttaatatttggcgttacaatcttcacgattaatgcattatctgctcgtagttatgcagaaacagaattttggttttcaagtataaaagtatctgccattatcgcttttattatccttggcggcgccgctatgttcggtttaattgatttaaaaggcgacgaaccagccccattattatcaaatttcgtaaatcatggcggtttattcccaaatggacttgcagctattctattaacgatggttacagttaattattccttccaaggtacagaacttgtcggaatcgcagcaggtgaaagtgaagatccagcaaaaactttacctcgttctattagaaatattatatggcgtacgatgtttttcttcgtcttagcaatctttgttcttgttgctttaattccttgggaagaagcaggattaacaaaaagcccgttcgttgctgtttttgataatatcggtattccatatgcagctgatattatgaactttgttattcttacagctgttctttctgtcgcaaactctggactatatgccgcaactcgcatgctttggtcattatcaaaaaacgaaatggctccggcctttctaaagaaattatcttcacgaggaatacctttaaacgctttaattttgacaatttctatttctgctttttctcttttaacaagcgtcgtagctgctgaaacagtttacttatggttaatttcaatttctggcgtcattacaatcattgtttggatgtcaatttgtgtttctcaattctttttccgtaaacattatgtagcagacggtggaagattagaagacttaaaatttaaaacgccactttatccacttgtacccattcttggttttggattgtatggcattatattagtaagtcttatctttatcccagatcaaagactaggcatttattgtactgtaccatttatcatcttttgctacacttactatcactttaaagtgaagaaaagaatttctactaacacttctagtgaaaataaaattagcgagactatataa

SEQ ID NO: 17248 - protein, 478 aa, Bacillus thuringiensis serovar konkukian str. 97-27
MRKTMSQVNNTNNELKRTMKSRHLFMIALGGVIGTGLFNGSGFIISQAGPGGSVLAFMAGGLLMYFVMLCLGELAVAMPVSGSFQEYATKFINPATGFTIGWLYWLSWANTTGLEFTTAGITMQRWFPDIPVWVWCLIFGVTIFTINALSARSYAETEFWFSSIKVSAIIAFIILGGAAMFGLIDLKGDEPAPLLSNFVNHGGLFPNGLAAILLTMVTVNYSFQGTELVGIAAGESEDPAKTLPRSIRNIIWRTMFFFVLAIFVLVALIPWEEAGLTKSPFVAVFDNIGIPYAADIMNFVILTAVLSVANSGLYAATRMLWSLSKNEMAPAFLKKLSSRGIPLNALILTISISAFSLLTSVVAAETVYLWLISISGVITIIVWMSICVSQFFFRKHYVADGGRLEDLKFKTPLYPLVPILGFGLYGIILVSLIFIPDQRLGIYCTVPFIIFCYTYYHFKVKKRISTNTSSENKISETI

SEQ ID NO: 17249 - DNA, 1467 bp, Bacillus thuringiensis serovar konkukian str. 97-27
  CDS (1)..(1467): transl_table=11
atgaatagcgcaacgaatcaagctacctctaaaacagaagctacaaaaggaaaaggtgaattaagacgcggtctaaaatcaaggcaccttacgatgatttctctcggcggtacaattggtaccggactatttcttgccagcggtggtgtcatccattcagctggacctggcggtgcattaattgcatacgccgcaattggaattatggtttactttttaatgacaagcttagccgaactcgcagcttacatgcctgttactggatcttttagcacgtacgcaacaaaatttgttgatccatcacttggctttgcacttggatggaactattggtataactgggccattacgattgctgctgaactagcggctgtaacattaattatgaaattttggtttccagatactccttccctcatttggagcggattatgtttagctattattttccttttaaactacttatctgttaaaggatttggtgaatctgaatattggttcgcacttattaaagtagctacgattattatctttttaattgtcgggtttatgatgattttcggaattatgggcggcgaaactgttggatttaaaaacttcactgttgcagatgcaccatttaacggcggcatcatggcaattatcggtgtatttatggcagctggcttctcattccaaggtactgaattattaggtgtagctgctggtgaaacatctgatccagagcgtaatattccaaaagcaattcgttcgatcttttggcgtatccttttattctatatccttgcgattctcgttatcggtttattaattccttatacaactgaaagtcttgccgcaagtgatgtaacagtaagtccatttacacttatttttgaaaaagcgggcgttgccttcgctgcttctgttatgaacgctgttattttaacggcagtactatctgctggtaactctggtatgtatgcatcaactcgtatgctttgggatttagctcgccaagggaaagcaccaaagtttcttggtaaattagatagccgcggcgtacctgttaacgcattaatcgtaacatcgattgtcggtagtatcgcttttattgcttctttattcggtgacggtgttgtatacatttggttattaaatgcatcaggaatgtctggctttatcgcatgggttggaatcgcaattagtcattaccgttttcgtaaagcatatatcgcacaaggaaaagatttaaatgacttaccttatagagcaaaatggttcccattcggaccaatcttcgcatttgcactttgcgtcatcgtaattttaggtcaaaactacggcgcatttatgggcgaatcaatcgattggaacggcgtactcgtttcttacatcggtttaccactcttcttagtactttggttaggatacaaatttacgaaaaaaacaaaagtcattccacttgataaatgtgaactgaaataa

SEQ ID NO: 17250 - protein, 488 aa, Bacillus thuringiensis serovar konkukian str. 97-27
MNSATNQATSKTEATKGKGELRRGLKSRHLTMISLGGTIGTGLFLASGGVIHSAGPGGALIAYAAIGIMVYFLMTSLAELAAYMPVTGSFSTYATKFVDPSLGFALGWNYWYNWAITIAAELAAVTLIMKFWFPDTPSLIWSGLCLAIIFLLNYLSVKGFGESEYWFALIKVATIIIFLIVGFMMIFGIMGGETVGFKNFTVADAPFNGGIMAIIGVFMAAGFSFQGTELLGVAAGETSDPERNIPKAIRSIFWRILLFYILAILVIGLLIPYTTESLAASDVTVSPFTLIFEKAGVAFAASVMNAVILTAVLSAGNSGMYASTRMLWDLARQGKAPKFLGKLDSRGVPVNALIVTSIVGSIAFIASLFGDGVVYIWLLNASGMSGFIAWVGIAISHYRFRKAYIAQGKDLNDLPYRAKWFPFGPIFAFALCVIVILGQNYGAFMGESIDWNGVLVSYIGLPLFLVLWLGYKFTKKTKVIPLDKCELK

SEQ ID NO: 17251 - DNA, 1455 bp, Staphylococcus aureus subsp. aureus MRSA252
  CDS (1)..(1455): transl_table=11
atggaagataataaaatgaaccgtagtcttaactcaagacacatttccatgattgctataggtggtgcaattgggactggtctatttgtagctactggtaatatcatttctcaagctggtcctggaggcgctatactcgcttatcttgttattggtgtcatgctatatttcttaatggcatcaattggagagttggcaacattttatccagtatcaggttcattcagctcttattcaacacgctttattgactcatctctaggctttaccatgggatggttgtattgggcattgtggtcattagttacaagtgttgatgtcatagtagcgtcaaatgtgctttatttctgggacacatttaaatttttccaccccattacttggagcttaatctttattacaattttactattattaaacattttttctgtaaaatcatttggagaaactgagttttggttatcattaattaaagtgttaacaatcatcgtattcgttatttttggctttttaatgattttcggtatcttaggtggtcatgcatatggatttgaaaactatacaaaaggccaagcaccgtttgttggtggtatctctggtttcctaggcgtattattagtcgctggattctcagttggtggtactgaagtagtagcagtaactgctggcgaatcagatgatcctaaaaagtctatgcctaaagcaattaaacaagtgttttggcgtattcttttattctatgtattatcaattgcagtcattggtgcaattattccgtacacagatccatcattattaagagcaagtagttcaataagtcaaagcccatttacaattgtattcgatagagtaggcatagcctttgcagcatcagtaatcaatgcggttattttaacttcactattatccgctgcaaattcaggtgtttatacaacaggcagaatgttgtattccttaagttcagacaaaaaagcacctaaatttttaagtaaattaaacaagacaacaaaattaccattaagagcattattaactacatatgcagtcgttgttattgttattatttatgcaaactttaattcaaatgccgtttttaatttacttgaaattattggttcaatgattatagttgtttggggatcaagcatttggtcacaaatacgattgcgacaagctattaaaaaacaaggtcaagatcctaataaggtcctaccatataaagcacctttttatccattaggaccaatcattgtcatcgctacgctattattcttgctatttggtggttcagttgaatatattttaaaagatcaatggttaaatgcttttaaaaactttttacctttaatcattctagcgttgatttactttattcataaaatcattcacaaaacaaaatttgtaaagctagaaacaattaatttaaaaccacacgattatgacaatcaaaaataa

SEQ ID NO: 17252 - protein, 484 aa, Staphylococcus aureus subsp. aureus MRSA252
MEDNKMNRSLNSRHISMIAIGGAIGTGLFVATGNIISQAGPGGAILAYLVIGVMLYFLMASIGELATFYPVSGSFSSYSTRFIDSSLGFTMGWLYWALWSLVTSVDVIVASNVLYFWDTFKFFHPITWSLIFITILLLLNIFSVKSFGETEFWLSLIKVLTIIVFVIFGFLMIFGILGGHAYGFENYTKGQAPFVGGISGFLGVLLVAGFSVGGTEVVAVTAGESDDPKKSMPKAIKQVFWRILLFYVLSIAVIGAIIPYTDPSLLRASSSISQSPFTIVFDRVGIAFAASVINAVILTSLLSAANSGVYTTGRMLYSLSSDKKAPKFLSKLNKTTKLPLRALLTTYAVVVIVIIYANFNSNAVFNLLEIIGSMIIVVWGSSIWSQIRLRQAIKKQGQDPNKVLPYKAPFYPLGPIIVIATLLFLLFGGSVEYILKDQWLNAFKNFLPLIILALIYFIHKIIHKTKFVKLETINLKPHDYDNQK

SEQ ID NO: 17253 - DNA, 1494 bp, Staphylococcus aureus subsp. aureus MRSA252
  CDS (1)..(1494): transl_table=11
atgtcaaaagttcaaaatgaaagtaacaatgttgtcaaaaggggacttaaagatcgtcatatttctatgattgcgattgggggttgtattggtacaggtttatttgtaacttctggtggagcaattcatgatgcaggtgctttgggtgcattaataggatacgcaattatcggaataatggtatttttcttaatgacgtcacttggcgaaatggctacttatttgccagtatcaggctcatttagtacatatgctacaagatttgttgatccatctttagggtttgcgcttggttggaactattggtttaactgggtagtaactgtagcagcagatattacgattgcagcacaagtcattcaatattggacaccattacaaggcataccagcttgggcatggagtgcgttgttcttagttataatttttagtctgaattcgttatcggttcgcgtctatggtgaaagtgaatactggttggcattgataaaagtggttacagttattgttttcattgcaattggtttattaacgattgtcggaatcatgggtggtcatgttgtaggattcgaaatatttaataaaggtgaaggtcctattcttggtggaaatctaggcggaagtttattatctattttaggtgtattcttaattgctggtttttcattccaaggtacagagttaataggtattacagctggggaatcagaaaatcctgaacgtgctgtgccgaaagcgattaaacaagtattctggagaattttattattttacattttagccatttttgttatcggtatgttaattccttatgatagtagtgcattaatgggaggcggtaatgacgttgcaacctctccgttcacgctagtttttaaaaatgcaggatttgcttttgcagcctcatttatgaatgctgttatcttaacatcagttttatcagcaggtaactctggaatgtatgcctcaacgcgtatgctttattcaatgagtaaagataaattggcgtttgaaacatttgggaaaacaaataaaaatggtgtgccatatatgtctttattagtaactgcaattattgtagtcatcatatttgtggtacaaagtgttacagaaggtgcttatcaatacatcgttgctgcaagtgggttaactggctttattgcctgggtaggtatcgcagtgagtcattaccgatttagaagggcatttgataaacaaaattatgataaatctaaattgaaatatacagctaaatggtttccgttcggacctatttttgcagctattttatgtattgttgtaatcatcggtcaagatgttgactttattaaaacaggagattttaattttagtcgcttcttaattacgtatatgggaatcccagtatttttagcattctttatttatcataagcttcgatataaaacgaagaaaattccattagaacaagtagatttacgtcaagacgtgtcaatggatgaaataaaaggttaa

SEQ ID NO: 17254 - protein, 497 aa, Staphylococcus aureus subsp. aureus MRSA252
MSKVQNESNNVVKRGLKDRHISMIAIGGCIGTGLFVTSGGAIHDAGALGALIGYAIIGIMVFFLMTSLGEMATYLPVSGSFSTYATRFVDPSLGFALGWNYWFNWVVTVAADITIAAQVIQYWTPLQGIPAWAWSALFLVIIFSLNSLSVRVYGESEYWLALIKVVTVIVFIAIGLLTIVGIMGGHVVGFEIFNKGEGPILGGNLGGSLLSILGVFLIAGFSFQGTELIGITAGESENPERAVPKAIKQVFWRILLFYILAIFVIGMLIPYDSSALMGGGNDVATSPFTLVFKNAGFAFAASFMNAVILTSVLSAGNSGMYASTRMLYSMSKDKLAFETFGKTNKNGVPYMSLLVTAIIVVIIFVVQSVTEGAYQYIVAASGLTGFIAWVGIAVSHYRFRRAFDKQNYDKSKLKYTAKWFPFGPIFAAILCIVVIIGQDVDFIKTGDFNFSRFLITYMGIPVFLAFFIYHKLRYKTKKIPLEQVDLRQDVSMDEIKG

SEQ ID NO: 17255 - DNA, 1455 bp, Staphylococcus aureus subsp. aureus MSSA476
  CDS (1)..(1455): transl_table=11
atggaagataataaaatgaaccgtagtcttaactcaagacacatttccatgattgctataggtggtgcaattgggactggtctatttgtagctactggtaatatcatttctcaagctggtcctggaggcgctatactcgcttatcttgttattggtgtcatgctatatttcttaatgtcatcaattggagagttggcaacattttatccagtatcaggttcattcagctcttattcaacacgctttattgactcatctcttggctttaccatgggatggttgtattgggcattgtggtcattagttacaagtgttgatgtcatagtagcgtcaaatgtgctttatttctgggacacatttaaatttttccaccccattacttggagcttaatctttattacaattttactattattaaacattttttctgtaaaatcatttggagaaactgagttttggttatcattgattaaagtgttaacaattatcgtattcgttatttttggctttttaatgattttcggtatcttaggtggtcatacatatggatttgaaaactatacaaaaggccaagcaccgtttgttggtggtatctctggtttcttaggcgtattattagtcgccggattttcggttggtggtacagaagtagtagcagtaactgctggtgaatcagatgaccctaaaaagtctatgcctaaggcaattaaacaagtattttggcgtattcttttattctatgtcttatcaattgcagtaattggtgcaattattccgtacacagatccatcattattaagagcaagtagttcaataagtcaaagcccatttacaattgtattcgatagagtaggcatagcctttgcagcatcagtaatcaacgcggttattttaacttcattattatccgctgcaaattcaggtgtttatacaacaggcagaatgttgtattccttaagttcagacaaaaaagcaccccaatttttaagtaaattaaacaagacaactaagttacctttaagagcattattaactacttatgcagtcgttgttattgttattatttatgcaaactttaattcaaatgccgtttttaatttacttgaaattattggttcaatgattatagttgtttggggatcaagcatttggtcacaaatacgattgcgacaagctattaaaaaacaaggtcaagaccctaataaggtcctaccatataaagcacctttttatccattaggaccaatcattgtcatcactacactattattcttgctatttggtggctcagttgaatatattttaaaagatcaatggttaaatgcttttaaaaactttttacctttaatcattctagcgttgatttactttattcataaaatcattcacaaaacaaaatttgtaaagctagaaacaattaatttaaaaccacacgattatgacaatcaaaaataa

SEQ ID NO: 17256 - protein, 484 aa, Staphylococcus aureus subsp. aureus MSSA476
MEDNKMNRSLNSRHISMIAIGGAIGTGLFVATGNIISQAGPGGAILAYLVIGVMLYFLMSSIGELATFYPVSGSFSSYSTRFIDSSLGFTMGWLYWALWSLVTSVDVIVASNVLYFWDTFKFFHPITWSLIFITILLLLNIFSVKSFGETEFWLSLIKVLTIIVFVIFGFLMIFGILGGHTYGFENYTKGQAPFVGGISGFLGVLLVAGFSVGGTEVVAVTAGESDDPKKSMPKAIKQVFWRILLFYVLSIAVIGAIIPYTDPSLLRASSSISQSPFTIVFDRVGIAFAASVINAVILTSLLSAANSGVYTTGRMLYSLSSDKKAPQFLSKLNKTTKLPLRALLTTYAVVVIVIIYANFNSNAVFNLLEIIGSMIIVVWGSSIWSQIRLRQAIKKQGQDPNKVLPYKAPFYPLGPIIVITTLLFLLFGGSVEYILKDQWLNAFKNFLPLIILALIYFIHKIIHKTKFVKLETINLKPHDYDNQK

SEQ ID NO: 17257 - DNA, 1494 bp, Staphylococcus aureus subsp. aureus MSSA476
  CDS (1)..(1494): transl_table=11
atgtcaaaagttcaaaatgaaagtaacaatgttgtcaaaaggggacttaaagatcgtcatatttctatgattgcgattgggggttgtattggtacaggtttatttgtaacttctggtggagcaattcatgatgcaggtgctttgggtgcattaataggatacgcaattatcggaataatggtatttttcttaatgacgtcacttggcgaaatggctacgtatttgccagtatcaggttcatttagtacatatgctacaagatttgttgatccatctttagggtttgcgcttggttggaactattggtttaactgggtagtaactgtagcagcagatattacgattgcagcacaagtcattcaatattggacaccattgcaaggcatacccgcttgggcatggagtgcgttgttcttagttataatttttagtctgaattcgttatcagttcgcgtctatggtgaaagtgaatactggttggcattgataaaagtggttacagttattgttttcattgcaattggtttattaacgattgtcggaatcatgggtggtcatgttgtaggattcgaaatatttaataaaggtgaaggtcctattcttggtggcaacttaggaggaagtttattatcaattctaggtgtattcttaatcgctggtttctcattccaaggtactgagttaattggtattacggctggtgaatcagaaaatcctgaacgtgctgtgccgaaagcaattaaacaagtattctggagaattttattattttacattttagccatttttgttatcggtatgttaattccttatgatagtagtgcattaatgggtggtagtgataatgtagcaacgtctccattcacattagtgtttaaaaatgctggatttgcgtttgcagcatcatttatgaatgcagtcattttaacgtctgtgttatcagcaggtaactcaggtatgtatgcttcaactcgaatgctatattcaatgagtaaagataaattagcgtttgaagcatttggtaaaacaaataaaaacggtgtgccatatatgtcgttactcgttacagcaatcattgtagtgataattttcgtattacaaagccttacaaaaggtgcatacgaatatatcgttgcagcaagtggtttaactggttttattgcttgggtaggtatagcagtaagtcattatcgatttagaagagcatttgataaacaaaattatgacaaatctaaattaaaatatactgctaaattattcccattcggaccattatttgctggctttttatgtattgtagtaattattggtcaagatgttgactttattaaaacaggagattttaattttagtcgcttcttaattacgtatatgggaatcccagtatttttagcattctttatttatcataagcttcgatataaaacgaaaaaaattccattagaacaagtagatttacgtcaagacgtgtcaatggatgaaataaaaggttaa

SEQ ID NO: 17258 - protein, 497 aa, Staphylococcus aureus subsp. aureus MSSA476
MSKVQNESNNVVKRGLKDRHISMIAIGGCIGTGLFVTSGGAIHDAGALGALIGYAIIGIMVFFLMTSLGEMATYLPVSGSFSTYATRFVDPSLGFALGWNYWFNWVVTVAADITIAAQVIQYWTPLQGIPAWAWSALFLVIIFSLNSLSVRVYGESEYWLALIKVVTVIVFIAIGLLTIVGIMGGHVVGFEIFNKGEGPILGGNLGGSLLSILGVFLIAGFSFQGTELIGITAGESENPERAVPKAIKQVFWRILLFYILAIFVIGMLIPYDSSALMGGSDNVATSPFTLVFKNAGFAFAASFMNAVILTSVLSAGNSGMYASTRMLYSMSKDKLAFEAFGKTNKNGVPYMSLLVTAIIVVIIFVLQSLTKGAYEYIVAASGLTGFIAWVGIAVSHYRFRRAFDKQNYDKSKLKYTAKLFPFGPLFAGFLCIVVIIGQDVDFIKTGDFNFSRFLITYMGIPVFLAFFIYHKLRYKTKKIPLEQVDLRQDVSMDEIKG

SEQ ID NO: 17259 - DNA, 1464 bp, Acinetobacter sp. ADP1
  CDS (1)..(1464): transl_table=11
atgagcgaaaccactcaacctgatcagctccagcgcaagctcggtgctcgtcatcttaatatgattgccattggcggctccattggcacaggtttattccttgcatctggctcaaccatcgcaaatgcgggaccaggcggcgccctgctggcatacgtactcatcggcatcatgatttattttctcatgaccagtctcggtgaactagcgactcataatcccacttcaggggcattttttacgtatggcaatcgttatgtagaagagggattcgggttcgcattaggatggaactactggtataactgggccattactgtggcatttgagctagtggcagtccagtttattatgaaattctggtttccagatattccaggtttttactggagtgctattttcttggtggtgatttttgccatcaatgccatgaccgttaaaggttttggtgaaagtgaattctggttttcaatggtcaaggtcgttgccatcattgcctttattattattggtatggccatgattattaaaatcatgatgaccccaaatatggcaacctttggtaactggacctataaagatgcaccgtttgtaggggggttacaagctatgattggtgtggccatgattgcaggattctcatttcagggaacggaaatggtcggtgttgcggcaggtgagtctaaagatccaaaacgtacaattccgcttgcgattaaacagattttctggcgaattctgctattttatgtggtgtgtattttcatcattgggaccttggtcagctacgatgacccgcgtctacttcaagctgcacatagctcagatattgccttgtcaccttttaccctgctgtatgaaaaagcgggctttgcctttgctgcaagcctgatgaatgcggtgattttaacggcgattttatcggctggaaactcaggcatgtactcttctacccgtatgctttgggatatggcaaaagaaggacgtgcacctaaatggtttgcaaagcttgaccgtcgtggcgtgcccatgaacgccctatatgcaacaactgcaattgcagcactctgctttttaactacatttattggtgaacaggaagtctttaactggctactgaatatgtctgggatgtgtggttttattgtttggctagggattgcgatttcacattatcgcttccgcaaaggttatatcgcccaaggttataaacttgaagatctcgcctatcgagccaaattttttccttttgcaccctggtttgcctttattttatgttcgattattattctgggacaaaattatcaggcgatattaggcggtaaaatagactggactggattgttatccacctatatcagtattccactctttttaatcatttggcttggttataaatggaaatataaaaccaagctcattccttatcaagaaatgaatgtgaaagcaggtaaagaagattga

SEQ ID NO: 17260 - protein, 487 aa, Acinetobacter sp. ADP1
MSETTQPDQLQRKLGARHLNMIAIGGSIGTGLFLASGSTIANAGPGGALLAYVLIGIMIYFLMTSLGELATHNPTSGAFFTYGNRYVEEGFGFALGWNYWYNWAITVAFELVAVQFIMKFWFPDIPGFYWSAIFLVVIFAINAMTVKGFGESEFWFSMVKVVAIIAFIIIGMAMIIKIMMTPNMATFGNWTYKDAPFVGGLQAMIGVAMIAGFSFQGTEMVGVAAGESKDPKRTIPLAIKQIFWRILLFYVVCIFIIGTLVSYDDPRLLQAAHSSDIALSPFTLLYEKAGFAFAASLMNAVILTAILSAGNSGMYSSTRMLWDMAKEGRAPKWFAKLDRRGVPMNALYATTAIAALCFLTTFIGEQEVFNWLLNMSGMCGFIVWLGIAISHYRFRKGYIAQGYKLEDLAYRAKFFPFAPWFAFILCSIIILGQNYQAILGGKIDWTGLLSTYISIPLFLIIWLGYKWKYKTKLIPYQEMNVKAGKED

SEQ ID NO: 17261 - DNA, 1392 bp, Acinetobacter sp. ADP1
  CDS (1)..(1392): transl_table=11
gtgctcgatagtgctgcacccttaaaacgagccatgagtacccgtcatttggttatgctgtcattaggcggtgcgattggtacagggttgtttcttggttcaggggaagtcattacccagacagggccgattggagcagtgattgcctatatgcttggcggtttgattgcatatatggtgatgttatgtctgggtgaactggccgtacacatgcctgtatcaggatctttcggcgcttatgccaaaaaatacatcgggccaggcacaggctacatgatttcatgggtttactggctcacatggacagcaacgctgggtaccgaatttacagccgctgcattactcatgcaggaatggtttcctcatacatcgatgtggatctggactattatttttgccttgactatttttgggctaaatttaagttccacacatatttttgccgaatcagaattctggttatcattggttaaagtcctcactgtcattagctttattattcttggactattggctattttcgggattattcattttgagggacatgcctccgcaccactgtttagcaatctgaccagtcacggctggtttccacagggtttgatgccaatttttgcaacaatgctgattgtaaattttgcattttctggaactgaactaattggtgtggcagcaggcgaaaccaaagatccttctatcaatgtaccaaaagccatcaatgctgccatctggcgtctgctgatctttttcgttggaaccattgttgttataagtgctttattgccctatgatcagactggcctcggcggtcataacgtcagtaatagcccgtttgtaactgtgtttcaatatattggtattccctatgcagatcatattattcgctttgtgattattaccgcactcctgtcagcagcaaactctggtttgtatgccgcatcacgcatgatgtggtctttatcaaatcaacgccagcttccttctgtcttttcaaagctaacggccagtggcacccccattattgccttagtggttaccatgtttggcgcaattcctggcttactctcggagcaatttgcacctgaaacgatttttaagaatcttttgggcgtggctgcatttaccatggtgattgtatggatgagcatctgcttaagtcagtttaatttcagacggcactggtataaacaaggctatcacgccaaagacttaaaattcgcagctcccctgtttccaattttacccattttaggcttcttgttttgtttgattactggactaagtatggcgaaagatccagaaatgttgcctggttttattggatgcttaatttttgtagcgtgttgctatttgagccactacatattttatcgggaaaaaagcaagctgtga

SEQ ID NO: 17262 - protein, 463 aa, Acinetobacter sp. ADP1
MLDSAAPLKRAMSTRHLVMLSLGGAIGTGLFLGSGEVITQTGPIGAVIAYMLGGLIAYMVMLCLGELAVHMPVSGSFGAYAKKYIGPGTGYMISWVYWLTWTATLGTEFTAAALLMQEWFPHTSMWIWTIIFALTIFGLNLSSTHIFAESEFWLSLVKVLTVISFIILGLLAIFGIIHFEGHASAPLFSNLTSHGWFPQGLMPIFATMLIVNFAFSGTELIGVAAGETKDPSINVPKAINAAIWRLLIFFVGTIVVISALLPYDQTGLGGHNVSNSPFVTVFQYIGIPYADHIIRFVIITALLSAANSGLYAASRMMWSLSNQRQLPSVFSKLTASGTPIIALVVTMFGAIPGLLSEQFAPETIFKNLLGVAAFTMVIVWMSICLSQFNFRRHWYKQGYHAKDLKFAAPLFPILPILGFLFCLITGLSMAKDPEMLPGFIGCLIFVACCYLSHYIFYREKSKL

SEQ ID NO: 17263 - DNA, 1476 bp, Erwinia carotovora subsp. atroseptica SCRI1043
  CDS (1)..(1476): transl_table=11
atggctcagcacgatattcaacaaactacacagggcgcaccgaccctgcgccgtgaactgaaagcgcggcatttaacgatgatcgccattggcggatcgattggtactggattatttgtcgcttctggtgcgacggtttcacaagcgggtcctggtggtgcactcctgtcttatgccctgattgggctgatggtttacttcctgatgacgagcctaggcgaactggcggcattcatgccagtttctggttcattttctacctacggatctcgctatgttgaggaaggtttcggcttcgcattgggctggaactattggtacaactgggcggtgaccattgcggtcgatctggtcgctgcgcaactggtgatgggatattggttccctgaagtctccggttggatctggagcgctttgtttctggcgctgatgttcctgcttaattacatttctgtgaaagggtttggcgaagccgagtattggttctcactgattaaagtgacgacggtcattattttcattgctgtgggtgtgatgatgattacgggcatcatgagcggtgcggaaaatgctggattccacaactgggagattggcgatgcaccgtttgctggtggcttctccgccatgatcggcgtggcgatgatcgtgggtttttctttccagggaacggaattgatcggtgtggctgctggggagtcccaggaaccgagcaaaaacattccgcgtgccatccgtcaggttttctggcgtatcctgctgttttacatcttcgcgattctgattattagcttaatcattccgtataccgatccgaacctgctgcgtaatgatgtgaaagacattacggtgagtccgttcacgctggtgtttgagaatgcgggtctgttgtctgccgctgcggtcatgaatgcggtcatcttgacggcggtgttgtcggcgggtaactccgggatgtacgcctctacacgtatgctgtttacgctggcatcggaaggtaaagcgccgcgtattttcgctaagctgtcaaaaggtggtgtgccacgtaatgcgctgtatgcaacaaccgtggtggctgcgctgtgtttcctgtcttctctgtatggtaaccaaacggtttatctgtggttgttgaatacctcgggtatgaccggctttattgcctggctagggatcgcgatcagccattaccgtttccgtcgcggctatgttatgcaaggccacgatctgaaccgtctgccttatcagtcgcgtttcttcccgttagggccaatcttcgcgtttgtgctctgcctgatcatcacactggggcagaattatcaggcgtttctgcaagacaacatcgactggtatgccgtcacggcaacgtacatcggcattcctttgttcctgctgatttggttcggctataagctgtatcgtggaacgggcttcatcaagtatcaggatatgacgttcccggatcataaagactaa

SEQ ID NO: 17264 - protein, 491 aa, Erwinia carotovora subsp. atroseptica SCRI1043
MAQHDIQQTTQGAPTLRRELKARHLTMIAIGGSIGTGLFVASGATVSQAGPGGALLSYALIGLMVYFLMTSLGELAAFMPVSGSFSTYGSRYVEEGFGFALGWNYWYNWAVTIAVDLVAAQLVMGYWFPEVSGWIWSALFLALMFLLNYISVKGFGEAEYWFSLIKVTTVIIFIAVGVMMITGIMSGAENAGFHNWEIGDAPFAGGFSAMIGVAMIVGFSFQGTELIGVAAGESQEPSKNIPRAIRQVFWRILLFYIFAILIISLIIPYTDPNLLRNDVKDITVSPFTLVFENAGLLSAAAVMNAVILTAVLSAGNSGMYASTRMLFTLASEGKAPRIFAKLSKGGVPRNALYATTVVAALCFLSSLYGNQTVYLWLLNTSGMTGFIAWLGIAISHYRFRRGYVMQGHDLNRLPYQSRFFPLGPIFAFVLCLIITLGQNYQAFLQDNIDWYAVTATYIGIPLFLLIWFGYKLYRGTGFIKYQDMTFPDHKD

SEQ ID NO: 17265 - DNA, 1413 bp, Erwinia carotovora subsp. atroseptica SCRI1043
  CDS (1)..(1413): transl_table=11
atggaacaacacgcatctggctcggaagggcagtttaagcgcaccatgaaagctcgccatttggtgatgctttcgctcggcggcgtcatcggtaccggcctgtttttcaatacgggctacattatttccacgacgggtgctgccgggacgctgttggcgtatctgatcggtgcgttggtggtgtacttggtgatgcttagcctgggtgagctgtctgtcgcgatgccggaaactggggcgttccatgtgtacgcatcccgttatcttagcccggcaacgggctataccgtggcgtggttgtattggctgacgtggacggtcgcgctcggttccagcctcactgccgctggtttttgcatgcagtactggttcccgcaggtgccagtctggacctggtgcctgctgttttgtgcgctgatctatctgctgaatgtcgtctcgtcccgcttctttgccgaaggagaattctggttctcgattgttaaagtggttacgattcttgcctttattgtgctcggtgcgggcgcgatgtttggttttattccgatgcaggacggttctcccgcgccgttcttccagaacattaccgcttctggctggctcccacacggcggcctgccgatattgatgacgatggtggcggtgaatttcgctttctctggtacagagctgatcggcatcgcggcaggagaaaccgagaatccgcagaaggttgtaccgatggcgattcgcacgaccgtcgcgcggttggtgatcttcttccttggtacggtgctggtgctagccgccatcatcccgatggaagaggccggtatcgccaaaagtccgtttgtgctggtgtttgaaaaaattggtattccttacgccgcagacatttttaacttcgtgatcttgacggcgattctgtcggccgcgaactcagggctgtatgcttcgggacgtatgctgtggtcgctgtctaacgaaggcacgttgccgcgtcgtttttctcgcctgacgcgccgtggtattccgctctttgctatttccgtcagtatgcttggcgggctgttggcgctgttttccagcgtggtcgcgcccgataccgtctacgtagcgttgtccgcgatttccggctttgccgtggtggcggtgtggttgagtatctgcgcctcgcactatatgttccgccgtcatcatattcgctctggaaaatcactttccgagctgcaatatcgtgcgccctggttcccgataacgccgattcttggcttcctgttgtgcctgcttgcctgcgtcgggctggtgtttgatccaagccagcggattgcactgtggtgtggcattccgtttgtcgcattgtgttacggtgcttattatttcacgcaatcggtgaagaaacgtggattaacgggagtagaagacattgcgtaa

SEQ ID NO: 17266 - protein, 470 aa, Erwinia carotovora subsp. atroseptica SCRI1043
MEQHASGSEGQFKRTMKARHLVMLSLGGVIGTGLFFNTGYIISTTGAAGTLLAYLIGALVVYLVMLSLGELSVAMPETGAFHVYASRYLSPATGYTVAWLYWLTWTVALGSSLTAAGFCMQYWFPQVPVWTWCLLFCALIYLLNVVSSRFFAEGEFWFSIVKVVTILAFIVLGAGAMFGFIPMQDGSPAPFFQNITASGWLPHGGLPILMTMVAVNFAFSGTELIGIAAGETENPQKVVPMAIRTTVARLVIFFLGTVLVLAAIIPMEEAGIAKSPFVLVFEKIGIPYAADIFNFVILTAILSAANSGLYASGRMLWSLSNEGTLPRRFSRLTRRGIPLFAISVSMLGGLLALFSSVVAPDTVYVALSAISGFAVVAVWLSICASHYMFRRHHIRSGKSLSELQYRAPWFPITPILGFLLCLLACVGLVFDPSQRIALWCGIPFVALCYGAYYFTQSVKKRGLTGVEDIA

SEQ ID NO: 17267 - DNA, 1425 bp, Propionibacterium acnes KPA171202
  CDS (1)..(1425): transl_table=11
atggacggcgaattgaagcgcgggctctcctcgcggcacatgaacatgatcgcaatcggcggggccattggtactggcctgttcgtggcatctggtgccaccatctcccaagctgggccgggtggagctctggttgcctacttcgctatggggcttatggtcttcttgcttatgcagtctctcggcgagatgagctcctatctcccggtgccaggcgcattcgaaacctatgccaccagattcgtctcgccttcctttggcttcgcattggggtggaattactggttcaactgggccatcacggtcgctgctgaattagctgctgcctccatcgttatggcctactggtggcccggtgtaccggcctggatgtggtcggtcggattcctggcgttgctcttcctcctgaacgtcttgtctgcccgcgcgtatggtgagagcgagttctggttcgccatcatcaaggtgacggcagttatcgtcttcctggtgcttgggatcctcatgatcgccggcgtgatggggacatctcctggtctatctcattggcgtcgcggtgacgcgcccttcgttcacgggttcggtggcatcctgactgtctttcttattgctggattctccttccagggcaccgagctcatcggcattgctgcaggagaatcgaaagacccccgaatgacgatccccaaggccactcgtcagattttctggcggatcatgatcttctacatcggtgccatcgccgttatcggtttgttgctgccttatactgacccgcacctgcttgcgggcgaggtcaccgatgttgctgtcagcccgtttacgttggtcctaaagcgggccggtgttgctgctgcggcggctgtcatgaatgcggtcatccttacctcggtgctttcggctggtaactctggtctttatgcgtccacccgaatgctttacgccctagcgcgtgagggcaaagctcctcgcatccttggccgtactagtcgacgaggtgtcccggtgccggctcttatcgtcactactcttgtcggcgcggcctgttttgctacatctctggtggggtcaggccaggcatacacctggttggtcaatatctctggtctgtgtggattcatcgcatggatcggtattgcgatatgccatatccagttccggcgcgcctttcaggctcaggggcacgacctgtccgagttgccgtatcgggcgcgctggtatcctgccggtcctatcgtcgccggggtgttgtgcgtcatcgttactctcggccagggacgtgacgcagttctcagcggtgatgtcaccgacatgatcgtcgcttacatcagcattccggtattcctggcgttgtgggtcggtcacaagattgtcaccaaggcgcctcatgccgacctttcaacggccgatcttcatcacgactga

SEQ ID NO: 17268 - protein, 474 aa, Propionibacterium acnes KPA171202
MDGELKRGLSSRHMNMIAIGGAIGTGLFVASGATISQAGPGGALVAYFAMGLMVFLLMQSLGEMSSYLPVPGAFETYATRFVSPSFGFALGWNYWFNWAITVAAELAAASIVMAYWWPGVPAWMWSVGFLALLFLLNVLSARAYGESEFWFAIIKVTAVIVFLVLGILMIAGVMGTSPGLSHWRRGDAPFVHGFGGILTVFLIAGFSFQGTELIGIAAGESKDPRMTIPKATRQIFWRIMIFYIGAIAVIGLLLPYTDPHLLAGEVTDVAVSPFTLVLKRAGVAAAAAVMNAVILTSVLSAGNSGLYASTRMLYALAREGKAPRILGRTSRRGVPVPALIVTTLVGAACFATSLVGSGQAYTWLVNISGLCGFIAWIGIAICHIQFRRAFQAQGHDLSELPYRARWYPAGPIVAGVLCVIVTLGQGRDAVLSGDVTDMIVAYISIPVFLALWVGHKIVTKAPHADLSTADLHHD

SEQ ID NO: 17269 - DNA, 1512 bp, Yersinia pseudotuberculosis IP 32953
  CDS (1)..(1512): transl_table=11
atgactcagcaaaatactaaaatcccagcgcagcagggtgcacagcgcttacgccgggagcttaaatcgcggcatttagccatgattgctatcggtggttctattggtaccggtttatttgttgcctctggtgcaacggtatcgcaagccggtccagggggggcattgctctcctacgcattgattggcttgatggtttacttcctgatgaccagcttgggagaattggctgcgttcatgccagtttcaggctcattctctacttatggttctaaatatgtcgaggaaggctttggctttgccctaggttggaactactggtacaactgggcggtaaccatcgcagttgacttggtagccgcacagttagtgatgaactactggttcccggacgcgcccggttggatctggagtgctttattcctgggcctgatgttcttactgaactacatctcagtgaaaggtttcggtgaagcggaatattggttctcgctgattaaagtgacaaccgtggttatcttcatcatcgttggtgtcatgatgatcaccggtatcatgaaagggggcgaaacggcgggttggcataactggactatcggtgatgcaccatttgctggtggtttctctgccatgattggggtggccatgatcgtcggcttctctttccaggggactgaattgattggtattgcggctggggaatccaaagatccaggcaaaaatattccaaaggcaattcgcaaagtgttctggcgtattctgttgttctatatcttcgctattctgattattagcctgattattccttataccgatcccagtttgttacgcaacgatgtgaaagatatcagcgtcagcccgttcacactggtattccagaatgcgggtctgttatcagcagcggcagtgatgaatgcggttattttgaccgctgttttatcggcgggtaactcggggatgtatgcctcgacccgtatgctgtttaccttagcctctgaaggcaaagcaccgcgtattttcgccaagttatctaagggcggtgtccctcgtaatgcgctgtatgccacgacagtcgttgcaggtttgtgcttcctgagctccatgtttggtaaccaaactgtgtatttgtggttactgaatacctcggggatgactgggtttatcgcctggttgggtattgccatcagccactaccgcttccgtcggggctatatgatgcagggccgtgacttgaacgacttaccgtatcagtctggtttcttccctctggggccaatttttgccttcgtcctgtgtctaatcatcacgttaggccagaattatcaggcattcctgcaagaccgtattgattggtatggcgtgacggcaacctatattggtattccattgttcctggtgatttggtttggctataagctcagccgtggtacccgggtagtgaaataccaagagatggaattcccaaaatggcgtgatgagagtgaagagcatcagaaaccgacaagtcggtga

SEQ ID NO: 17270 - protein, 503 aa, Yersinia pseudotuberculosis IP 32953
MTQQNTKIPAQQGAQRLRRELKSRHLAMIAIGGSIGTGLFVASGATVSQAGPGGALLSYALIGLMVYFLMTSLGELAAFMPVSGSFSTYGSKYVEEGFGFALGWNYWYNWAVTIAVDLVAAQLVMNYWFPDAPGWIWSALFLGLMFLLNYISVKGFGEAEYWFSLIKVTTVVIFIIVGVMMITGIMKGGETAGWHNWTIGDAPFAGGFSAMIGVAMIVGFSFQGTELIGIAAGESKDPGKNIPKAIRKVFWRILLFYIFAILIISLIIPYTDPSLLRNDVKDISVSPFTLVFQNAGLLSAAAVMNAVILTAVLSAGNSGMYASTRMLFTLASEGKAPRIFAKLSKGGVPRNALYATTVVAGLCFLSSMFGNQTVYLWLLNTSGMTGFIAWLGIAISHYRFRRGYMMQGRDLNDLPYQSGFFPLGPIFAFVLCLIITLGQNYQAFLQDRIDWYGVTATYIGIPLFLVIWFGYKLSRGTRVVKYQEMEFPKWRDESEEHQKPTSR

SEQ ID NO: 17271 - DNA, 1455 bp, Bacillus licheniformis ATCC 14580
  CDS (1)..(1455): transl_table=11
atggaacagtcaaacaccaatcgccagaactttcaaagaaaaatgcaaacgagacaccttatcatgctttccttaggaggcgttatcggcacgggccttttcttaagttccggttatacgatctcacaggctggtcctgccggaacgattctagcctacttggccggggctctgatcgtctaccttgtcatgctctgcctcggcgaattatcggtcgccatgcctgtcaccggatcgtttcatatgtacgcctccagattcatcgggccgggcaccggattcaccgtcgcctggctatactggctgacctgggctgtcgcgctcggttcggaatttaccgctgccgggttattaatgcagcgctggttccccgatacttcagtctggatgtggagcgcggtattcgctgcactgattttcgcgctcaatgctgtctcagtgagatttttcgccgaatccgaattttggttttcaagcattaaagtgcttgccattatattgtttattatattaggaggagcggcgatattcggcatcatcccgatacaaaatgcagacgctgcaccgcttctttcaaactttgcaggagaaggcggtctctttccaaacggcttccttccaatttttatggcgatgctctccgtgaattttgcgttttcgggtacggagctgatcggaattgccgccggagaaagcgccgaaccggaaaagaacattccaaaagcgatcaagacaacactctggagactggtgcttttcttcatcggaacgattttcgtgctttcgtgcctcattccggttaaagaagccggtgtgatcaaaagcccatttgtcgacgtctttgaccgcatcggtgttccatatgcggccgacatcatgaactttgtaattctgacggctctgctttccgcggccaactcaggcttgtatgcatgctcccggatgctctggtcactgtcaaaagaaaaaactttgcaccccgtatttcaaaagctgacttcacggggaatcccgttgaacgcgctgatcttcagcatgctcggcggcattctgtcgctgctctccagcgtgtttgcgcctgattccgtctacatcgttcttgtgtcgatttcagggtttgccgttgttgctgtctggatgagcattgcggcttcgcagttcatgttccgcagacgctttttggctgagggaaacaccgcagacgacttaaaataccggacaccgctttatccggccgtaccgattgccgcttttctgctatgcctggcatcctgcattggcattgcctttgatccgaaccaaaggatcgcccttttttgcggtgtgccgtttatggcgttatgctataccatctattatgcaacaaaccgaaaaaatagctggaatccgtctgagcccgttaagaatgcaagtttgcatgtttcattttctgaatacgaggaaaagaaaaactaa

SEQ ID NO: 17272 - protein, 484 aa, Bacillus licheniformis ATCC 14580
MEQSNTNRQNFQRKMQTRHLIMLSLGGVIGTGLFLSSGYTISQAGPAGTILAYLAGALIVYLVMLCLGELSVAMPVTGSFHMYASRFIGPGTGFTVAWLYWLTWAVALGSEFTAAGLLMQRWFPDTSVWMWSAVFAALIFALNAVSVRFFAESEFWFSSIKVLAIILFIILGGAAIFGIIPIQNADAAPLLSNFAGEGGLFPNGFLPIFMAMLSVNFAFSGTELIGIAAGESAEPEKNIPKAIKTTLWRLVLFFIGTIFVLSCLIPVKEAGVIKSPFVDVFDRIGVPYAADIMNFVILTALLSAANSGLYACSRMLWSLSKEKTLHPVFQKLTSRGIPLNALIFSMLGGILSLLSSVFAPDSVYIVLVSISGFAVVAVWMSIAASQFMFRRRFLAEGNTADDLKYRTPLYPAVPIAAFLLCLASCIGIAFDPNQRIALFCGVPFMALCYTIYYATNRKNSWNPSEPVKNASLHVSFSEYEEKKN

SEQ ID NO: 17273 - DNA, 1446 bp, Bacillus licheniformis ATCC 14580
  CDS (1)..(1446): transl_table=11
ttgaatcatgaaaaccgtgaacaatatacactgaaacgaacgatgaaatcccgccatttgtttatgatctcgcttggcggcgtcatcggaaccggcttttttctcggaacaggttatacgattaatgaagccggaccgatcggcgcgattctttcctatttagcgggcggaatgatcatgtattttacgatgctctgccttggggagctcgctgtggcaatgccggtttcaggctcttttcagacgtacgcgacaaaatttatcgggcctgctacagggtttgccgtcggctggatctattggctcggctggtcggttactgttgctttggaatttttgtcagcggggcagctgatgaaaagatggtttcccgatgtcggcgtctggatatggtgcttgattttcgggctgctgcttttttcactcaatgctttatcggcaaaggctttcggggaatcggaattttggctgtccggcatcaaaattatcgtcattcttctgtttattattctcggcggaggcgcgatgttcggactcatcgacttgaaagacggacaggctgcaccgttcttttccaatctgattggagacggaatttttccaaacggattcggcgcgatctttatcacgatgatcaccgtcaactttgcctttcaggggacggagctgatcgggatcgcggcgggggaaagcgaaaatccggaaaaaacggtgccccgctccatcaaacagacggtctggcggacactggtgtttttcggcctgtccgtatttgtactggcgggattgattccatgggaaaaagcgggggttgttgaaagtccgttcgttgtggtatttgaacaaatcggcattccgtatgccgccgatctgatgaactttgttattttaattgctttgttatcggtggcgaattcgggcttgtacgcatcgacgaggatgctttattccctggcgaaagagggaatggccgctcaggctttaagccgggtcaataaaagaggtattccgatgaatgcgctttggatcacgctcggttttgcgggtttgtccctcatctcaagcgtagtcgcagcagaaacgctctacatttggcttttgtctctagccggtttaagcgcgcaagtcggctggatcacgattacggtatcacagctgctatttcgcagacgatatgtcaaagaaggcggaaaggttgaagacttaaaatttaaaacgcctctttatccttatttgccgctgacgggatttattttaaacagcgccgtccttgtgagcctcgcttttgattcagagcagaggatggcattgtactgcgggattttattcatgtcggcctgctactttgtttatcacgtgtttgtgaaaaaacgccaggctcttgatcgacaagaagcaatgatctatcaaaacaaaacaaacgatgaggtggttattgatgaataa

SEQ ID NO: 17274 - protein, 481 aa, Bacillus licheniformis ATCC 14580
MNHENREQYTLKRTMKSRHLFMISLGGVIGTGFFLGTGYTINEAGPIGAILSYLAGGMIMYFTMLCLGELAVAMPVSGSFQTYATKFIGPATGFAVGWIYWLGWSVTVALEFLSAGQLMKRWFPDVGVWIWCLIFGLLLFSLNALSAKAFGESEFWLSGIKIIVILLFIILGGGAMFGLIDLKDGQAAPFFSNLIGDGIFPNGFGAIFITMITVNFAFQGTELIGIAAGESENPEKTVPRSIKQTVWRTLVFFGLSVFVLAGLIPWEKAGVVESPFVVVFEQIGIPYAADLMNFVILIALLSVANSGLYASTRMLYSLAKEGMAAQALSRVNKRGIPMNALWITLGFAGLSLISSVVAAETLYIWLLSLAGLSAQVGWITITVSQLLFRRRYVKEGGKVEDLKFKTPLYPYLPLTGFILNSAVLVSLAFDSEQRMALYCGILFMSACYFVYHVFVKKRQALDRQEAMIYQNKTNDEVVIDE

SEQ ID NO: 17275 - DNA, 1422 bp, Bacillus cereus E33L
  CDS (1)..(1422): transl_table=11
atgatggatcaaaataaaggattaaaacgggaattgaaaagcaggcacatatttatgattgcacttggaggagttattggtaccggtctttttttaggatctgggtatacaattcatgaagctgggcctggaggagcgattgtagcgtatcttgtcggaggatttgttatgtatttaacgatgctctgtcttggagagttagctgttgcaatgcctgacgcaggatcttatcaaacatatgctacgaagcatatttcccctgcagcgggttatgtagtcggatggatgtcgtggttaaactggtcggctacaataggtattgaactaattgcagttagtattttaatgaaacgatggtttcctgatgtaccgtcttggatttggtgcgtagtgtttgcggtactactttttgctattaacgcgttatcttcaagaagttttgcagaagttgaattttggtttgcaagtattaaagtcattacaatcattgcatttattattttgggcggggcagcaatgtttggttttctagatatgaaaggaaatgaaccagcaccaatgttttctagctttactgattatggtgggttgtttccaaatggattatccgctattttaattacgatgattgcagttaatttttccttccaaggaacggaactagtcggtattgcagcaggtgagagtgaaaatccagagaaaacgatcccgaaggcaattaataatacagtttggcgtatactcgtgttctttgtattatctattttcattcttgcaggattattcccttggcaacaggcgggagtaatagaaagtccattcgtagttgtatttgataaaattggtattccttatgcagccgatattatcaatttcgttattattacagcggttctatccgttgcgaattcaggattatatgcaacttctcgtatgctatggtctatgtctaatcaaggaatgattagtccgatttttggtaagttatctaaaaatggtgttcctatttatgcattgattgtaagtacaattgtaggttgcctttcattactatcaggtatttatgcggaagatacagtttatttatggctactttctattgccgggttcggagcgatattagtttgggcatctattgctctatctaacttattagctagaaggtcatacataaagcggggcggggatgtgaaagacttgaaatttaaaacaccactgtatccattcgtaccgctgcttgcgttagtattaaatgtaaccgtaattgttggtatggcctttattccagaacaaagaatggcattgtattgtggaattccatttatgattgtttgcttactgttttaccgtgcgacaagaaataaggcacataaagtagaacatattgaaaagacagatacaacagaagtagaaagtttataa

SEQ ID NO: 17276 - protein, 473 aa, Bacillus cereus E33L
MMDQNKGLKRELKSRHIFMIALGGVIGTGLFLGSGYTIHEAGPGGAIVAYLVGGFVMYLTMLCLGELAVAMPDAGSYQTYATKHISPAAGYVVGWMSWLNWSATIGIELIAVSILMKRWFPDVPSWIWCVVFAVLLFAINALSSRSFAEVEFWFASIKVITIIAFIILGGAAMFGFLDMKGNEPAPMFSSFTDYGGLFPNGLSAILITMIAVNFSFQGTELVGIAAGESENPEKTIPKAINNTVWRILVFFVLSIFILAGLFPWQQAGVIESPFVVVFDKIGIPYAADIINFVIITAVLSVANSGLYATSRMLWSMSNQGMISPIFGKLSKNGVPIYALIVSTIVGCLSLLSGIYAEDTVYLWLLSIAGFGAILVWASIALSNLLARRSYIKRGGDVKDLKFKTPLYPFVPLLALVLNVTVIVGMAFIPEQRMALYCGIPFMIVCLLFYRATRNKAHKVEHIEKTDTTEVESL

SEQ ID NO: 17277 - DNA, 1422 bp, Bacillus cereus E33L
  CDS (1)..(1422): transl_table=11
atgcagcaaccaacgaatgagaaattacatcgtacgatgaagagtagacatttatttatgatcgcactaggtggtgtaatcgggacaggctttttcttaggttctggttacaccattaatcaggctggaccagggggagccatcctttcctatttagtgggcggatttattatgtatttaacaatgctatgccttggagagctaacggtagcgatgccagtttcaggttctttccaaaagtatgcgacgaagtttattggaccaggaacgggctttatgatcggctggctatattggcttggctgggcagtaacagtaggactagaattaacgtcaatcggtttaatgatgaaaagatggtttccgaatgttgatgtttgggtatggtgcctcgtcttcggcgttattttatatgcgtcaaacgcaatttcggcgaaaagttatgctgaattagaattttggttctctagtattaaagtagttaccattcttgcctttgttgttcttggtggtagtgcattattagggtttatatcatatgacggaaaagaagcagcacctcttttctctaactttgtaagcgatggtggattattcccgaatggactagctgccgtattacttacgatgattacagttaacttctcgttccaaggaacagagttaattgggattgcagcgggagaaagtgaaaatccagaaaaaacaattccacgcgcgatccgtaatacagtatggcgcattatgttattcttcattttaacaatgacgattttagtagggttaatttcttggaaagaagctggcgtaattgaaagtccattcgtagtcgtgtttgataaaatcggtattccgtatgcagctgatattatgaacttcgttattattacagcgttactatctgtagcgaattcaggattatatgcggcaactcgtatactatggtcacttgcaaatgaaggaatggcaccaaagtctttccaaaaagtaaataaacgtggtattccaattacagcgttagttgtaacaattgctgtagctgctttatctttattaacaagcttccttgcagaagatacagtatacatgtacttattatctatagctggtttatcagctgtttcaagttggatcattattgctttatcacaacttcgctttagaagtcagtatataaaaggcggaggaaagttagaggacttaaagtatagaacaccactatacccaatcgtcccaattttagctttaattacaaatagtatcgttgttattagtttagcgtttattccagaacaaagaatggcgttatattgtggtattccatttatcattttctgttatatatattattatataaataagaaacggcagaaaccgatgaaggtggagacaactaatgaaactaacaatcaaacacgatga

SEQ ID NO: 17278 - protein, 473 aa, Bacillus cereus E33L
MQQPTNEKLHRTMKSRHLFMIALGGVIGTGFFLGSGYTINQAGPGGAILSYLVGGFIMYLTMLCLGELTVAMPVSGSFQKYATKFIGPGTGFMIGWLYWLGWAVTVGLELTSIGLMMKRWFPNVDVWVWCLVFGVILYASNAISAKSYAELEFWFSSIKVVTILAFVVLGGSALLGFISYDGKEAAPLFSNFVSDGGLFPNGLAAVLLTMITVNFSFQGTELIGIAAGESENPEKTIPRAIRNTVWRIMLFFILTMTILVGLISWKEAGVIESPFVVVFDKIGIPYAADIMNFVIITALLSVANSGLYAATRILWSLANEGMAPKSFQKVNKRGIPITALVVTIAVAALSLLTSFLAEDTVYMYLLSIAGLSAVSSWIIIALSQLRFRSQYIKGGGKLEDLKYRTPLYPIVPILALITNSIVVISLAFIPEQRMALYCGIPFIIFCYIYYYINKKRQKPMKVETTNETNNQTR

SEQ ID NO: 17279 - DNA, 1425 bp, Bacillus cereus E33L
  CDS (1)..(1425): transl_table=11
atggcgcaagtaaataatacaaacaatgaattaaaacgtacgatgaaaagtagacacttattcatgattgcacttggtggtgtgattggaacggggttatttaacggatctggttttattataagtcaggctggacctggtggatccgtacttgcctttatggccggtggattattaatgtatttcgttatgctatgtcttggtgaactcgctgtagccatgcccgtttcggggtctttccaggaatatgccactaagtttatcaatcctgcaactggctttacaatcggatggttgtattggttaagctgggcgaatacgaccggccttgaatttacaactgccggcattacaatgcagcgctggtttcctgatattcctgtttgggtttggtgtttaatatttggcgttacaatcttcacaattaacgcactatctgctcgtagttatgcagaaacagaattttggttttcaagtataaaagtatctgccattatcgcttttattattcttggcggcgccgctatgttcggtttaattgatttaaaaggcgacgaaccagctccgctattttcaaatttcgtaaatcatggtggtttattcccaaatggacttgcagctattctattaacaatggttacagtcaattattccttccaaggtacagaacttgtcggaatcgcagcaggtgaaagtgaagatccagcaaaaactttacctcgttctattagaaatattatatggcgcacgatgtttttcttcgtcttagcaatctttgttcttgttgctttaattccttgggaagaagcaggattaacaaaaagcccgttcgttgctgtttttgataatatcggtattccatatgcagctgatattatgaactttgttattcttacagctgttctttctgtcgcaaactcaggactttacgcggcaactcgtatgctttggtcattatcaaaaaatgaaatggctccagcctttttaaagaaattatcatcacgaggaatacctctaaacgctttaattatgacaattgctatttctgctttttctcttttaacaagcgttgtagcagctgaaactgtttacttatggttaatttctatttcgggcgtcataacaatcattgtttggatgtcaatttgtgtttctcaattctttttccgtaaacattatgtagcagacggtggaaagttagaagacttaaaatttaaaacgccactttatccacttgtacccatgcttggttttggattgtatggcattattttaatcagtcttatttttatcccagaacaacgacttggaatctattgcactgtaccatttattatcttttgctacacttactatcactttaaagtgaagaaaagaatttctactaacacttctagtgaaaataaaattagcgagactatataa

SEQ ID NO: 17280 - protein, 474 aa, Bacillus cereus E33L
MAQVNNTNNELKRTMKSRHLFMIALGGVIGTGLFNGSGFIISQAGPGGSVLAFMAGGLLMYFVMLCLGELAVAMPVSGSFQEYATKFINPATGFTIGWLYWLSWANTTGLEFTTAGITMQRWFPDIPVWVWCLIFGVTIFTINALSARSYAETEFWFSSIKVSAIIAFIILGGAAMFGLIDLKGDEPAPLFSNFVNHGGLFPNGLAAILLTMVTVNYSFQGTELVGIAAGESEDPAKTLPRSIRNIIWRTMFFFVLAIFVLVALIPWEEAGLTKSPFVAVFDNIGIPYAADIMNFVILTAVLSVANSGLYAATRMLWSLSKNEMAPAFLKKLSSRGIPLNALIMTIAISAFSLLTSVVAAETVYLWLISISGVITIIVWMSICVSQFFFRKHYVADGGKLEDLKFKTPLYPLVPMLGFGLYGIILISLIFIPEQRLGIYCTVPFIIFCYTYYHFKVKKRISTNTSSENKISETI

SEQ ID NO: 17281 - DNA, 1563 bp, Burkholderia mallei ATCC 23344
  CDS (1)..(1563): transl_table=11
atgtcaccacacccgaattccgacaactcaaccgcacaatcgaatcctcctcagctgcgccgcagcctgaaagcccgtcacctgacgatgatcgcgatcggcggctcgatcggcacgggcctgttcgtcgcgtccggcgcgtccatctcgcaggcgggccccggcggcgcgatgctcgcctatctgttgatcggcctgatggtctattgcctgatgatgagcttgggcgagatggccgcgttcatgccggtgtcgggctcgttcgcgacgtacggcgcgaaatacgtcgaggaaggcttcggcttcgcgctcggctggaactactggtacaactgggcggtgacgatcgccgtcgagctcgtcgccgcgcagctcgtcatgcattactggtttccggacgtgccgggcgtctggtggagcgcggcgttcctcggcgtgatgttcctgctcaacgtgctgaccgtgcgcggcttcggcgaggccgaatactggttcgcgctcatcaaggtcgtcaccgtgatcgcgttcatcggcgtcggcctgctgatgatcttcggcatcctgaagggcggcccgagcaacggctggagcaacttcacgatcggcgacgcgccgttcgcgggcggcctgcccgcgatgatgggcgtcgcgatgatcgccggcttctcgttccagggcaccgagctgatcggcgtcgcggccggcgaatcggaaaacccgcgcacgacgatcccgcgcgcggtgcgccaggtgttctggcgcatcctgctgttctacgtgctcgcgatcttcgtgatcggcgtgctgattccgtacaccgatccgaatctgctgaagagcgacgtgaccgacgtcggcgtgagcccgtttacgctcgtgttccgtcacgcgggcctcgcgttcgccgcgggcgtgatgaacgcggtgatcctgaccgccgtgctctcggcgggcaactcggggatgtacgcgtcgacgcggatgctccacaacctcgcgaccgaaggccgcgcgccgaagctgttcgcgaagctgtcggcgggcggcgtgccgcgcaacgcgctgtatgcgacgaccgcggtcggcgcgctgtgcttcctgtcgtcgctgtacggcgacaagaccgtgtatctgtggctgctgaacacgtcgggaatgacgggcttcatcgcgtggctcggcatcgcgctcagccactatcgcttccgcaagggctacgtgcgccagggcttctcggtcgaccaactgccgtatcagtcgagcctgtatccgtacggcccgatcttcgcgttcgcgctgtgcatcgtgatcgcgctcggccaggattatcaggcgttcctcgcgaaccggatcgactggatcggcgtgctcgccacctacgtcggcattccgctcttcctcgtcgtgtggctcggctatcggctcgtccacaagacgcgcgtcgtccgctatgaggacatggacatcgcatcgtgggtggccgagcacgagcgcgcggcggcgcacgaggcgcgcgaggcggcggccgtgcgcgtgccgtcgagtcccgaggcggcttcgtaa

SEQ ID NO: 17282 - protein, 520 aa, Burkholderia mallei ATCC 23344
MSPHPNSDNSTAQSNPPQLRRSLKARHLTMIAIGGSIGTGLFVASGASISQAGPGGAMLAYLLIGLMVYCLMMSLGEMAAFMPVSGSFATYGAKYVEEGFGFALGWNYWYNWAVTIAVELVAAQLVMHYWFPDVPGVWWSAAFLGVMFLLNVLTVRGFGEAEYWFALIKVVTVIAFIGVGLLMIFGILKGGPSNGWSNFTIGDAPFAGGLPAMMGVAMIAGFSFQGTELIGVAAGESENPRTTIPRAVRQVFWRILLFYVLAIFVIGVLIPYTDPNLLKSDVTDVGVSPFTLVFRHAGLAFAAGVMNAVILTAVLSAGNSGMYASTRMLHNLATEGRAPKLFAKLSAGGVPRNALYATTAVGALCFLSSLYGDKTVYLWLLNTSGMTGFIAWLGIALSHYRFRKGYVRQGFSVDQLPYQSSLYPYGPIFAFALCIVIALGQDYQAFLANRIDWIGVLATYVGIPLFLVVWLGYRLVHKTRVVRYEDMDIASWVAEHERAAAHEAREAAAVRVPSSPEAAS

SEQ ID NO: 17283 - DNA, 1452 bp, Streptococcus thermophilus LMG 18311
  CDS (1)..(1452): transl_table=11
ttgatagtttcaacctattatccaaagatcttttattgtgataagcttgttttattacatctattggaggaatctatggaaaaccataattatgaaaatgaaggtcagtttcaacggaagatgacctcacgccacctctttatgctctcgctgggtggtgttatcggcactggtcttttcttgagctcgggctatacgattgcacaagcaggtccccttggtgttatcctctcttatcttgtgggagctgttgtcgtttacttggttatgctttcgttgggggagttagcggtagctatgccagtaacgggatcctttcacacctatgccactaagtttatcagtcctggaacaggttttactgtagcctggctttattggatttgttggacggttgccttggggacagaattcctaggtgcggccatgctgatgcaacgctggtttccgtcagttccggcttggatttttgcagccttctttgccttagtaattttggggattaatgctttgagtgtgagatcttttgcggaagcagaatccgtcttctcgtcaatcaaagtcatcgccatctttgttttcatcatactaggtctaggagctatgtttggtttggtgagttttgaaggtcaccatgaagctattatgtttaagcatttgacggccaatggtctctttcccaatggaggtcttgccattgtgtcagttatgttggcggttaattatgccttttcgggaacagaattaatcggtattgcagctggtgaaacagataatcccaaagaggctgttccacgtgctattaaaacaaccattggacgtttggttatcttcttcgtcttgactattgtggtattggcttcgcttcttccaatgaaagaagcaggggtatcctcagcccctttcgttgatgtctttgacaagatggggattccatttgcggcagacattatgaattttgttatcctgacagctattctttcggctgggaattcggggctctatgcttcaagccgtatgctttggtctttggccaatgagggaatgctcaataaaaaactagtgacaatcaataagcatggcgttccaatgacagcccttttgatttccatggctggggcagttttatcgctcttctcaagtatctatgcagcggatacggtttatctagctctagtatcaattgctggttttgcagttgttgttgtttggctttctattcctatggcacagattaatttccgaaaacagtggaagctagaacattccgaagacgaactagactataagacaccgtttaatccaatcctcccttatatcacaattgttctgttggctatttctgtgcttgggattgcttgggatagttcacaacgtgcgggactctatttcggtattcctttcatgattttctgttacctttatcactacctttgctttaacaaatggtaa

SEQ ID NO: 17284 - protein, 483 aa, Streptococcus thermophilus LMG 18311
MIVSTYYPKIFYCDKLVLLHLLEESMENHNYENEGQFQRKMTSRHLFMLSLGGVIGTGLFLSSGYTIAQAGPLGVILSYLVGAVVVYLVMLSLGELAVAMPVTGSFHTYATKFISPGTGFTVAWLYWICWTVALGTEFLGAAMLMQRWFPSVPAWIFAAFFALVILGINALSVRSFAEAESVFSSIKVIAIFVFIILGLGAMFGLVSFEGHHEAIMFKHLTANGLFPNGGLAIVSVMLAVNYAFSGTELIGIAAGETDNPKEAVPRAIKTTIGRLVIFFVLTIVVLASLLPMKEAGVSSAPFVDVFDKMGIPFAADIMNFVILTAILSAGNSGLYASSRMLWSLANEGMLNKKLVTINKHGVPMTALLISMAGAVLSLFSSIYAADTVYLALVSIAGFAVVVVWLSIPMAQINFRKQWKLEHSEDELDYKTPFNPILPYITIVLLAISVLGIAWDSSQRAGLYFGIPFMIFCYLYHYLCFNKW

SEQ ID NO: 17285 - DNA, 1452 bp, Streptococcus thermophilus CNRZ1066
  CDS (1)..(1452): transl_table=11
ttgatagtttcaacctattatccaaagatcttttattgtgataagcttattttattacatctattggaggaatctatgaaaaaccataattatgaaaatgaaggtcagtttcaacggaagatgacctcacgccacctctttatgctctcgctgggtggtgttatcggcactggtcttttcttgagctcgggctatacgattgcacaagcaggtccccttggtgctatcctctcttatcttgtgggagctgttgtcgtttacttggttatgctttcgttgggggagttagcggtagctatgccagtaacgggatcctttcacacctatgccactaagtttatcagtcctggaacaggttttactgtagcctggctttattggatttgttggacggttgccttggggacagaattcctaggtgcggccatgctgatgcaacgctggtttccgtcagttccggcttggatttttgcagccttctttgccttagtaattttggggattaatgctttgagtgtgagatcttttgcggaagcagaatccgtcttctcgtcaatcaaagtcatcgccatcttggttttcatcatactaggtctaggagctatgtttggtttggtgcgttttgaaggtcaccatgaagctattatgtttaagcatttgacggccaatggtctctttcccaatggaggtcttgccattgtgtcagttatgttggcggttaattatgccttttcgggaacagaattaatcggtattgcagctggtgaaacagataatcccaaagaggctgttccacgtgctattaaaacaaccattggacgtttggttatcttcttcgtcttgactattgtggtattggcttcgcttcttccaatgaaagaagcaggggtatcctcagcccctttcgttgatgtctttgacaagatggggattccatttgcggcagacattatgaattttgttatcctgacagctattctttcggctgggaattcggggctctatgcttcaagccgtatgctttggtctttggccaatgagggaatgctcaataaaaaactagtgacaatcaataagcatggcgttccaatgacagcccttttgatttccatggctggggcagttttatcgctcttctcaagtatctatgcagcggatacggtttatctagctctagtatcaattgctggttttgcagttgttgttgtttggctttctattcctatggcacagattaatttccgaaaacagtggaagctagaacattccgaagacgaactggactataagacaccgtttaatccaatcctcccttatatcacaattgttctgttggctatttctgtgcttgggattgcttgggatagttcacaacgtgcgggactctatttcggtattcctttcatgattttctgttacctttatcactacctttgctttaacaaatggtaa

SEQ ID NO: 17286 - protein, 483 aa, Streptococcus thermophilus CNRZ1066
MIVSTYYPKIFYCDKLILLHLLEESMKNHNYENEGQFQRKMTSRHLFMLSLGGVIGTGLFLSSGYTIAQAGPLGAILSYLVGAVVVYLVMLSLGELAVAMPVTGSFHTYATKFISPGTGFTVAWLYWICWTVALGTEFLGAAMLMQRWFPSVPAWIFAAFFALVILGINALSVRSFAEAESVFSSIKVIAILVFIILGLGAMFGLVRFEGHHEAIMFKHLTANGLFPNGGLAIVSVMLAVNYAFSGTELIGIAAGETDNPKEAVPRAIKTTIGRLVIFFVLTIVVLASLLPMKEAGVSSAPFVDVFDKMGIPFAADIMNFVILTAILSAGNSGLYASSRMLWSLANEGMLNKKLVTINKHGVPMTALLISMAGAVLSLFSSIYAADTVYLALVSIAGFAVVVVWLSIPMAQINFRKQWKLEHSEDELDYKTPFNPILPYITIVLLAISVLGIAWDSSQRAGLYFGIPFMIFCYLYHYLCFNKW

SEQ ID NO: 17287 - DNA, 1413 bp, Geobacillus kaustophilus HTA426
  CDS (1)..(1413): transl_table=11
atgcaaccagtgcaagaactgaaacgagagctaaaaagcaggcatttatttatgatcgcgctaggcggagtgatcggcaccggtttgtttttaggatcgggttatacgattcatgaggcggggccaggaggggccgtcgttgcttatctttttggcggattggttatgtatttgaccatgctttcgttaggagaattggccgtgagaattcctgatgccgggtcgtatcagacgtatgcgacgaaattcatctcgccggcagtggggtattgcatcggttggctgtcatggctgaactggtcggtgacggtcggcatcgagctgctcacggtcagcattttgatgaagcgatggtttcctgatgtgccgacatgggtgttttgtgcggtcttcgctttgctcttgtttttgatcaacgccttgtctgtcaaaggatttggcgaggtggagttttggttttcgagcatcaaggtgctgacggtgatcgcctttattgttcttggtctggcggcgatgttcggagtcatccatatgaaaaatggacaacctgctccgtttttctcgaactttacagaccatgggggcttgtttccaaatgggttttgggcgatctttacgacgatgatcctcgtgaacttttcgttccaggggacggaattggtcggcgtggcggcaggggaaagccgcgagccggaaaaaacggtgccggttgcgttgcgcaacaccgtatggcgcattttgatcttctttattttggccatttttgtgctggctggtttgtttccgtgggagaaagccggcgttgtggaaagcccgtttgttgaggtgtttgacaacattggcattccgtatgcagccgatatcatgaactttgtcatcattaccgcggtgctgtcggtggccaactcgggcttatatgcgacatcgcgcgtcctctggtcgatgtcgcgccaaggcatggtcactccgtttttcagcaagctatcgaaacgcggcgtgcccatcaatgcgcttattgccagcattgccatcggctgcttgtctctgttgtgcagcgtgtatgcggaagatacggtgtacgtctggctgacggcgatcgccggatttggcgccgtcacggtgtgggcttccatcgcgctgtcaagctatttcggccggaaagcgtttttgcgcgaaggcggcgatgtgcgcgatctgaaatacaggacgccgttgtatccgttcgtgccgctggccgcgtttgcgttgaatatggcgacgatcatcggactggcctttatcccagatcaacggatcgcgctttactgcggcattccgtttttgctcgcttgctacgggtactaccaccttgtggcgaaaaaacgggttcagcccctagccgcagaagaaggggagctcaaggccgccaagtaa

SEQ ID NO: 17288 - protein, 470 aa, Geobacillus kaustophilus HTA426
MQPVQELKRELKSRHLFMIALGGVIGTGLFLGSGYTIHEAGPGGAVVAYLFGGLVMYLTMLSLGELAVRIPDAGSYQTYATKFISPAVGYCIGWLSWLNWSVTVGIELLTVSILMKRWFPDVPTWVFCAVFALLLFLINALSVKGFGEVEFWFSSIKVLTVIAFIVLGLAAMFGVIHMKNGQPAPFFSNFTDHGGLFPNGFWAIFTTMILVNFSFQGTELVGVAAGESREPEKTVPVALRNTVWRILIFFILAIFVLAGLFPWEKAGVVESPFVEVFDNIGIPYAADIMNFVIITAVLSVANSGLYATSRVLWSMSRQGMVTPFFSKLSKRGVPINALIASIAIGCLSLLCSVYAEDTVYVWLTAIAGFGAVTVWASIALSSYFGRKAFLREGGDVRDLKYRTPLYPFVPLAAFALNMATIIGLAFIPDQRIALYCGIPFLLACYGYYHLVAKKRVQPLAAEEGELKAAK

SEQ ID NO: 17289 - DNA, 1470 bp, Salmonella enterica subsp. enterica serovar Paratyphi A str. ATCC
  CDS (1)..(1470): transl_table=11
atgggttccaaaactaaaaccacagaagcgcccgcgctacgtcgcgaattaaaggcgcgtcacctgacgatgattgccattggcggctccatcgggacaggtcttttcgttgcatctggtgcgacaatttctcaggcggggccaggcggcgcgctgttttcttatattctgattggtttgatggtctacttcctgatgaccagtcttggcgagctggcggcctatatgccggtatctggctcgtttgcgacatatggtcagaactatgtggaagaaggctttggtttcgcgctgggctggaactactggtacaactgggcggtgactatcgctgttgacctggttgccgcacaattggtgatgggctggtggttcccggacacgccgggctggatctggagcgcgctattcctctgcgtcattttcttgctgaactacatttctgtacgtggttttggcgaggcggagtactggttctcgttaattaaagtcgcgaccgttattatcttcatcatcgttggcgtagcgatgattatcggtatctttaaaggtgtcgagccggtcggctggagcaactggacgaccggcgatgcgcctttcgctggcggttttgcggcaatgattggcgtcgcgatgatcgtgggcttctctttccagggaactgagctgattggtattgccgccggggaatctgaaaacccggagaagaatattccacgcgcggtgcgtcaggtgttctggcgtattctgctgttttatgttttcgcgattttgattatcagcctgatcattccttataccgatccaaatctgctgcgtaacgacgtcaaagacattagcgtcagtccgtttaccttagtgttccagcatgcgggcttgttgtctgcggcggcgataatgaatgcggttatcctgacggcggtactgtctgcgggtaactccgggatgtatgcctcgacccgtatgctctacaccctggcctgtgacggtaaggccccgcgtatttttgcgaaattgtcccgcggcggcgtaccgcgcaatgcgctttatgccaccaccgtgattgccggtctttgctttttgacctcaatgttcggcaaccagacggtctatctgtggctgttgaacacctccggtatgacgggcttcatcgcctggctggggattgccattagccattatcgcttccgtcgcggttacgtgttacaagggtatgatgtgaatgatttgccgtaccgttccgggttcttcccgctggggccgattttcgcctttgtactgtgcctgattattacgttggggcagaactatgaagcgttcctgaaagataccatcgactggggcggcgtcgcggcgacctatatcggtattccgctgttcctgcttatctggttcggctacaagctgataaaaggtacgcatttcgtgcgctatagcgaaatgcacttcccggaacgcgttaaaaagtaa

SEQ ID NO: 17290 - protein, 489 aa, Salmonella enterica subsp. enterica serovar Paratyphi A str. ATCC
MGSKTKTTEAPALRRELKARHLTMIAIGGSIGTGLFVASGATISQAGPGGALFSYILIGLMVYFLMTSLGELAAYMPVSGSFATYGQNYVEEGFGFALGWNYWYNWAVTIAVDLVAAQLVMGWWFPDTPGWIWSALFLCVIFLLNYISVRGFGEAEYWFSLIKVATVIIFIIVGVAMIIGIFKGVEPVGWSNWTTGDAPFAGGFAAMIGVAMIVGFSFQGTELIGIAAGESENPEKNIPRAVRQVFWRILLFYVFAILIISLIIPYTDPNLLRNDVKDISVSPFTLVFQHAGLLSAAAIMNAVILTAVLSAGNSGMYASTRMLYTLACDGKAPRIFAKLSRGGVPRNALYATTVIAGLCFLTSMFGNQTVYLWLLNTSGMTGFIAWLGIAISHYRFRRGYVLQGYDVNDLPYRSGFFPLGPIFAFVLCLIITLGQNYEAFLKDTIDWGGVAATYIGIPLFLLIWFGYKLIKGTHFVRYSEMHFPERVKK

SEQ ID NO: 17291 - DNA, 1455 bp, Francisella tularensis subsp. tularensis SCHU S4
  CDS (1)..(1455): transl_table=11
atgtcgcagaaacttaaacgtggcttacatactcgtcatatgtcaatgatagctctaggtggctgtattggtactggtttatttgtagcacttggtggagcaatcgctgatgcgggtcctggaggaactgtcttggcgtatgttattatagctataatggtttatttcttgatggcgagtcttggcgaaatggctgcgcatagccctgttagtggcacattttgtgaatatgctacgcgctatgttgatccagcgttaggctttagtaccggttggagttattggtttaattgggctattacagttgctacagaggttattgccgcagcgttaattatgcagtattggtttccaggtagttcaattctgttgtggagtggatttttctttgtactagtttttgctttgaatatcttctcagtaaaaatatatggtgaagttgaatattggttatcttttataaaagtttctacagttattatatttataattgttggtttcttatcaatacttggtttagtaggtaatcaccaaagtgttggttttcagaactggcatatcggagatgctccttttcataatggttggtggggctttatatcagtattcatgattgctggattttctttccaaggtagtgagcttataggtgtaacagctggagaagcgaaagatccaaatacatctataccaaaagcaatcaaacaaacattttggcgtttatttatattttatatacttgctgtagtgattattagcttcttgattccatacaataatccatctttgataaaagctggagcaagtaatgatgtttcagttagtccatttacaatagtttttgaaaacgttggtttgaattcagcggcaactattatgaatgtaattatattaactgcgataatatctgcatgtaatgcaagtatgtatagtgcgacaagggtactatggcatttaggtaacattaagcaagccccgcagttttttgcaactactaattcaaaaggtacgccaatgattgctcttttggttacagcagttataggctcgtcattcttctttgtatcttttgttggtagtggatatatatttacatggttagtcaacgtttcaagtttagcgggatttattgcatggtttacaattgcacttagtcactatcgttttagaagggcatatataaagcagggtaaaagcttagaagatttaccatatgtagcaaagtttttcccatgggcgcctattattgctttaactatggtaagtatagtaatcgttggtcaaggtgttacaatgttgacaatggagggtagaacttggtttagtgtaataatagagtttttatcaacttatataggtttctttgcatttgtgatactatattttgtatataagtttattaaaaagacaaaattgataagactagaagattgtgatcttactagagaatcttag

SEQ ID NO: 17292 - protein, 484 aa, Francisella tularensis subsp. tularensis SCHU S4
MSQKLKRGLHTRHMSMIALGGCIGTGLFVALGGAIADAGPGGTVLAYVIIAIMVYFLMASLGEMAAHSPVSGTFCEYATRYVDPALGFSTGWSYWFNWAITVATEVIAAALIMQYWFPGSSILLWSGFFFVLVFALNIFSVKIYGEVEYWLSFIKVSTVIIFIIVGFLSILGLVGNHQSVGFQNWHIGDAPFHNGWWGFISVFMIAGFSFQGSELIGVTAGEAKDPNTSIPKAIKQTFWRLFIFYILAVVIISFLIPYNNPSLIKAGASNDVSVSPFTIVFENVGLNSAATIMNVIILTAIISACNASMYSATRVLWHLGNIKQAPQFFATTNSKGTPMIALLVTAVIGSSFFFVSFVGSGYIFTWLVNVSSLAGFIAWFTIALSHYRFRRAYIKQGKSLEDLPYVAKFFPWAPIIALTMVSIVIVGQGVTMLTMEGRTWFSVIIEFLSTYIGFFAFVILYFVYKFIKKTKLIRLEDCDLTRES

SEQ ID NO: 17293 - DNA, 1449 bp, Staphylococcus epidermidis RP62A
  CDS (1)..(1449): transl_table=11
atggaagataataatatgaaacgtggtctcaattcgagacatatatctatgatagctataggtggcgctataggtactggactttttgtggcaactggaagtgtcatttctcaagctggcccaggaggagctatattagcttatatactaattggtattatgctttattttttaatgtcatcaataggagaattagcaactttctatccggtttctggttcttttagttcatactctaccagatttgttgattcgtcacttggttttacaatgggttggttgtattggggtatgtggtcacttgtaacaagtgtagatatcattgttgcttccaatgtattacaatattgggatgtatttaaagttttaaatccacttacatggagcttaattttcttaactctgttgtttttaattaatattttttctgttaaagcttttggagaaactgagttttggttatcactgatcaaagtcattactataattgtatttattatttttggaattatgatgattttcggtattcttggtggtcatacatatggctttgagaattatactaaaggtcaagcaccttttgtcggtggaatatcaggcatattaagcgttcttttagttgcaggtttttcagttggtggtactgaagtagtcgcagtaacagctggtgaatcaaataatcccgaaaaatcaatgcctaaagctataaaacaggtattttggagaatattactcttttacgtattgtctatagctgtgatagctgccatcattccatatacggatccacttttacttaatgaaaatgagtctgtatcacaaagtccgtttacaattgttttcgatagaatagggatcgcttttgctgcatcagtcatcaacgctgttatcttaacatcattattatcagcagctaactctggtatttatacaacaagtagaatgctattttctttaagtgctgataaacaagcacctaaattctttggaaaactcaatgataaaactaaattacctatgcgtgcattaattacaacatatattattattgtattagtcattgtttatgctaattttaatgctaatgctgtatttaacttattaaatatcataggatctatggttattgtagtttggggatctagtatttggtcacaaattagattaagacaagcaattaaaaaacagggtaaaaatccagataaactgttgccatataaagcacctttttacccagtcggacctattattgtccttttcacattattattcttattattaggtagttcgtttggtagtatcgcatctggtgatattttaggtgtcattcgaaactttacaccattatttattctagctatcatctatattgctcataaattaatcaaacggacacattttgtcaaactggaagaaatagatttaactccgcataattacaagaattaa

SEQ ID NO: 17294 - protein, 482 aa, Staphylococcus epidermidis RP62A
MEDNNMKRGLNSRHISMIAIGGAIGTGLFVATGSVISQAGPGGAILAYILIGIMLYFLMSSIGELATFYPVSGSFSSYSTRFVDSSLGFTMGWLYWGMWSLVTSVDIIVASNVLQYWDVFKVLNPLTWSLIFLTLLFLINIFSVKAFGETEFWLSLIKVITIIVFIIFGIMMIFGILGGHTYGFENYTKGQAPFVGGISGILSVLLVAGFSVGGTEVVAVTAGESNNPEKSMPKAIKQVFWRILLFYVLSIAVIAAIIPYTDPLLLNENESVSQSPFTIVFDRIGIAFAASVINAVILTSLLSAANSGIYTTSRMLFSLSADKQAPKFFGKLNDKTKLPMRALITTYIIIVLVIVYANFNANAVFNLLNIIGSMVIVVWGSSIWSQIRLRQAIKKQGKNPDKLLPYKAPFYPVGPIIVLFTLLFLLLGSSFGSIASGDILGVIRNFTPLFILAIIYIAHKLIKRTHFVKLEEIDLTPHNYKN

SEQ ID NO: 17295 - DNA, 1503 bp, Staphylococcus epidermidis RP62A
  CDS (1)..(1503): transl_table=11
atgaaaaagaataataaacaaaatgacggtgttcaaagaggattaaaagatagacatatttcaatgattgccattgggggatgtataggaactggtctattcatgacttctggtggagctatacatgacgcaggtgcattgggtgctttgattgcctatgcagttattggagcgatggtgttctttctaatgacgtcgttaggggagatggcgacatatttgcctgtgtcaggttcatttagtacttatgctacacgctttgtcgatccttcactaggttttgctttaggatggaattattggttcaactgggtgataacagtagcagctgatgttactattgcagcgcaagttatacaatattggtcccctatgcaaggtataccagcttgggtctggagttgtattttccttattattattttcgcgcttaattctttatccgttagagtatatggagagagtgaatattggttcgcacttatcaaagtagttacagtcatcatatttataggaattggtatcttaactattttagggattatgggtggagaatttgtaggatttgatacgtttacaaaaggagatgggccaatactaggtgggaatttaggaggtagcttgctatcaattcttggtgtatttctagtcgcaggcttctcattccaaggaactgaacttattggtattacagcaggtgaatctgaaaatccagaaagagcagttccaaaagcgattaaacaagtattttggcgtatacttttattttacattctagctattttcattattggtatgttgattccatatgatagtaaggcattaatgggcggtggtgatagtatagctacttcaccttttacattagtatttaagaatgctggattagcttttgctgcttcatttatgaatgctgttatattaacaagtgtattatcagcaggtaactcaggaatgtatgcttcaacaagaatgttatattcgatgagtaaagataaattagcttataattcttttggaaaaacaaataaaagtggcgtaccttatgtatctctaattgcaactggagtactagtcattcttattttcgcattgcaacatttaagtggagatgcatatgaatacattgtagctgctagcggaatgactggttttattgcttgggttggtatagcaatcagtcactttagatttagacgcgcatttgataaacaaaattatgataaatcaaaattaaaatataaagcgaagttattcccatttggtccgatttttgcaggtattttatgtgtaatagttatcattggacaagatgtagattttattaaaacaggtaactttgatatgaatagattttttataacttacatgggaatacctgtattcttaattttcttcttttatcataaatttagatataaaactaaaaagattcctctaaacaaagttgacttaaggcaagatgtttcgatggaagaagtaagacaccataaaaataattaa

SEQ ID NO: 17296 - protein, 500 aa, Staphylococcus epidermidis RP62A
MKKNNKQNDGVQRGLKDRHISMIAIGGCIGTGLFMTSGGAIHDAGALGALIAYAVIGAMVFFLMTSLGEMATYLPVSGSFSTYATRFVDPSLGFALGWNYWFNWVITVAADVTIAAQVIQYWSPMQGIPAWVWSCIFLIIIFALNSLSVRVYGESEYWFALIKVVTVIIFIGIGILTILGIMGGEFVGFDTFTKGDGPILGGNLGGSLLSILGVFLVAGFSFQGTELIGITAGESENPERAVPKAIKQVFWRILLFYILAIFIIGMLIPYDSKALMGGGDSIATSPFTLVFKNAGLAFAASFMNAVILTSVLSAGNSGMYASTRMLYSMSKDKLAYNSFGKTNKSGVPYVSLIATGVLVILIFALQHLSGDAYEYIVAASGMTGFIAWVGIAISHFRFRRAFDKQNYDKSKLKYKAKLFPFGPIFAGILCVIVIIGQDVDFIKTGNFDMNRFFITYMGIPVFLIFFFYHKFRYKTKKIPLNKVDLRQDVSMEEVRHHKNN

SEQ ID NO: 17297 - DNA, 1425 bp, Xanthomonas oryzae pv. oryzae KACC10331
  CDS (1)..(1425): transl_table=11
atggagcgcccccgatcggacgcgcccatgccagaaccatcgtccaccaccgccccgcagttccggcgcagcatgcaggtgcgccatctggtgatgctgtcgctgggcggcgtgatcggtaccggcttgttcttcaataccgggtacatcattgccagcaccggcgcgctgggcacggtgctcgcatatctgatcggcgcgttggtggtgtacctggtgatgcaatgcctgggcgagttggcggtggcgatgccgcagaccggcgcattccacgtgtatgccgcgcgttatctggggccggcgaccggctacgtggttgcgtggttgtactggctgacctggacggtggcattgggctcgagcctaaccgcagcggcgttctgcatgcagtactggtttccgcatagcccggcgtggccgtggtgtctgctgttctgcgcgctgatcttcggtttgaacacggtctcggcgcgctggtttgcagaaggcgagttctggttttcgttgatcaaggtcatcaccatcctggtgttcatcgtgcttggcggtgcggcggtgatcggtctgctgccactggccgatggttcgcctgcacccgggctgcgtcatctacgtgccgatggctggtttgcgcatggaacgctgccgatcctgatgacgatggtggcagtgaattttgcattttccggcaccgagttgattggtgtggccgccggcgaaaccgagcagccagcgcgcgcgattccgctggcgatccgcacaacgctgatgcggctggtggtgttcttcgtcggcacggtgctggtgctggcagcgctgctgcctgccgaacaagcggcagtggagacgagcccgttcgtgcgcgccttcgagctgttgggcattccgtatgcggccgacctcttgaatgtggtgatcctcaccgcgatcctgtcggcggccaattccggcctgtatgcggccgcgcgcatgctgtggtcgttggccaacgaaggcacgttgccttcgggcctgacgcggttgaccggccgcggcattccgttgcgcgccgtgtcgttgagcatgttgggtggcttgctggcgctgctcacgggcgtgtatgcggccgacaccgtgttcgttgcgatctcggcggtttcggggtttgcggtggtagtggtgtggctgagcatctgcgcgtcgcactatgtgtttcgtcgccagctgctgcgcgatggcgttgcgccagagacgctggcgtaccgcgcccggtggtatccatggacaccgatcctcggcttttcgctgtgtctgctggcctgtatcgggctggcattcgatccgcagcagcgcatcgcgttgtggtgcggcgttccgttcgttgcgctgtgctacggcgcttacgcacttacccaacggcttgcggcccggagactgcacgcatga

SEQ ID NO: 17298 - protein, 474 aa, Xanthomonas oryzae pv. oryzae KACC10331
MERPRSDAPMPEPSSTTAPQFRRSMQVRHLVMLSLGGVIGTGLFFNTGYIIASTGALGTVLAYLIGALVVYLVMQCLGELAVAMPQTGAFHVYAARYLGPATGYVVAWLYWLTWTVALGSSLTAAAFCMQYWFPHSPAWPWCLLFCALIFGLNTVSARWFAEGEFWFSLIKVITILVFIVLGGAAVIGLLPLADGSPAPGLRHLRADGWFAHGTLPILMTMVAVNFAFSGTELIGVAAGETEQPARAIPLAIRTTLMRLVVFFVGTVLVLAALLPAEQAAVETSPFVRAFELLGIPYAADLLNVVILTAILSAANSGLYAAARMLWSLANEGTLPSGLTRLTGRGIPLRAVSLSMLGGLLALLTGVYAADTVFVAISAVSGFAVVVVWLSICASHYVFRRQLLRDGVAPETLAYRARWYPWTPILGFSLCLLACIGLAFDPQQRIALWCGVPFVALCYGAYALTQRLAARRLHA

SEQ ID NO: 17299 - DNA, 1437 bp, Xanthomonas campestris pv. campestris str. 8004
  CDS (1)..(1437): transl_table=11
gtgcgtggcaggatggggcgccaccgatcaggaccacgcatgtccgagccctcgtccaccgacgcaccgcagttccagcgcagcatgcaggtgcgccatctggtgatgctgtccctgggcggcgtgatcggcacgggattgttcttcaacaccggctacatcatcgccagcaccggtgcgctgggtacggtgctggcgtacctgatcggcgcgctggtggtgtatctggtgatgcaatgcctgggcgagctggcggtggcgatgccgcagaccggcgcgtttcatgtgtatgcggcgcgctatctggggcctgccaccggctacgtggtggcctggttgtactggctcacctggacggtggcgttggggtcgagcctcaccgctgccgcgttctgcatgcagtactggtttccgcacagcccggcgtggccgtggtgcctgctgttctgcgtgctgattttcagtttgaacatggtgtcggcacgctggtttgccgaaggcgaattctggttttcgctgatcaatgtagtgaccattgtggtgttcatcgtgctgggcggcgcggcggtggtcggctggctgccgctggccgacggcagcccggcgccgggagtgcgccatctgcgcgccgatggctggtttgcgcacggcaccgtgccgatcctgatgacaatggtggcggtgaatttcgctttctccgggaccgagctgatcggcatcgcagccggcgaaactgcacagcctgcacgcgcaatcccgctggcgatccgcaccacgttgatccgtctggtggtgctgttcgtcggcaccgtgctggtgctggccgcgttgctgccggcgcacgcggcggcggtggagaccagcccgttcgtgcgcgccttcgagctgctgggcattccgtatgccgcaggtctgctcaacgcggtgatccttaccgcgatcctgtcggcggccaactccgggttgtatgcggcggcccgcatgctgtggtcgttggccaacgagggcaccttgcctgcccgctttgcgcggctgacccggcgtggcatcccgctgcctgcgctggtgctgagcatgcttggcgggctgctggcgctgctgaccggtgtgtacgcggccgacaccgtgttcgtggcgatttctgcagtctccgggtttgcggtggtggtggtgtggctgagcatctgtgcctcgcactattgtttccgccgccagctgctgcgtgacggcatcgcactggacagcctggcctaccgcgcgccgtggtatccgtggacgccgctgattggtggcgcgctgtgcgtgctggcctgcgctgggctggcgtttgacccgcagcagcgcatcgcgctgtggtgcgggattccgttcgtggcgctgtgctacggcgcccatgcagtgacccaaaggcttgcagcccggagagtgcgtccatga

SEQ ID NO: 17300 - protein, 478 aa, Xanthomonas campestris pv. campestris str. 8004
MRGRMGRHRSGPRMSEPSSTDAPQFQRSMQVRHLVMLSLGGVIGTGLFFNTGYIIASTGALGTVLAYLIGALVVYLVMQCLGELAVAMPQTGAFHVYAARYLGPATGYVVAWLYWLTWTVALGSSLTAAAFCMQYWFPHSPAWPWCLLFCVLIFSLNMVSARWFAEGEFWFSLINVVTIVVFIVLGGAAVVGWLPLADGSPAPGVRHLRADGWFAHGTVPILMTMVAVNFAFSGTELIGIAAGETAQPARAIPLAIRTTLIRLVVLFVGTVLVLAALLPAHAAAVETSPFVRAFELLGIPYAAGLLNAVILTAILSAANSGLYAAARMLWSLANEGTLPARFARLTRRGIPLPALVLSMLGGLLALLTGVYAADTVFVAISAVSGFAVVVVWLSICASHYCFRRQLLRDGIALDSLAYRAPWYPWTPLIGGALCVLACAGLAFDPQQRIALWCGIPFVALCYGAHAVTQRLAARRVRP

SEQ ID NO: 17301 - DNA, 1494 bp, Staphylococcus haemolyticus JCSC1435
  CDS (1)..(1494): transl_table=11
atgaaaaaagtcgaaaatcaagatgatggaatcaaaagaggactgaaggaccgccatatttctatgatagcaatgggtggttgtatcggtaccggattatttatgacctctgggggagcaatacacgatgcaggggcattaggtgctttaattgcatatgcgattattggagctatggtattcttcctcatgacatctttaggtgaaatggcaacgtatttaccagtgcctggttcatttagtacttacgcaacacgttttgtagatccatctttaggatttgcgctaggttggaactattggtttaactgggttattacagttgcagcagatgtaaccattgctgcacaagtcattcaatattggacacctatggctggtattccagcatgggtttggagttgtatattcttagttattatattcgcactaaactctttatctgttagagtttatggtgaaagtgaatattggttcgctttaatcaaagttgtaacagtcattatctttatcattattggtcttttaacgatactaggtattatgggtggagaatttgtaggtttcgagacatttacgaaaggtgacggaccaattctaggtggtaacttaggtggaagtttattatcaattctaggcgtcttcctagttgctggattctcattccaaggtacagagttaattggtattacagctggagaatctgaaaatccagaacgcgctgtacctaaagctattaaacaagtattctggagaatattattattctacatattagcaatatttgttataggtatgttaatcccttacgatagtaatgcattgatgggtggcgatgataatattgctacttctccatttacactcgtgtttaaaaatgctgggttagcttttgcggcatcatttatgaatgcagttattttaacatcagttttatcagcaggtaattcaggtatgtatgcatcaacacgaatgttatattctatgagtaaagataaattagctttccattcatttggtaaaacgaataaatatggtgtgccatacttatctttatttgcgacagcgattttagttgttattattttcttagtgcaaaaactaagtggtgacgcatatgaatatattgttgctgcaagtggtatgacaggctttatcgcatgggtaggtattgcaattagtcactacagatttagaagagctttcgaaaaacaacatcatagtaaaagggagttgaagtataaagctaaatggttcccattcggtcctatattcgcaggcttgctctgtgtgattgtcataatcgggcaagatgttgattttattaaaacaggtcatttcgatttaaatcgcttcattatcacatatatgggaatcccagttttcttagtattctttatttatcataaattgagatataaaacgaagataattccattagataaagtagatttaagacaagatgtttcaatggatgaagtaaaacatcactaa

SEQ ID NO: 17302 - protein, 497 aa, Staphylococcus haemolyticus JCSC1435
MKKVENQDDGIKRGLKDRHISMIAMGGCIGTGLFMTSGGAIHDAGALGALIAYAIIGAMVFFLMTSLGEMATYLPVPGSFSTYATRFVDPSLGFALGWNYWFNWVITVAADVTIAAQVIQYWTPMAGIPAWVWSCIFLVIIFALNSLSVRVYGESEYWFALIKVVTVIIFIIIGLLTILGIMGGEFVGFETFTKGDGPILGGNLGGSLLSILGVFLVAGFSFQGTELIGITAGESENPERAVPKAIKQVFWRILLFYILAIFVIGMLIPYDSNALMGGDDNIATSPFTLVFKNAGLAFAASFMNAVILTSVLSAGNSGMYASTRMLYSMSKDKLAFHSFGKTNKYGVPYLSLFATAILVVIIFLVQKLSGDAYEYIVAASGMTGFIAWVGIAISHYRFRRAFEKQHHSKRELKYKAKWFPFGPIFAGLLCVIVIIGQDVDFIKTGHFDLNRFIITYMGIPVFLVFFIYHKLRYKTKIIPLDKVDLRQDVSMDEVKHH

SEQ ID NO: 17303 - DNA, 1455 bp, Staphylococcus haemolyticus JCSC1435
  CDS (1)..(1455): transl_table=11
atggaagataacaatatgaaaagaggtcttaactcaagacacatatctatgattgctataggtggcgcaattggtacggggctctttgtagcaacaggtagtgttgttgctcaagccggtcctggtggcgctatattagcttatttattaattggcataatgctttactttttaatgtcgtcaattggtgaattggcaacattttatcctgtttcaggatcgttcagttcatacgcaacgcgattcgtagacccttctctaggttttactatgggatggttatactacatcatgtgggcattagtatccagtgtagatgttatggtagcttcaaacgttttatattattgggatatatttaaattctttagtccacttacttggagtttaatctttatcacaattgtatttttattaaacatcttcacggtaaaagcttttggggaaactgaattttggttatctttagttaaagtagtaactattattatatttattattgttggtttcttgatgatcttcggtatattaggtggccatacttacggttttgaaaactatactaaaggcgaggcaccattcgtaggtggtttatctggtttcttaggcgttttactagtagccggattctcagttggtggtactgaagttgtagcagtaactgctggcgaatctgataatccagaaaaaacaatgcctaaagctgttaaacaagttttttggagaattttattattctatgtattatcaattggtgttattgcagctatcattccttatacagatccattattattaaatgaaaatgaatcagtaacacaaagccctttcacaattgtatttgacagaattggtgttgcttttgccgcttcagttattaacgctgttatattgacatcattattatctgcgacaaattcaggtgtttacaccactagtagaatgttattctctttaagtgatgaaaaacaagcaccaaagttcttaagtaagcttaatgaaaaatccaaattacctttaagagcattagttacaacatatattctaatcgttgcaattatcattattgctaatttttattcaaatgctgtatttagtttattaaacattataggttcattggtaatcattgtttgggcagctagttcatgggcacaagtgagattgcgtaaagctattaaacgtcaaggacaagatatcaatcaacttttaccttataaatcaccattgtaccctcttggaccaattttagtatttgcaactttaattttcttatactttggtaattcaattggagatttattcgatggtaatataggtaaatttttcgttaacatcttacctattattattttaggactcattttcttagctcataaattaataagaaaaacgaagttcgttaaattaaatgatatggatatcacaccacatcattatcataaagaaaattaa

SEQ ID NO: 17304 - protein, 484 aa, Staphylococcus haemolyticus JCSC1435
MEDNNMKRGLNSRHISMIAIGGAIGTGLFVATGSVVAQAGPGGAILAYLLIGIMLYFLMSSIGELATFYPVSGSFSSYATRFVDPSLGFTMGWLYYIMWALVSSVDVMVASNVLYYWDIFKFFSPLTWSLIFITIVFLLNIFTVKAFGETEFWLSLVKVVTIIIFIIVGFLMIFGILGGHTYGFENYTKGEAPFVGGLSGFLGVLLVAGFSVGGTEVVAVTAGESDNPEKTMPKAVKQVFWRILLFYVLSIGVIAAIIPYTDPLLLNENESVTQSPFTIVFDRIGVAFAASVINAVILTSLLSATNSGVYTTSRMLFSLSDEKQAPKFLSKLNEKSKLPLRALVTTYILIVAIIIIANFYSNAVFSLLNIIGSLVIIVWAASSWAQVRLRKAIKRQGQDINQLLPYKSPLYPLGPILVFATLIFLYFGNSIGDLFDGNIGKFFVNILPIIILGLIFLAHKLIRKTKFVKLNDMDITPHHYHKEN

SEQ ID NO: 17305 - DNA, 1404 bp, Pseudomonas fluorescens Pf-5
  CDS (1)..(1404): transl_table=11
atgacaaccaccacagaacgtaaaggcatccacctgacccgctccttgaagagccggcacattttcatgctgtccctgggaggcgtgatcggcaccgggctgttcatgggctccggggtcaccatcaaccagggcggcccttggggggcgatcctctcttacctgggggccgggttcctgatgtacctggtgatggtctgcctcggcgagctgtcggtgcagatgccggtgtccggctcgttccaggcccacgccaccaaatacattggcccggccaccggcttcatgatcggctgggtctactggatgagctgggccaccaccgtgggcctggaattcaccgccgccggcatgctgatgcaacgctggttccctggcgtgccgatctggtactggtcggcgctgttcgtggccttgctgttcggcatcaacgccctggccacccgcgcctttggcgaggccgaatactggttcgccggggtcaaggtgctggcgatcctgagctttatcgtggtgggcgcgctggtgatcttcggcgtcatcgacctgcccagcggcgccccggcgccgatgttcgacaacctcaagggcgactccctgttccccaacggcctgccggcggtgttcgcggtgatgatgaccgtggtctacgccttccagggctgcgagatcatgggcgtggctgccggtgaaaccgaccagccggaaaaaagcatcccccgcgccgtacgcaacgtggtgtttcgcgtgctgatcttctacgtgctggcagtgatggtgctggcggcgatcattccctggcagcaggccgggctggtggaaagccccttcgtccaggtgttcgacatggtgggcattccctacgccgccgacctgatgaacttcgtgatcctcacggcgatcctctcggtgggcaactccgggctgtatgcctccacgcgcatcctctgggccatgtccaaatccgggatggcgcccaaggccctgtcgcccctgagcaaacaaggcgtccccctgcgcgccctgttcatcactctgtgttttgccctgatctcgctgatgaccagcttcatcgccgccgacaccctgttcatggtgctgatggcggtgagcggcatggccggcaccgtgacctggatcgtcattgccctggcccagtaccgcttccgtcgccagttcctgcgcgagggcgggcaactggagcagctcaagtaccgcgcgccctggttccccctggtgccgctgctgtgcatcgtcctgtgcagttcgctgttcgtgttcctggccctggatgaaacccagcgtccgtcgctgtactgggggtcgggctttatcgccctgtgctatggcgcttactacctgatgcaacgcaaacgccaattgcaacctgcagccgctgtgtag

SEQ ID NO: 17306 - protein, 467 aa, Pseudomonas fluorescens Pf-5
MTTTTERKGIHLTRSLKSRHIFMLSLGGVIGTGLFMGSGVTINQGGPWGAILSYLGAGFLMYLVMVCLGELSVQMPVSGSFQAHATKYIGPATGFMIGWVYWMSWATTVGLEFTAAGMLMQRWFPGVPIWYWSALFVALLFGINALATRAFGEAEYWFAGVKVLAILSFIVVGALVIFGVIDLPSGAPAPMFDNLKGDSLFPNGLPAVFAVMMTVVYAFQGCEIMGVAAGETDQPEKSIPRAVRNVVFRVLIFYVLAVMVLAAIIPWQQAGLVESPFVQVFDMVGIPYAADLMNFVILTAILSVGNSGLYASTRILWAMSKSGMAPKALSPLSKQGVPLRALFITLCFALISLMTSFIAADTLFMVLMAVSGMAGTVTWIVIALAQYRFRRQFLREGGQLEQLKYRAPWFPLVPLLCIVLCSSLFVFLALDETQRPSLYWGSGFIALCYGAYYLMQRKRQLQPAAAV

SEQ ID NO: 17307 - DNA, 1437 bp, Pseudomonas fluorescens Pf-5
  CDS (1)..(1437): transl_table=11
atgtccctacaagaacaacagaccgacttgcgcggcggcttcaagcaagaaatgcagacccggcacattgtcatgctcgccctgggcggggtgataggcaccgggctgttcctcacgtccggctacacggtgaaccaggccggcccgctgggcgcggtgatcgcctacatcatcggcgcgctgatggtgtacctggtgatgatgtgcctcggcgagctggcggtgcagatgcccgagaccggctccttcagcacctacgccacgcgctttctcggccccggtaccggctacaccgtggcctggctgtactggctgacctggaccgtggccatcggctcggaattcaccgccgccgggatcctcatggcccgctggttccccgagaccccggtgtggatctggagcgcgctgttcgccatggtggtgttcttgtccaacgtggtgtcggtgcggctgttcgccgagaccgagttctggctgtcgctggtcaaggtgatcaccgtgctggcattcctggtggtgggcggcggggcgattctcggtcttctgcacatcgaccaggcccacagcatcggcctgagcaacttcacccgtgaggggctattccccaccggcttcatgccgatcgccatgaccctactggcggtggccttcgctttctccggcaccgaactgatcggcatcgccgctggcgaaacccgtgacccgcaacgcaatgtgccacgggcgatccgcaccacggtgctgcgcctggcgatcttcttcgtcggcaccatcttcgtcctcgccaccctgttgccccgggagcaggccggcctggtggaaagcccgttcgtcacggtgttcacctacatcggcattccgtactcggccgacatcatgaacttcgtgatcatcagcgcgttgctgtccgccgccaactccgggctgtacgccgcctcgcggatgctctggaccctgagcgaccagggccacctgcccaagcagttctcggccctgacccgcatgggcacgccgctcaacgcgatcatcgtgagcatggccggtggcgccgcctcgctgctcagcagcgtgttcgccccggacaccatctacctggccctggtgtcgatttccgggctggcggtggtggtggtgtggatgagcatcgccgccagccagatcgcctttcgccggcacttcgtggccaacggcggtgacgtgcgcgacttgaaattccgtgttcgtggctacccctgggtgccgttgggggcgctgttgtgctgcgccctggcctgtgtcggcattggtttcgaccccgagcagcgcgtggccctgtacttcggcctgcccttcatcgcctggtgctacctggtgtattacattacccgcagtagccgccagcggcgcctgtccctggcagccctggctcggccctccgatgccctgcagggttga

SEQ ID NO: 17308 - protein, 478 aa, Pseudomonas fluorescens Pf-5
MSLQEQQTDLRGGFKQEMQTRHIVMLALGGVIGTGLFLTSGYTVNQAGPLGAVIAYIIGALMVYLVMMCLGELAVQMPETGSFSTYATRFLGPGTGYTVAWLYWLTWTVAIGSEFTAAGILMARWFPETPVWIWSALFAMVVFLSNVVSVRLFAETEFWLSLVKVITVLAFLVVGGGAILGLLHIDQAHSIGLSNFTREGLFPTGFMPIAMTLLAVAFAFSGTELIGIAAGETRDPQRNVPRAIRTTVLRLAIFFVGTIFVLATLLPREQAGLVESPFVTVFTYIGIPYSADIMNFVIISALLSAANSGLYAASRMLWTLSDQGHLPKQFSALTRMGTPLNAIIVSMAGGAASLLSSVFAPDTIYLALVSISGLAVVVVWMSIAASQIAFRRHFVANGGDVRDLKFRVRGYPWVPLGALLCCALACVGIGFDPEQRVALYFGLPFIAWCYLVYYITRSSRQRRLSLAALARPSDALQG

SEQ ID NO: 17309 - DNA, 1521 bp, Ralstonia eutropha JMP134
  CDS (1)..(1521): transl_table=11
atgtcttcccactcccatcctcatcctcaccagcatccggtcgtcgagcacgacgaccttcagcgcaagctcaaggcgcgccatctcaccatgatcgcaatcggcggcgcggttggcacggggttgttcgtcgcatccggcgcctccatcgcacaggctggtcccggcggcgcgcttctgatgtacgccctgcttggcttcatggtgtattgcctgatgaccagccttggcgaactggccgtccacatgcccgtggctggctcgttcgtcacctacagcgcgctctatgtcgaggaaggtttcggctttgcgctcggctggaattactggttcagcctggccgtgaccatcgcggtggaactcaccgccgcgcaactggtgatgcagttctggttccccggcatgcccggcatggtctggagcgcgggcttcctgctgctgatgttcgcgctcaacgcgttctcggtgcgcggcttcggcgaagccgagtactggttcgcgctgatcaaggtgatcacggtgatcgtgttcctgggcgtggggctgctgatgatcttcggcatcatgaagggcggcccgcaatccggctggcacaacttcacgaccggcgacgcgccgttcgtcggcggcatccctgccatgatcggcgtggcgatgatcgccgggttttcgttccaaggcaccgagaccgtgggcgtagctgccggcgaagcgcaggatccggccagaacgatcccgcgcgcgatccgccagaccttctggcgcatcctgctgttctacgtgatcgcgatcctgatcatcggcgtgctgattccctataccgatccgaacctgctgcgcaatgatgtgaccgacgtcggcgtgagcccgttcgccctggtgttccgccaggccgggctggcctttgccgccggcctgatgaacgccgtagtgctgaccgcgctgctgtcggcgggcacgtcgagcatgtacgtctccacgcgtattctctacggcctggctgtgagcggacgcgccccgcgctggctgggcaagctgaccgtgaacggcgtaccgttcaatgcgctgctggtcaccaccgccgtcggcgcgctgtgcttcttcagttcgctgttcggcgacaaggccgtgtacctgtggctgctgaacacatcggccatgacgggcttcttcgcatggttcggtatcgccctgagccactaccgcttccggcgcggactggtctatcaaggctatgacatcaacgcgctggcgtaccgctcgccgctctatccgttcggcccaatctttgcgggcgtgctgtgcctggtgatcgtggcgggacagaactaccaggcattcgcggacattccgaaccgctggccggaaatcattgcgacgtacatcggggtgccggtgttcctggcgctgtggctggggtaccgcatcgtcaggaagacgcggctgatcgactatgaggatatgccgttcgagttgccgaagacggcaaaagtcattgccgggcaagcggcacaagtgtga

SEQ ID NO: 17310 - protein, 506 aa, Ralstonia eutropha JMP134
MSSHSHPHPHQHPVVEHDDLQRKLKARHLTMIAIGGAVGTGLFVASGASIAQAGPGGALLMYALLGFMVYCLMTSLGELAVHMPVAGSFVTYSALYVEEGFGFALGWNYWFSLAVTIAVELTAAQLVMQFWFPGMPGMVWSAGFLLLMFALNAFSVRGFGEAEYWFALIKVITVIVFLGVGLLMIFGIMKGGPQSGWHNFTTGDAPFVGGIPAMIGVAMIAGFSFQGTETVGVAAGEAQDPARTIPRAIRQTFWRILLFYVIAILIIGVLIPYTDPNLLRNDVTDVGVSPFALVFRQAGLAFAAGLMNAVVLTALLSAGTSSMYVSTRILYGLAVSGRAPRWLGKLTVNGVPFNALLVTTAVGALCFFSSLFGDKAVYLWLLNTSAMTGFFAWFGIALSHYRFRRGLVYQGYDINALAYRSPLYPFGPIFAGVLCLVIVAGQNYQAFADIPNRWPEIIATYIGVPVFLALWLGYRIVRKTRLIDYEDMPFELPKTAKVIAGQAAQV

SEQ ID NO: 17311 - DNA, 1491 bp, Staphylococcus saprophyticus subsp. saprophyticus ATCC 15305
  CDS (1)..(1491): transl_table=11
atggcaaatcaagaaaatcaaaacactgggattaaaagagggttgaaagaccgtcatatttccatgattgctattgggggttgtattggaacaggactattcatgacttccggtggtgcgatccacgatgctggtgcacttggtgcgcttttagcatatgcaatcattggagcaatggtcttctttcttatgacttcattaggagagatggcgacgtatttacctgtatctggatcgtttagtacatatgctacacgctttgtagatccttcattaggatttgcattgggatggaactactggtttaactgggtaattactgttgctgccgatgttacaatagctgcgcaagttattcaatattggacgccgttatctggtattccggcttggagttggagttgtctctttttaattattatttttggacttaatgcattatctgtacgagtttatggcgaaagtgaatattggttcgcgttaattaaagtagttactgtaattattttcattgcaattggtctattaacgattctaggtattatgggaggcgaatttgtaggctttgatacatttactaaaggcggtggacctattttaggtgacggtcttggaggtagtttacttactattttaggtgtgttcttagtggcaggtttctcattccaaggtacagaattgattggtattactgctggtgaatctgaaaatccagaacgcgcagttccaaaagcaattaaacaagtattttggagaatattaatcttttatatacttgctatatttgtaatcggtatgctaataccttacgatagttcagcgttaatgggcggcggagatgatatttctacttcaccatttacattagtattccaaaatgcaggcttagcatttgctgcgtcattcatgaatgcagtcattttaacttcagtgctttctgcaggtaactcaggtatgtatgcttcaactagaatgctttattcaatgagtaaagataaactggcataccctatatttggtaaaacaaataaaagcggtgttccttatgtatctttaatcgttacagcaatcatagttataggcatatttatattgcaacacttgagtggtgatgcatatgaatatatcgtagctgcgagtggtatgactggtttcatcgcatgggtaggtatagctgtgagtcattatagatttagaaaagcatttgataaacaagattatgataagtctaaattgaaatataaagcgaaattattcccatttggacctatatttgctggtatcttgtgtgtattagttattattggacaagatgtagattttattaaaacaggtgactttgaccttaacaggtttgttatcacttatatgggaattccagtattcttggcgttcttcatttatcataaagtgagatataaaacgaaaatggttccattggaaaaagtgaacttacgacaagatgttgatatggaagaaattaataaataa

SEQ ID NO: 17312 - protein, 496 aa, Staphylococcus saprophyticus subsp. saprophyticus ATCC 15305
MANQENQNTGIKRGLKDRHISMIAIGGCIGTGLFMTSGGAIHDAGALGALLAYAIIGAMVFFLMTSLGEMATYLPVSGSFSTYATRFVDPSLGFALGWNYWFNWVITVAADVTIAAQVIQYWTPLSGIPAWSWSCLFLIIIFGLNALSVRVYGESEYWFALIKVVTVIIFIAIGLLTILGIMGGEFVGFDTFTKGGGPILGDGLGGSLLTILGVFLVAGFSFQGTELIGITAGESENPERAVPKAIKQVFWRILIFYILAIFVIGMLIPYDSSALMGGGDDISTSPFTLVFQNAGLAFAASFMNAVILTSVLSAGNSGMYASTRMLYSMSKDKLAYPIFGKTNKSGVPYVSLIVTAIIVIGIFILQHLSGDAYEYIVAASGMTGFIAWVGIAVSHYRFRKAFDKQDYDKSKLKYKAKLFPFGPIFAGILCVLVIIGQDVDFIKTGDFDLNRFVITYMGIPVFLAFFIYHKVRYKTKMVPLEKVNLRQDVDMEEINK

SEQ ID NO: 17313 - DNA, 1446 bp, Staphylococcus saprophyticus subsp. saprophyticus ATCC 15305
  CDS (1)..(1446): transl_table=11
atggcacaaaacaatatgaatcgcggtctaaattctcgtcatatttcaatgattgcaattggtggtgccattggtactggactttttgttgcaactgggaatgtcatttctcaagcaggacctggtggcgctatattagcttatttaattattggaattatgttgtatttcttaatgtcatcaatcggggagctagcaactttctatcctgtttctggatcgtttagttcttattctacaaggtttgtagataaatcattaggatttaccatggggtggctatattgggcaatatggctacttgtaacgagcgttgatattattatttcttcaagtgtactttattactgggatacttttcaatttttcagtcctgtcacatggagcattatattcttatgcttactgttcttattaaatatattttctgttaaagcattcggtgaaacagaattttggttatctctcatcaaagttgtaaccatcatcgtgtttattctcattggtgtattaacgattgtaggaatattaggtgggaaaacttatggattatcgaattacacaactggtgaggcaccatttgttggtggtatttcaggttttctaggcgtcctcttggtagcaggcttttcagttggaggtacggaagtcgttgctgttactgcaggcgaatcttctaaccctgatcgctcaatgccaaaagctatcagacaagttttctggagaattttactcttttatgtattatcaatcgcagttatatcagcaattatcccttatacagacccaatgttattgaataaaaacgaatcggtttctcaaagcccttttaccattgtgtttgatcgtgttggcattgcatttgcagcttcagtaataaatgcagttattttaacttctttattatcagcagctaattctgggatttatactacaagtagaatgttattctctatggcagaagatagacaagcacctaagttcttatctaaattaaacaagactacaaaattaccaatgactgcattaattgctacatttgtaattgtattgttcatcataatactagcgcaattcaaatcagatatagtgttctcgttattaaatattataggatcactcgttattgtgatttgggcgtctagtatcttatcacaaattaggttacgctctgctattaagaaacaaaataaagatccaaatgaagtgttgccttacaaagcaccgttttatccatttggaccaattattgtcattatagcgttattattcttatttgttggtaactcgttagatgctgctttatctggagattttgccgcactatttagaaatttagcacctatgattattttatttgtaatttatatcgttcacaaatttattaagaaaactaaaatcgtcaaactcagtgagatggatttgaagagacacgattataattaa

SEQ ID NO: 17314 - protein, 481 aa, Staphylococcus saprophyticus subsp. saprophyticus ATCC 15305
MAQNNMNRGLNSRHISMIAIGGAIGTGLFVATGNVISQAGPGGAILAYLIIGIMLYFLMSSIGELATFYPVSGSFSSYSTRFVDKSLGFTMGWLYWAIWLLVTSVDIIISSSVLYYWDTFQFFSPVTWSIIFLCLLFLLNIFSVKAFGETEFWLSLIKVVTIIVFILIGVLTIVGILGGKTYGLSNYTTGEAPFVGGISGFLGVLLVAGFSVGGTEVVAVTAGESSNPDRSMPKAIRQVFWRILLFYVLSIAVISAIIPYTDPMLLNKNESVSQSPFTIVFDRVGIAFAASVINAVILTSLLSAANSGIYTTSRMLFSMAEDRQAPKFLSKLNKTTKLPMTALIATFVIVLFIIILAQFKSDIVFSLLNIIGSLVIVIWASSILSQIRLRSAIKKQNKDPNEVLPYKAPFYPFGPIIVIIALLFLFVGNSLDAALSGDFAALFRNLAPMIILFVIYIVHKFIKKTKIVKLSEMDLKRHDYN

SEQ ID NO: 17315 - DNA, 1413 bp, Pseudomonas aeruginosa UCBPP-PA14
  CDS (1)..(1413)
atggctgacggcaaggaaaggctgcaactcacccgggccctggcgagccgccacatcttcatgctgtccctcggcggggtgatcggcaccgggctgttcatgggctccggcgtgaccatcaaccagggcggcccggccggcgcggtgctggcctacctggtggccggggtgctgatgtacctggtgatggtctgcctcggcgagctgtcggtgcagatgccggtctccggttcgttccaggcccacgcgacgcgtttcatcggcccggcgaccggcttcatgatcggctgggtctactggatgagctgggcctccacggtaggcctggaattcaccgcggccgggatgctcatgacccgctggttcccggaggtgcccgtgtggctatggtcgggtttcttcgtggtcgtgctgttctccctcaatgccctggcgacccgcgccttcggcgaggccgagtactggttcgccgggatcaaggtggcggcgatcctggtgttcatcgtggtcggggggctggtgatcttcggcggtatcgaactgaagagcggtgcgccggcgccgatgttctccaacctggtcggcgagcggctgttccccaacgggctgtcggcggtgttcgcggtgatgatgacggtggtctatgccttccagggttgcgagatcatgggcgtcgccgccggcgagaccgagcgaccggagaagagcatcccgcgggcggtgcgcaacgtggtgttccgcgtgctgatcttctacgtgctggccatcgttgtgctttccgccatcattccctggcaacaggccgggctggtggaaagcccgttcgtgcaggtgttcgacatggtcgggattccctacgcggcggacctgatgaacttcgtcatcctcaccgccatcctctcggtaggcaactcgggcctgtacgcctcgacgcggatcctctgggcgatgtccaggaccggcatggccccgcgcggcctgtcgaagctcagcgcgcgcggcgtgccgctctacgcgttgctgatcaccctgtgcttcgccctgctctcgttgctgaccagcgtgatcgccgccgacaccctgttcatggtgctgatggcggtgagcgggatgtccggcaccgtcacctggatcgtcatcgcctacgcccaataccgcttccgccgcgagcacatggccagcggcggcacggtcgccgagctgaaatatgccgcgccgctgttcccgctggtgccgctggcctgcatcgccgtgtgctgctcgctgttcgtcttcctcgccctcgatcccacccagcggccgtccttgtactggggcttcggcttcatcgccgcctgctacctggcctattacgtggttcgtcgccggcagccgcagggactgggcgaccccgccctgggacgggccggctga

SEQ ID NO: 17316 - protein, 470 aa, Pseudomonas aeruginosa UCBPP-PA14
MADGKERLQLTRALASRHIFMLSLGGVIGTGLFMGSGVTINQGGPAGAVLAYLVAGVLMYLVMVCLGELSVQMPVSGSFQAHATRFIGPATGFMIGWVYWMSWASTVGLEFTAAGMLMTRWFPEVPVWLWSGFFVVVLFSLNALATRAFGEAEYWFAGIKVAAILVFIVVGGLVIFGGIELKSGAPAPMFSNLVGERLFPNGLSAVFAVMMTVVYAFQGCEIMGVAAGETERPEKSIPRAVRNVVFRVLIFYVLAIVVLSAIIPWQQAGLVESPFVQVFDMVGIPYAADLMNFVILTAILSVGNSGLYASTRILWAMSRTGMAPRGLSKLSARGVPLYALLITLCFALLSLLTSVIAADTLFMVLMAVSGMSGTVTWIVIAYAQYRFRREHMASGGTVAELKYAAPLFPLVPLACIAVCCSLFVFLALDPTQRPSLYWGFGFIAACYLAYYVVRRRQPQGLGDPALGRAG

SEQ ID NO: 17317 - DNA, 1422 bp, Bacillus cereus G9241
  CDS (1)..(1422): transl_table=11
atgatggatcaaaaccaaggattaaaaagggaattgaaaagcagacacatatttatgattgcacttggaggagttattggtaccggactttttttaggatcggggtatacaattcatgaagctgggcctggaggagcgattgtagcgtatcttgttggaggatttgttatgtatttaacgatgctctgtctcggagaattagctgttgcgatgcctgacgcaggatcttatcaaacgtatgctacgaagcatatttcccctgcagcgggttatgtagtcggatggatgtcgtggctaaattggtcggctacaataggtattgaactaattgcagttagtattttaatgaaacgatggtttcctgatgtaccgtcttggatttggtgcgtagtgtttgcggcattactttttgctattaacgcgttatcttcaagaagttttgcagaagttgaattttggtttgcaagtattaaagtcattacaatcattgcatttattattttgggcggggcagcaatgtttggttttctagatatgaaaggaaatgaaccagcaccaatgttttctagctttactgattatggtgggttgtttccaaatggattatccgctattttaattacgatgattgctgttaatttttccttccaaggaacagagctggttggtattgcagctggggagagtgaaaatccagaaaaaacaatcccgaaggcaattaataatacagtttggcgtatacttgtgttctttgtattatctattttcattcttgcaggattattcccatggcaacaagcaggagtgatagaaagtccattcgtagttgtatttgataaaattggtattccttatgcagccgatattatcaatttcgttattattacagcagtactatccgttgcgaattcaggattatatgcaacttctcgtatgctatggtctatgtccaatcaaggaatgattagtccgatttttggtaagttatctaaaaatggtgttcctatttatgcgttgattgtaagtacaattgtaggttgtctttcattactatcaggtatttatgcggaagatacagtttatttatggctactttctattgccgggttcggagcgatattagtttgggcatctattgctctatctaacttattagctagaaggtcatatataaagcagggcggggatgtgaaagacttgaaatttaaaacaccgctgtatccgttcgtaccactgcttgcgttagtattaaatgtaacggtaattgttggtatggcctttattccagaacaaagaatggcattgtattgtggtattccctttatgattgtttgtttactgttttaccgtgcgacaagaaataaggggagtaacttagagcatattgaaaagacaaagacaacagaaatagagagtttataa

SEQ ID NO: 17318 - protein, 473 aa, Bacillus cereus G9241
MMDQNQGLKRELKSRHIFMIALGGVIGTGLFLGSGYTIHEAGPGGAIVAYLVGGFVMYLTMLCLGELAVAMPDAGSYQTYATKHISPAAGYVVGWMSWLNWSATIGIELIAVSILMKRWFPDVPSWIWCVVFAALLFAINALSSRSFAEVEFWFASIKVITIIAFIILGGAAMFGFLDMKGNEPAPMFSSFTDYGGLFPNGLSAILITMIAVNFSFQGTELVGIAAGESENPEKTIPKAINNTVWRILVFFVLSIFILAGLFPWQQAGVIESPFVVVFDKIGIPYAADIINFVIITAVLSVANSGLYATSRMLWSMSNQGMISPIFGKLSKNGVPIYALIVSTIVGCLSLLSGIYAEDTVYLWLLSIAGFGAILVWASIALSNLLARRSYIKQGGDVKDLKFKTPLYPFVPLLALVLNVTVIVGMAFIPEQRMALYCGIPFMIVCLLFYRATRNKGSNLEHIEKTKTTEIESL

SEQ ID NO: 17319 - DNA, 1362 bp, Bacillus cereus G9241
  CDS (1)..(1362): transl_table=11
atgattgcactcggtggtgtgattggaacggggttatttaacggatctggctttattataagtcaagctggacctggtggatccgtacttgcctttatggccggtggattattaatgtatttcgttatgctatgtcttggtgagctcgctgtagccatgcctgtttcaggctctttccaggaatatgccactaagtttattaatcctgcaactggctttacaatcggatggttgtattggttaagctgggcgaatacaaccggccttgaatttacaactgccggcattacaatgcagcgctggtttcctgatattcctgtttgggtttggtgtttaatatttggcgttacaatcttcacgattaacgcattatctgctcgtagttatgcagaaacagaattttggttttcaagtataaaagtatctgccattatcgcttttattattcttggcggcgccgctatgttcggttttattgatttaaaaggcgacgaaccagctccgctattatcaaatttcgtgaatcatggtggtttattcccaaatggacttgcagctatcctattaacaatggttacagtcaattattccttccagggtacagaacttgtcggaatcgctgcaggtgaaagtgaagatccagcaaaaactttacctcgttctattagaaatattatatggcgtacgatgtttttcttcgtcttagcaatctttgttcttgttgctttaattccttgggaagaagcaggattaacaaaaagcccgttcgttgccgtttttgataatatcggtattccatatgccgctgatattatgaactttgttattcttactgctgttctttctgtcgcaaactcaggtctatacgcggcaactcgcatgctttggtcattatccaaaaatgaaatggctccagcctttttaaagaaattatcatcacgaggaatacctttaaacgctttaattatgacgatagctatttctgctttttcccttttgacaagcgttgtagctgctgaaacagtttacttatggttaatttctatttctggcgtcataacaatcatcgtttggatgtcaatttgtgtctctcaattctttttccgtaaacattatttagcagatggtggaagattagaagacttaaaatttaaaactccactttatccacttgtaccaattcttggttttggattgtatgacattatactaatcagtcttatctttatccctgaacaacgacttggaatctattgcactgtaccatttatcatcttttgctacacttactatcactttaaagttaagaaaagaatttctactaacactcaaagtgaaactaaaattagcgagacgatgtaa

SEQ ID NO: 17320 - protein, 453 aa, Bacillus cereus G9241
MIALGGVIGTGLFNGSGFIISQAGPGGSVLAFMAGGLLMYFVMLCLGELAVAMPVSGSFQEYATKFINPATGFTIGWLYWLSWANTTGLEFTTAGITMQRWFPDIPVWVWCLIFGVTIFTINALSARSYAETEFWFSSIKVSAIIAFIILGGAAMFGFIDLKGDEPAPLLSNFVNHGGLFPNGLAAILLTMVTVNYSFQGTELVGIAAGESEDPAKTLPRSIRNIIWRTMFFFVLAIFVLVALIPWEEAGLTKSPFVAVFDNIGIPYAADIMNFVILTAVLSVANSGLYAATRMLWSLSKNEMAPAFLKKLSSRGIPLNALIMTIAISAFSLLTSVVAAETVYLWLISISGVITIIVWMSICVSQFFFRKHYLADGGRLEDLKFKTPLYPLVPILGFGLYDIILISLIFIPEQRLGIYCTVPFIIFCYTYYHFKVKKRISTNTQSETKISETM

SEQ ID NO: 17321 - DNA, 1416 bp, Bacillus cereus G9241
  CDS (1)..(1416): transl_table=11
atgaatcaacaagtagaacaaacagatttaaaacgtacaatgaaaagtagacacctatttatgattgcacttggtggtgttatcggaactggcctatttatgggatctggtcaaatcgtccataacgccggccctggtggtgctattcttgcatttttagtcggtggatttgttatgtatttaacgatgttatgtcttggtgaattatccgtagctatgccagaagcaggttcattccaaagctatgcaagcaaatttatttcacctggttttggttttgttgtcggttggatgtattggttaaattgggctgttacagttggagtagagttaacaactgtaagtattttaatgaaacgatggtttccagacgtttcttcgtggatttggtgtgttacatttgcggcagcactctttcttgtaaacgctttatcagcaaaagcatatgcagaagcagaattttggttcgcaagtgtaaaagtcgcaactattgttgttttcatcgtactcggtggtgcagttatgttcggtctactagactttaacggaaaaccagctccaatgcttcacaatttcactgaaaatggcggcctatttccaaatggtgcattagctgttcttcttacgatgattacagtaaattactccttccaaggaacagaattaatcggaattgcttcaggagaaagtgaaaatcctgaaaaaacaattcctaaagcaatcaaaaataccatttggcgcacactattcttcttcgtcctagcaatatcagttgttgtaggtttactcccgtggcaagaggctaatctagtcgaaagtccatttgtacttgtatttgatgtagctggtgttccatatgcagcagacattatgaactttgttattattacagctgtattatccgtagccaattctggtctatacgcaaattcgcgtatgctttgggcgatggcaaaacagggaatggcaagtccagcatttacgaaattaactaaaaaaggtgtaccactaaacgcattgattttcagtctaatctttgcaagtctatccctattaacaagtgtatttgcagcagatactgtctttttagttttaacatctatcgcagcaatggctgctgttgtcgtttggatgtcaattgcggcttcacagtttttcttccgtagaaacttcgtgaaaaacggtggtgacataaatgatttaaaatatcgcacaccactttatccgctcgttccaatcgtagcgttctcactcaatttcattacatttgttagtttagctttcattccagatcagagaattgctctttattgcggcattccatttatggtcatttgttacattttatatcaagtgaaatataaaaaaattgtcacatttgaacaacaacagactattccacaagaaataaactaa

SEQ ID NO: 17322 - protein, 471 aa, Bacillus cereus G9241
MNQQVEQTDLKRTMKSRHLFMIALGGVIGTGLFMGSGQIVHNAGPGGAILAFLVGGFVMYLTMLCLGELSVAMPEAGSFQSYASKFISPGFGFVVGWMYWLNWAVTVGVELTTVSILMKRWFPDVSSWIWCVTFAAALFLVNALSAKAYAEAEFWFASVKVATIVVFIVLGGAVMFGLLDFNGKPAPMLHNFTENGGLFPNGALAVLLTMITVNYSFQGTELIGIASGESENPEKTIPKAIKNTIWRTLFFFVLAISVVVGLLPWQEANLVESPFVLVFDVAGVPYAADIMNFVIITAVLSVANSGLYANSRMLWAMAKQGMASPAFTKLTKKGVPLNALIFSLIFASLSLLTSVFAADTVFLVLTSIAAMAAVVVWMSIAASQFFFRRNFVKNGGDINDLKYRTPLYPLVPIVAFSLNFITFVSLAFIPDQRIALYCGIPFMVICYILYQVKYKKIVTFEQQQTIPQEIN

SEQ ID NO: 17323 - DNA, 1458 bp, Arthrobacter sp. FB24
  CDS (1)..(1458): transl_table=11
atggaactttcctccacaacccgcttggatccgcaggcttctttaccgcctgaatcggaacccgctgcgccagagcgcggtccggcgccggggctccagcgatccatgggcccgcggcacctggtgatgatcgccatgggcggcgtcatcgggtcgggccttttcctcagttcgggctacacgatctcccaggccggcccgctgggcgcggttctggcgtatctcgtgggcgccttcgtcgtttacctcgtcatggcctgcctcggggaactggccatcgcctacccggtctcgggcgcgttccacatctacgcggccagatccatcggtcccgccaccggtttcaccacagcgtggctttactggctgtgctgggccgtggcgctgggatccgagttcaccgcggccggcctgctcatgcagcggtggttcccgggaattgaggtgtgggtctggtgcgtcgttttcgcgtccatcctgtttgccctgaacgccgtctcttcgcggttcttcggcgaatccgagttctggttctccatcatcaaggtgggcgccatcgtggtcctgattgcctttggcagcgccgcactggtcggcttccacccgctggccggcggctcccacccgttcctgctcgaaaacttcaacacgtcgggcggactattccccaacggcttttccggcgtcctggtgactgccctggcggtcttctacgcgttctccggttcggaactcatcggcgtcgcagcgggcgaaacggccaaccccgagacaagcattcccaaagcaatgcggaccacggtgttccgcctgctcatcttctttgtaggcgccatcgcagtcatcgccgccaccatcccctttgaccaggtaggcctggacgagagccccttcgtcaccgtcttttcctccatcggcatcccctatgccgcggacatcatgaacttcgtcatcatcaccgcgctgctctccgccggaaacagcggcttgttctcctgcgcaaggatgctcttttccctgtccgaggaagggcacgcgccgaaggcattccggaagctcaccaaacgcgggattcccctcatcgccctctgcgtcagcatggtcggcgggctggcttcgctcatcagcagcgtggtcgctccggaatcggtctatctcgcgctggtttctgtcgccgggttcgctgttgtgggggtatggatgtccatcacggcgtcgcacttcttccacaggcgggccttcgttcggaacggcggaaacgtcgacgacctcgcctacaaggcgccgctgttcccggtggttccgatccttgccttcgcgctgtgcctcatctcgctgatcggcatcgctttcgacccgaaccaggtcgcagccctgtacttcggcattccgtttgtgggtgcctgctacgccttcttctactacaagtacggacggcggcagcagctcgccaagtag

SEQ ID NO: 17324 - protein, 485 aa, Arthrobacter sp. FB24
MELSSTTRLDPQASLPPESEPAAPERGPAPGLQRSMGPRHLVMIAMGGVIGSGLFLSSGYTISQAGPLGAVLAYLVGAFVVYLVMACLGELAIAYPVSGAFHIYAARSIGPATGFTTAWLYWLCWAVALGSEFTAAGLLMQRWFPGIEVWVWCVVFASILFALNAVSSRFFGESEFWFSIIKVGAIVVLIAFGSAALVGFHPLAGGSHPFLLENFNTSGGLFPNGFSGVLVTALAVFYAFSGSELIGVAAGETANPETSIPKAMRTTVFRLLIFFVGAIAVIAATIPFDQVGLDESPFVTVFSSIGIPYAADIMNFVIITALLSAGNSGLFSCARMLFSLSEEGHAPKAFRKLTKRGIPLIALCVSMVGGLASLISSVVAPESVYLALVSVAGFAVVGVWMSITASHFFHRRAFVRNGGNVDDLAYKAPLFPVVPILAFALCLISLIGIAFDPNQVAALYFGIPFVGACYAFFYYKYGRRQQLAK

SEQ ID NO: 17325 - DNA, 1404 bp, Exiguobacterium sp. 255-15
  CDS (1)..(1404): transl_table=11
atgcagttaaaaagagaaatgacaagccggcatctcttcatgatttcactcggagggattatcggtacgggactgttcctcggttccggattaacgatttcgcaagcaggaccgctcggggcggtcctcagttacatcgtgggtgggaccattatgtatctgacaatgttatgtttaggagagatggctgtccatatgccggtttccggatcatttcaaacgtatacgacacgtttcatcggaccgggtatcggatttgccgtcggctggatttactggctcggatgggccgtgacggtggcacttgaaatcacggcagccggaagtctgatggatcggtggtttccgaacacccctatcgtcatctggtgtgccatcttcaccgtcattttattcggacttaacgccgtatctgccaaagcctttggggaggctgaattctggttctcgagcctgaaagtcctggccattctatttttcatcgcgctcgggggagcggcttggtttggctggattgatatgacggcagcacgcccggaaagtttattcgccaactttacttcaaacggattgttcccgaacggtgcgctcggagtcttgacgacgatgatcgccgtcaacttcgcattccaggggacggaactgatcggggttgcggccggagagtcgaacgatcccgaaaaatcgattccgaaagcgatccgcaatacggtttggcggacgttcatcttttttgttctttcgattacaatcgtcggcgccttgattccttatgaaacagccggcggtatcagcagtccgttcatcatggtctttgatgcgatcgggattccgtacgcggccgatttgatgaacatcgtcgttctgactgccttactgtcggtcgggaactcgggattatacgctgctacccggatgttatggtcgatgtctcaagaaggcatgatttcgaaaaaacttgcgatcgtcaactcgcgtggtgtaccgatgcgggcgttatgttttacgatgctgtttgcgatgttatcgcttctgaccgcctttttcgcggaagataccgtcttcatctggttgttgtcactagcaggactcggtgcacaagtcggatggatttcaatttccgcttcgcagattgcgttccgtcgtcaattcatcaaaaacgggcatactgtcagtgaattaaaattcaagacaccgttcttcccggtcttgccgatcatctcgttttctctgaatatgctcgtattgatcagcttggcgtttcaggcggatcaacggattgcgctgtatatcggtgttccgttcttcctcttgacatggggttgttaccatctgttcgtcaaaggaaaacatattgcagctcaaaccgagcgtcaggcagccagttccacgttagaatcttga

SEQ ID NO: 17326 - protein, 467 aa, Exiguobacterium sp. 255-15
MQLKREMTSRHLFMISLGGIIGTGLFLGSGLTISQAGPLGAVLSYIVGGTIMYLTMLCLGEMAVHMPVSGSFQTYTTRFIGPGIGFAVGWIYWLGWAVTVALEITAAGSLMDRWFPNTPIVIWCAIFTVILFGLNAVSAKAFGEAEFWFSSLKVLAILFFIALGGAAWFGWIDMTAARPESLFANFTSNGLFPNGALGVLTTMIAVNFAFQGTELIGVAAGESNDPEKSIPKAIRNTVWRTFIFFVLSITIVGALIPYETAGGISSPFIMVFDAIGIPYAADLMNIVVLTALLSVGNSGLYAATRMLWSMSQEGMISKKLAIVNSRGVPMRALCFTMLFAMLSLLTAFFAEDTVFIWLLSLAGLGAQVGWISISASQIAFRRQFIKNGHTVSELKFKTPFFPVLPIISFSLNMLVLISLAFQADQRIALYIGVPFFLLTWGCYHLFVKGKHIAAQTERQAASSTLES

SEQ ID NO: 17327 - DNA, 1686 bp, Uromyces fabae
  CDS (1)..(1686)
atgattcttattcaaaaaaaagatcaaaaaaatgattcatttcgcatagaggacgaattagaaaagcacgcaaaccaagcttactatgagtccacagaagtcaacgcatcttcttctcctactggagatggtgcggttggcgaaaatacagttcatcgagctctcgaacaaagacacataagcatgattgcaatcggtggtacaattggaaccggtctattcttgggaatgggagaagcacttaacaaaggtggacctttaggtttgatactaggttacatggtgatgggacttgttgtctacgccatgacgattgcgctgggcgagatggtcacaatgtttccagtctctggttcatttactcattatccatgtcgctttgttgatccagcccttggatttgctgtcggatggaattattggtattcattgaccatcgcagttccaagtgaggttattgccgccaccattgtcgtagaatattggaaggccccagtgaacaaggtcgtttggatcatcacgtttattgttcttagttgtggaatcaatttcttcggagtgagatggtacggagagactgaattcgcattcgctgcggtcaaagtcgtagccatcattgtacttattcttgtgggcatcgtaattgatatcggcggagggcccactcatgagagaattggatttcgccatttcattgaccctggaccattcaaccaattgcacggaatacctggagctcttgggagatttttggccttctggtctgtatttactcaggcaagtttttcgtacatgggtacagaaatggtagctattacggccggtgaagctgccaatcctcgcaaaactgtgcctaaggctatcgagagagttttctacagaatactagtattttacttgggtagcacactcgttgtcggccttctagttccttattcatccccacaacttttaggaagcaccggcgatgctagttcatcaccattcgtgattgcaatcaatcgagccggtatcaccgtactccctgacatgatcaatgtggtgatattactatctgctatttccacggcgagctccaaactttatggtggtagtcgagtgttgtatggactgtcgaaagatgggatggcgcctagatttttctcaaagtgtaacgcttctggattgcctatgtggtctctacttgctaccagtagcaccgcggctctctcttttatgtgtctaaatagtaaagcaggtgttgctttccaatggttccaaaacctttcagccatgactgggatactaacctggtggacagtcttagtgtcatatgtattgttctatcaaggtctcaaggttcagggtcttagccgcgacaaattgcattacaaagccccatttcaaccgtatgcttcttggattgcattggctatgcttactctgatcatgtttatgagtggatttgagacattcctgaaaggaggatggtcgatttcggattttctagccaattatttaacattaccgattttcctaggattttacttgtactggaaaatatctacacgatccaaatttgtgagctcgaaacatgtggactttgttactggaacacgtgaattgaatgaaatggacgcgcaggagagagaaaaggagatcattccaaccacgaaatggggaaaatttattgacaagttgctctga

SEQ ID NO: 17328 - protein, 561 aa, Uromyces fabae
MILIQKKDQKNDSFRIEDELEKHANQAYYESTEVNASSSPTGDGAVGENTVHRALEQRHISMIAIGGTIGTGLFLGMGEALNKGGPLGLILGYMVMGLVVYAMTIALGEMVTMFPVSGSFTHYPCRFVDPALGFAVGWNYWYSLTIAVPSEVIAATIVVEYWKAPVNKVVWIITFIVLSCGINFFGVRWYGETEFAFAAVKVVAIIVLILVGIVIDIGGGPTHERIGFRHFIDPGPFNQLHGIPGALGRFLAFWSVFTQASFSYMGTEMVAITAGEAANPRKTVPKAIERVFYRILVFYLGSTLVVGLLVPYSSPQLLGSTGDASSSPFVIAINRAGITVLPDMINVVILLSAISTASSKLYGGSRVLYGLSKDGMAPRFFSKCNASGLPMWSLLATSSTAALSFMCLNSKAGVAFQWFQNLSAMTGILTWWTVLVSYVLFYQGLKVQGLSRDKLHYKAPFQPYASWIALAMLTLIMFMSGFETFLKGGWSISDFLANYLTLPIFLGFYLYWKISTRSKFVSSKHVDFVTGTRELNEMDAQEREKEIIPTTKWGKFIDKLL

SEQ ID NO: 17329 - DNA, 1719 bp, Neurospora crassa
  CDS (1)..(1719)
atgtccgacatagaaaaagggtcagcgggctcccacgacaaggagacccgcgtcgacgcggccactcttcccgcctatgaggccggcagcgtcgccgaggcgcaacaggaggacttcatgacgcgcaacggtctcaacctcgcctccttcaagccccgccggttccacacgggcgacggcaccgagatcgagcgcaccatgaagtcccgccacctgcacatgatcgccattggcggctccatcggcgccggtttctttgtcgggtccggcaaggcgctgcacaacggcgggccggcgtcgctgctgattgatttcgccatcatcggcgtcatgatgttcaacgtcgtgtacgccctgggtgagctggctgtcatgtttcctgttaccggtggcttctacacctactcgactcgctttatcgatccgtcttggggtttcgccatgggttggaattatgttttccagtgggcgatggtcttgcctctggaacttaccgtttgcgggtttacggtcgggtactggaatcaggacataaccgtctggatcaccaccttcctcgtcgccatcatcatcatcaacgtcttcggcaccctcggctacgccgaagaggaattctgggcttcggcattcaagctcggcgcaaccattgtcttcctcatcatctgcctcgtcatggtcctcggcggcggtcccaaaggcagccgctacgaccactacaccggtgccgccctgtggtactcccccggcgccttcgccaacggctttagggggttctgctcctgcttcgtcactgcggcttttgccttttcgggcaccgaactcgtcggtctcgctgctgccgaggacaaaaaccccgtcaagtcccttcccggcgccatcaagcaagtcttttggcgcatcaccctcttttacatcctcggtctcttcttcgtcggcttgctcatcccctatgacgacgagaacctgttgggcgctaacccgttcatcaacgtcaacgcttccccctttgtgctggtgggcaagtacgcgaacctgacgggcttcgactcgttcatgaatgtggttattctggtgtcggtcctctcgctcggtgtctcgtgcgtctatggtggctcgcgcaccttgactgccctcgctcagcaggggtacgcgcccaagatctttacgtacgttgatcgttccaaccgcccgctgttctcggtcctgctcattattgcgtttggccccctggcgtatgtcaacttggcggctgctggtccgaccgtgttcgattggttgctttcgctttccgggctggcggcgctgttcacgtggggatcgatttgcttgagccatattcgctttcgcaaggcgtgggcgctcaagggacatagtgtggaggagatcccgttccgggctgcgggcggtgtgtggggatcgtggctggggttggtgttggttgttttggtgttgattgctcagttctacgtagccatctgcccacccggcggcggcttcaacacggtcgagggcttcttcgtgcagtacctcgccttgcccgtcgtcatcgtcttctggatcggtggattcatctggaagcgcacgagctggctccgcgttgatcagatcgatgttgacacgggccgtcgcgaacatgattgggagtcgattaatgcgtaccaagctgagttggctgctatgcctgcttggaagaggtggttccataagttgtttgtctga

SEQ ID NO: 17330 - protein, 572 aa, Neurospora crassa
MSDIEKGSAGSHDKETRVDAATLPAYEAGSVAEAQQEDFMTRNGLNLASFKPRRFHTGDGTEIERTMKSRHLHMIAIGGSIGAGFFVGSGKALHNGGPASLLIDFAIIGVMMFNVVYALGELAVMFPVTGGFYTYSTRFIDPSWGFAMGWNYVFQWAMVLPLELTVCGFTVGYWNQDITVWITTFLVAIIIINVFGTLGYAEEEFWASAFKLGATIVFLIICLVMVLGGGPKGSRYDHYTGAALWYSPGAFANGFRGFCSCFVTAAFAFSGTELVGLAAAEDKNPVKSLPGAIKQVFWRITLFYILGLFFVGLLIPYDDENLLGANPFINVNASPFVLVGKYANLTGFDSFMNVVILVSVLSLGVSCVYGGSRTLTALAQQGYAPKIFTYVDRSNRPLFSVLLIIAFGPLAYVNLAAAGPTVFDWLLSLSGLAALFTWGSICLSHIRFRKAWALKGHSVEEIPFRAAGGVWGSWLGLVLVVLVLIAQFYVAICPPGGGFNTVEGFFVQYLALPVVIVFWIGGFIWKRTSWLRVDQIDVDTGRREHDWESINAYQAELAAMPAWKRWFHKLFV

SEQ ID NO: 17331 - DNA, 1494 bp, Staphylococcus aureus
  CDS (1)..(1494): transl_table=11
atgtcaaaagttcaaaatgaaagtaacaatgttgtcaaaaggggacttaaagatcgtcatatttctatgattgcgattgggggttgtattggtacaggtttatttgtaacttctggtggagcaattcatgatgcaggtgctttgggtgcattaataggatacgcaattatcggaataatggtatttttcttaatgacgtcacttggtgaaatggctacgtatttaccagtatcaggttcatttagtacatatgctacaagatttgttgatccatctttagggtttgcgcttggttggaactattggtttaactgggtagtaactgtagcagcagatattacgattgcagcacaagtcattcaatattggacaccattgcaaggcatacccgcttgggcatggagtgcgttgtttttagttataatttttagtctgaattcgttatcagttcgcgtctatggtgaaagtgaatactggttggcattgataaaagtgattacagttattgttttcattgcaattggtttattaacgattgtaggaatcatgggtggtcatgttgtaggatttgaaatatttaataaaggtgaaggtcctattcttggtggcaacttaggaggaagtttgttatcaattctaggtgtattcttaatcgctggtttctcattccaaggtactgagttaattggtattacggctggtgaatcagaaaatcctgaacgtgctgtgccgaaagcaattaaacaagtattctggagaattttattattttacattttagccatttttgttatcggtatgttaattccttatgatagtagtgcattaatgggtggtagtgataatgtagcaacgtctccattcacattagtgtttaaaaatgcaggatttgcttttgcagcatcatttatgaatgctgtcatcttaacatcagttttatcagcaggtaactctggaatgtatgcctcaacgcgaatgctttattcaatgagtaaagataaattagcgtttgaagcatttgggaaaacaaataaaaatggcgtgccatatatgtctttattagttactgcaattattgtagtcattatattggtattacaaagtcttacaaaaggtgcttacgaatacatcgttgctgcaagtgggttaactggctttattgcctgggtaggtatcgcagtgagtcattaccgatttagaagagcatttgataaacaaaattatgataaatctaaattgaaatatacagctaaattattcccgttcggacctttatttgcaggctttttatgtattgtagtaatcatcgggcaagatgttgactttattaaaacaggagattttaattttagtcgcttcttaattacgtatatgggaatcccagtatttttagcattctttatttatcataagcttcgatataaaacgaagaaaattccattagaacaagtagatttacgtcaagacgtgtcaatggatgaaataaaaggttaa

SEQ ID NO: 17332 - protein, 497 aa, Staphylococcus aureus
MSKVQNESNNVVKRGLKDRHISMIAIGGCIGTGLFVTSGGAIHDAGALGALIGYAIIGIMVFFLMTSLGEMATYLPVSGSFSTYATRFVDPSLGFALGWNYWFNWVVTVAADITIAAQVIQYWTPLQGIPAWAWSALFLVIIFSLNSLSVRVYGESEYWLALIKVITVIVFIAIGLLTIVGIMGGHVVGFEIFNKGEGPILGGNLGGSLLSILGVFLIAGFSFQGTELIGITAGESENPERAVPKAIKQVFWRILLFYILAIFVIGMLIPYDSSALMGGSDNVATSPFTLVFKNAGFAFAASFMNAVILTSVLSAGNSGMYASTRMLYSMSKDKLAFEAFGKTNKNGVPYMSLLVTAIIVVIILVLQSLTKGAYEYIVAASGLTGFIAWVGIAVSHYRFRRAFDKQNYDKSKLKYTAKLFPFGPLFAGFLCIVVIIGQDVDFIKTGDFNFSRFLITYMGIPVFLAFFIYHKLRYKTKKIPLEQVDLRQDVSMDEIKG

SEQ ID NO: 17333 - DNA, 1746 bp, Saccharomyces kluyveri
  CDS (1)..(1746)
atgtcctttatccaagacagttatcgtaaggatctggagaaaatcgtctccaactcaaacaccacatctaaggatgtcgaaaatttggacctttccaaccaagatgatatctcatctcaagaatcccatttaaatattgacggtaagcatgacggtatccgtttgaaaaaagaattggaagcccgtcacgtttctatgattgccatcggtggttctttgggtaccggtttgttgattggtactggtacctccctttcccttgctggtcctgtttctattttgatcgcttactcctttgtcggtttcttggtctacattgttatgacatgtcttggtgagatggccacctacattccattggatggtttcacaagttatgcatcccgttactgtgacccagctttgggttttgccgttggttattcctaccttttcaaatacctgatcattacaccaaatcaattgaccgctgccgctttggtcttgcagtactgggtgtccagagagaaggtcaacccaggtgtctggattaccattttcctggttattattgtcacgatcaacgttgtaggcgtcaaattctttggtgaatttgaattttggctatcgagtttcaaagttcttgtcatgctgtgtctgatcgttctgctatttgttataatgttgggtggtggcccatcccatgaccgtttgggtttcaggttttacaaggatccgggtgcgttcagaccttattcagaagccatcagtggttccaagggtaaatttgtctcttttgtcgcagtctttgtttacgctttgtttgcatacttgggtaccgaattgtgtggtattgtcgctgcagagtgtaagaacccaagaagaaacgttcctcgtgctatcaagttgacgctgtaccgtatcgttgttttctaccttgtcaccatcttcttgttgggtatgactgtcgcttacaacgatccattgttgctacaagccaagaagaagtctacttctgccgctgcttctcccttcgtcgttgccatcaagaatgcaggtatcccagttttgccacacatcttcaacgcatgtgttttgatgttcgttttcagtgcttgtaactcggacttgtacgttgcttctagaagtttgtacgggttggccattgacaacaaggcaccaaagattttcgccaagactaacaagtggggtgttccatacaactctttgatcttgtgtatcctgttctgtctattggcttatatgaacgtgtcttctggttccgctcaagtcttcaactatttcgttaacgttgtgtctatctttggtttgatgagttggatcgccattttgattacctacatctacttcgacagggctttaagagcacaaggtgtggataaatctacgctagcttatgccgcaccactagcatccaaaggtgcttatttcgctttgtttttctgctgtttgattgctttgattaagaatttcaccgtatttttgggtcacaaatttgactacaagaatttcatcaccggctatattggtatcccagttttcatcatctgtttctttggttacaaatacatccgtggtaccaaattcgttaaaccagaggaagctgacttgtacactttcaaagaacttatcgacttggaagaagaagaaggtaagctttgggacgctgcacaaaaggaaaagatggaaagctctccaaagaacttcaaatggttttacgaaaagtttttgggctggatcttttaa

SEQ ID NO: 17334 - protein, 581 aa, Saccharomyces kluyveri
MSFIQDSYRKDLEKIVSNSNTTSKDVENLDLSNQDDISSQESHLNIDGKHDGIRLKKELEARHVSMIAIGGSLGTGLLIGTGTSLSLAGPVSILIAYSFVGFLVYIVMTCLGEMATYIPLDGFTSYASRYCDPALGFAVGYSYLFKYLIITPNQLTAAALVLQYWVSREKVNPGVWITIFLVIIVTINVVGVKFFGEFEFWLSSFKVLVMLCLIVLLFVIMLGGGPSHDRLGFRFYKDPGAFRPYSEAISGSKGKFVSFVAVFVYALFAYLGTELCGIVAAECKNPRRNVPRAIKLTLYRIVVFYLVTIFLLGMTVAYNDPLLLQAKKKSTSAAASPFVVAIKNAGIPVLPHIFNACVLMFVFSACNSDLYVASRSLYGLAIDNKAPKIFAKTNKWGVPYNSLILCILFCLLAYMNVSSGSAQVFNYFVNVVSIFGLMSWIAILITYIYFDRALRAQGVDKSTLAYAAPLASKGAYFALFFCCLIALIKNFTVFLGHKFDYKNFITGYIGIPVFIICFFGYKYIRGTKFVKPEEADLYTFKELIDLEEEEGKLWDAAQKEKMESSPKNFKWFYEKFLGWIF

SEQ ID NO: 17335 - DNA, 1662 bp, Saccharomyces castellii
  CDS (1)..(1662)
atgcatcaccgcactccctcacctcacatgaaattaaaccagccacaggtccattcattccaagtggactccaatgacacacccaccaccatttccactctggacgacgaccaggaaaagcaacaggatgtaaagagagaactaaagaaaagacacatctccatgattgccctaggtgggaccatcggcacgggactgtttttggggattgcacgtccactcattatcgcaggtccaataggtgcattgatcgcatatcttttcatgggaaccgtcgtattctctgtcactcaatcattgggtgaaatgtgcactttcatcccagtaacagcatcattcaccgtctttgcccaaagattcttatcccccgcattcggtgctgctaatgggtacatgtattggttctcctgggcaatgacctttgccctagaattatctgtggtgggccaaattattcaattctggaccatggcggtccccctagcagcctggatttccatcgtttgggtcctcttgacaatttctaacttattcccagtacgcatctacggtgaaattgaattctggatcgcttctgtcaaagtactggccatcctggggttcatcatttatggtatttgtatcatttgtggtgctggtgtcacaggacccgtcggtttcagatattggaagaatccaggaccttggggcatggggatcatttcttccaatgtcaatgaggcaagattctttggttgggtctcgtctttaatcaatgcagcattcacgttccagggaactgaattggtgggcatcactgccggtgaagccaagaatccaagaaagactgtccccaaggcaattaaaaaagtcgtctttagaattctggtcttctacattggttcactactagtcattggattgttggtcccatataatgatcccaaattacaaagtaatgacagctatgtctcctcgtcacctttcatcattaccatccaaaacgcaggaaccaagatcctaccacacattttcaacgctgtcattctcataaccatcatttcagcgggcaattcaaacgtttacattgggtccaggatattgtatggcttggctaaaaacaaggcagcacccaaattttttacaaacacatccaaagctggtgttccctatgtgactgtccttttcacttccatgtttggatccctagcatacatggaaaccaccacgggaggagacaaggctttcacatggttgttaaatatcgtaggagtagcagggtttttcgcctggttattgatttcttgttctcatatccgtttcatgaaggctttgaagcaaagaggaatttcaagaaatgatttgccctataaggccatgctcatgccatggctagcgtattatgccgtgttcttcatggttataataatcgtcatccagggattcacctcttttgccccgaaatttaaagtggcaaacttctttgcagcttatatttctgtctttttatttattatattttgggtcgcctttcaaatatggttcaaatgtcgattggtttggaagttgcaggatgtggatttggatacagatagaagggacattgaagaggaggtatggagtgatgatgtggaagacaagaacaagaattggtgggaccgtttttggaattacgtagcataa

SEQ ID NO: 17336 - protein, 553 aa, Saccharomyces castellii
MHHRTPSPHMKLNQPQVHSFQVDSNDTPTTISTLDDDQEKQQDVKRELKKRHISMIALGGTIGTGLFLGIARPLIIAGPIGALIAYLFMGTVVFSVTQSLGEMCTFIPVTASFTVFAQRFLSPAFGAANGYMYWFSWAMTFALELSVVGQIIQFWTMAVPLAAWISIVWVLLTISNLFPVRIYGEIEFWIASVKVLAILGFIIYGICIICGAGVTGPVGFRYWKNPGPWGMGIISSNVNEARFFGWVSSLINAAFTFQGTELVGITAGEAKNPRKTVPKAIKKVVFRILVFYIGSLLVIGLLVPYNDPKLQSNDSYVSSSPFIITIQNAGTKILPHIFNAVILITIISAGNSNVYIGSRILYGLAKNKAAPKFFTNTSKAGVPYVTVLFTSMFGSLAYMETTTGGDKAFTWLLNIVGVAGFFAWLLISCSHIRFMKALKQRGISRNDLPYKAMLMPWLAYYAVFFMVIIIVIQGFTSFAPKFKVANFFAAYISVFLFIIFWVAFQIWFKCRLVWKLQDVDLDTDRRDIEEEVWSDDVEDKNKNWWDRFWNYVA

SEQ ID NO: 17337 - DNA, 1773 bp, Saccharomyces bayanus
  CDS (1)..(1773)
atgacgacgcctaagcaagactctgaagtagaggaaaaacacatgtacactgagccggccggaacgttctttcatgacgtcgaagcctctcaaactcatcacaggcgtggatcattgtcgctgaaagatgagaagagcaaggaactgtatccattgcgctcctttcccaatggagtcaatggccaggacactttctcgatggaggaagatatacaggacgaagacgagggcgaagtgcagaatgcggaggtgaaaagagaacttaaacaaaggcacatcggtatgattgcccttggtggtaccatcggtaccggtctgttcatcggtctatctacacctctaacgaacgccggccccgtgggtgctctgatatcctatttattcatgggttcgttggcttactccgtcactcaatcactaggtgaaatggccacattcattccagtcacatcttcgttcacggtcttttcgcaaagatttctgtcgcctgcatttggtgcagccaacggttacatgtattggttttcttgggccgtcacctttgccctggagcttagtgtggttggacaagtcattcaattttggacgtacgccgtcccattggcagcatggattagtattttctgggtgatcatcaccgcaatgaacatgttccccgttaaatattacggtgaatttgaattctgggtcgcctctatcaaagtcatcgccattatcgggtttttgatctactgtttttgcatggtctgtggtgctggtgtcaccggcccagttgggttccgttactggagaaacccaggtgcatggggcccaggtattatctccaagaataagaacgaggcaaggttcctaggttgggtttcctctttgattaatgctgcgttcacattccaaggtactgaattggttggtatcactgctggtgaggccgccaacccaagaaaaactgttcccagagccatcaagaaggttgttttccgtatcttgaccttctacatcggatccctattgttcattggtcttttggtgccatacaacgatcctaaattaacctctgccacctcttatgtctccacttctccatttattattgccattgaaaactcaggtacaaaagtattgccccatatattcaatgctgttatcttaacaaccatcatttccgcagcaaattcaaatatttatgtgggctctcgtgtcttatttggtttatccaaaagcaagttggctccaaagtttttttcaaaaaccacaaaaggtggtgtcccatatattgcggttttcgccacttccatatttggtgctttagcttacatggaaacttccaccggtggtgggaaagtattcgcatggttattgaatatcactggtgtcgctgggttcttcgcttggttgtttatctcggtatctcatatcaggttcatgcaagctttgaaataccgtggcatttctcgtgatgaattgccattcaaagccaaactaatgcccggattggcttattatgctacttttttcatggtagttattatcctcatccaagggttcacctcttttacaccaacattcaacggtgttaatttccttgccgcctatatttctgttttccttttcttggcaatttggattctatttgaactgatatttagatgcagatttgtctggaaaatcgaagacgtggatatcgattctgacagaagagacatcgaagccattgtgtgggaagaacctgagccaaagaccctttgggacaagttttggaatgttgtaggttaa

SEQ ID NO: 17338 - protein, 590 aa, Saccharomyces bayanus
MTTPKQDSEVEEKHMYTEPAGTFFHDVEASQTHHRRGSLSLKDEKSKELYPLRSFPNGVNGQDTFSMEEDIQDEDEGEVQNAEVKRELKQRHIGMIALGGTIGTGLFIGLSTPLTNAGPVGALISYLFMGSLAYSVTQSLGEMATFIPVTSSFTVFSQRFLSPAFGAANGYMYWFSWAVTFALELSVVGQVIQFWTYAVPLAAWISIFWVIITAMNMFPVKYYGEFEFWVASIKVIAIIGFLIYCFCMVCGAGVTGPVGFRYWRNPGAWGPGIISKNKNEARFLGWVSSLINAAFTFQGTELVGITAGEAANPRKTVPRAIKKVVFRILTFYIGSLLFIGLLVPYNDPKLTSATSYVSTSPFIIAIENSGTKVLPHIFNAVILTTIISAANSNIYVGSRVLFGLSKSKLAPKFFSKTTKGGVPYIAVFATSIFGALAYMETSTGGGKVFAWLLNITGVAGFFAWLFISVSHIRFMQALKYRGISRDELPFKAKLMPGLAYYATFFMVVIILIQGFTSFTPTFNGVNFLAAYISVFLFLAIWILFELIFRCRFVWKIEDVDIDSDRRDIEAIVWEEPEPKTLWDKFWNVVG

SEQ ID NO: 17339 - DNA, 1836 bp, Saccharomyces bayanus
  CDS (1)..(1836)
atgggcaagtttagaaatataatatcgtccaaaaaatgggacgaggagcaggacaattccgaggaacagagcatacgggacgactcgacaaatcagatagaacatgagatggaggtgatagacacatccaacaagccggtcgcatactccattgacgagaaacaggacaatttgaagaagaagagcgggttgatgctagatggcaccattggtgacataaattcgatcacgaactcgttaacgaggtcccaaattgcctcgcacgagcaaggtggggacgacgaagaagaggaggctcactacgaagacaagcacgtcagaagagccttgaagcagagacacattggtatgatcgcgctcggtggtaccatcggtactggtcttttcgtcggtatctccacccccttgagcaatgcaggccccgtcgggtccctgattgcttatattttcatgggtacagtggtttacttcgtaacacagtcgctgggtgaaatggccacttttatccccgtgacgtcatccatcacagtcttctcaaagaggtttttatcacctgcattcggtgtttccaacggttacatgtactggttcaattgggccatcacgtatgcagtggaagtctccgttattggtcaagtcattgaatactggacaacgaaagttcctttgggggtttggattgccatattttgggtccttatcactctaatgaattttttccccgttaaagtttatggtgagtttgaattctgggtggcatcggtaaaagtcctggccatcatggggtacttgatatacgccttggttatcgtctgtggtgggtccaaacaaggtcctattggtttcaggtactggagaaatccaggtgcttgggggcccggtatcatctccagtgacaagaatgaagggcgttttctcggttgggtctcctctttgatcaacgccgccttcacgtaccaaggtactgaactggtcgggatcactgctggtgaagccgccaacccaagaaagaccgtccctagagctatcaacaaagttgtcttcaggattgtacttttttatatcatgtctttgttcttcattggtctcttggtcccatacactgacccccgtctatccgccagttccgctgtcattgcatcatcaccatttgtcatttccattcaaaacgctggtacttatgctttgccagacattttcaacgctattgtcttgatcactgttatctctgccgctaactcaaacgtttacgttggttcccgtgttttgtactctttggcccagaccggtaacgctccaaagcaatttggatacgtcactaaacaaggtgttccataccttggtgtcttgtctacagctgcattgggtcttttggccttcctggttgtcaacaacaacgccaacaccgcattcaactggttgatcaacatctccactttggctgggttatgtgcttggttattcattagtttgtcacacatcagattcatgcaagctttgaatcaacgtggtatctctcgtgatgatttgcccttcaaggctaaattcatgccctacggtgcctactacgcgtcctttttcgtcactgtcatcattttcattcaagggtttcaatcattctgtccattcagagtggccgacttctttacgtcctacatttccttaattcttttggctgtcgtgttcactggttgccagctatactacaaatgtagattcatttggaaactggaagacattgatatcgactctgacagaagagaaatcgaagctatcatttgggaagacgatgagccaaagaatttgtgggagaaattctgggcagccgttgcataa

SEQ ID NO: 17340 - protein, 611 aa, Saccharomyces bayanus
MGKFRNIISSKKWDEEQDNSEEQSIRDDSTNQIEHEMEVIDTSNKPVAYSIDEKQDNLKKKSGLMLDGTIGDINSITNSLTRSQIASHEQGGDDEEEEAHYEDKHVRRALKQRHIGMIALGGTIGTGLFVGISTPLSNAGPVGSLIAYIFMGTVVYFVTQSLGEMATFIPVTSSITVFSKRFLSPAFGVSNGYMYWFNWAITYAVEVSVIGQVIEYWTTKVPLGVWIAIFWVLITLMNFFPVKVYGEFEFWVASVKVLAIMGYLIYALVIVCGGSKQGPIGFRYWRNPGAWGPGIISSDKNEGRFLGWVSSLINAAFTYQGTELVGITAGEAANPRKTVPRAINKVVFRIVLFYIMSLFFIGLLVPYTDPRLSASSAVIASSPFVISIQNAGTYALPDIFNAIVLITVISAANSNVYVGSRVLYSLAQTGNAPKQFGYVTKQGVPYLGVLSTAALGLLAFLVVNNNANTAFNWLINISTLAGLCAWLFISLSHIRFMQALNQRGISRDDLPFKAKFMPYGAYYASFFVTVIIFIQGFQSFCPFRVADFFTSYISLILLAVVFTGCQLYYKCRFIWKLEDIDIDSDRREIEAIIWEDDEPKNLWEKFWAAVA

SEQ ID NO: 17341 - DNA, 1713 bp, Saccharomyces bayanus
  CDS (1)..(1713)
atgagtaaaaatgtggacattagcgtgtccaaagagggtcaatacgaacttaactccatctccacgataaaggaggaggagctggtagacgtccagtacgatggacagggtgccccggcggctatcgccgccggggggtgcattgcgaacgacgatgccaaggcggcagaggcgctaccccgggaggtgaaacggaacttgaagcagcggcatatagggatgattgctctgggaggcaccatcggcacgggcctcataataggtatcggtccgccgctggcgcatgcgggtcccgttggcgccctgatatcgtatatattcatggggaccgtcatttactcggtgacacagtcactgggggagatggcaacattcatacccgtgacgtcctcgttctccgtctttgcacagaggttcttgtcgcctgcccttggcgccaccaacggctacatgtactggctgtcgtggtgcttcaccttcgcactggaactatctgttctggggcaaatcatccagtattggacagatgctgtgcctctgtccgcttggatcgtaattttctggtgcctgctcacgctgatgaacatgttcccagtgaagtactacggggagttcgagttttgtattgcttccataaaggttatcgcgctgctcgggttcatcatctactcgttttgcatggtatgtggtgccggacagccggatggacccatcggattcaggtactggagaaatccaggagcctgggggcccggtatcatctccagtgacaagaacgaagggcgttttctcggttgggtctcctctttgatcaacgccgccttcacgtaccaaggtactgaactggtcgggatcactgctggtgaagccgccaacccaagaaaggccgtcccaagggcaattaagaaagttgtggtcaggatcctagtcttctacatcatgtcgctgtttttcataggccttttggttccgtacaacgacccgaaactggacagtgacggatcgtttgtgtccgcatcccccttcatgatcagcatcgagaattccggcaccaaggtcctcccagacatattcaacgcggtcgtgctgatcaccatagtctccgcgggcaactccaacgtgtacatcggctcaagggtcctgtacagtctatccaaaaacgacttggcgccccggttcctgtcgatcgtgaccaagggcggggtcccctactttgccgttctggcaacatctgtattcgggttcctggccttcttggaaacctccgcaggtagtggcaaggctttcaactggctgttaaacattactggtgtggcaggatttttcgcatggctgctgatttcattttcgcacatccgctttatgcaagcgataagcaaacgcggaatatcgaggaacgatctgccttacaaggctcgcatgatgccttatctagcctactacgcatcctttttcatcgccctgatagtcctgatccagggcttcactgcatttgcgcccagtttccagcctgtagatttcgttgccgcatacatatccgtcttcctatttgttgcaatctggttttcattccagctttggttcaagtgtcccataatcttgaagttgcaggacgtcgacatagattccgaccgccgcgaaatagaggagcaggtatggatagaacccttacgcaaaaccaagtggcagtgcgtgtgggatgtccttgcataa

SEQ ID NO: 17342 - protein, 570 aa, Saccharomyces bayanus
MSKNVDISVSKEGQYELNSISTIKEEELVDVQYDGQGAPAAIAAGGCIANDDAKAAEALPREVKRNLKQRHIGMIALGGTIGTGLIIGIGPPLAHAGPVGALISYIFMGTVIYSVTQSLGEMATFIPVTSSFSVFAQRFLSPALGATNGYMYWLSWCFTFALELSVLGQIIQYWTDAVPLSAWIVIFWCLLTLMNMFPVKYYGEFEFCIASIKVIALLGFIIYSFCMVCGAGQPDGPIGFRYWRNPGAWGPGIISSDKNEGRFLGWVSSLINAAFTYQGTELVGITAGEAANPRKAVPRAIKKVVVRILVFYIMSLFFIGLLVPYNDPKLDSDGSFVSASPFMISIENSGTKVLPDIFNAVVLITIVSAGNSNVYIGSRVLYSLSKNDLAPRFLSIVTKGGVPYFAVLATSVFGFLAFLETSAGSGKAFNWLLNITGVAGFFAWLLISFSHIRFMQAISKRGISRNDLPYKARMMPYLAYYASFFIALIVLIQGFTAFAPSFQPVDFVAAYISVFLFVAIWFSFQLWFKCPIILKLQDVDIDSDRREIEEQVWIEPLRKTKWQCVWDVLA

SEQ ID NO: 17343 - DNA, 1629 bp, Aspergillus fumigatus
  CDS (1)..(1629)
atgatcgaagcaaagatgacaccctttgaattcaatcaacatgtcaacgccgacaggctcgctcgtaagctctccgcccgccaggtgcagatgatcgccatcggcggcacaattgggacgggactcttcctgggaacaggcaaagctctcgcgacaggtgggcctgcgtcgatgcttatttcgtatgccatatgtggtgggattgtgttcgtcacgatgttaagcctgggggagatggcggcgtttattcccattgcgggttcgttctgtactttcgcagggcgcttcgttgacgatgctcttggtttcgctctgacttggaattactggtttaatgacgctgtctcaacggcggcggatgtcattgcactgcaactattgctgcagtattggacggataacttcccaggctgggcgatcagcttaatctttctgatttttgttattttacttaatgtgatgtctgtgagaatctacggagagattgaatattggctcagcttactcaaggtcatcacgattataatcttcatcattctcgggattgttgtcaactgcgggggcaataaggaccacaaatacatcggtgacaagtacttctatgtcggcgatgcccccttcgtaggtggaatcggtggattcgcctccgtctttgtcacggcatcgtttgcttatggcggcacggaatccattgccatcacagcgggagaaaccaaagacccagctaaaaacctgccgcgagtcgtccgcaatgtcttctggcgcatcgtcctcttctacatcatctccatcattctcatcggtctcaatgttccctacaactaccccaacctgtcaaagaaaaccaccgccaccagcccgttcaccatcgtcttcatggaagctggcagcgccgtggcaggcagcttcatcaacgccgtgctaatgaccagcgtcatctccgccgccaaccatgccctcttcgcagggtcccggcttctctacacgctcgcggtagacggccacgcccctcatttctttggccacctcaaccgcttccagatcccctgggtcgccgtgctagccacatccctcgtcagcggtctctgcttcggagccagctacatcggagccggccagctctggacctggttgcaaaatgaaaccagcatcgtcggcgtctccaaccaaatctcgtgggtctgcatcggcatcgcctccctgcgcttccgcgccgccatccgccggcagaacctcgagcatctcctccccttcaagaactggacgtaccccgtcggccccatcatcgccgtcgggctgaatatcgtcctgatcctcgtgcagggctggtcctgcttcagcccgtccttccaggccgtcgactttgtgtcgttctacatcgagatccctatcatgattgtcatgtttttggcctggaagctggttaagcagacgaggttcgtgcatctggatgagatggacttggttactgatcggtatgatctgaatgcggagcatgctgaaagcgatggcaatgccgatggtgatagcccgtcgcgggtcgggaggattctgcatatcaaacagttgcagagtgaaaagggcgtgctcgggaagctgaagcgagttgggatgtggctgttcctatag

SEQ ID NO: 17344 - protein, 542 aa, Aspergillus fumigatus
MIEAKMTPFEFNQHVNADRLARKLSARQVQMIAIGGTIGTGLFLGTGKALATGGPASMLISYAICGGIVFVTMLSLGEMAAFIPIAGSFCTFAGRFVDDALGFALTWNYWFNDAVSTAADVIALQLLLQYWTDNFPGWAISLIFLIFVILLNVMSVRIYGEIEYWLSLLKVITIIIFIILGIVVNCGGNKDHKYIGDKYFYVGDAPFVGGIGGFASVFVTASFAYGGTESIAITAGETKDPAKNLPRVVRNVFWRIVLFYIISIILIGLNVPYNYPNLSKKTTATSPFTIVFMEAGSAVAGSFINAVLMTSVISAANHALFAGSRLLYTLAVDGHAPHFFGHLNRFQIPWVAVLATSLVSGLCFGASYIGAGQLWTWLQNETSIVGVSNQISWVCIGIASLRFRAAIRRQNLEHLLPFKNWTYPVGPIIAVGLNIVLILVQGWSCFSPSFQAVDFVSFYIEIPIMIVMFLAWKLVKQTRFVHLDEMDLVTDRYDLNAEHAESDGNADGDSPSRVGRILHIKQLQSEKGVLGKLKRVGMWLFL

SEQ ID NO: 17345 - DNA, 1659 bp, Uromyces fabae
  CDS (1)..(1659)
atgagctcggacgatgtgaaggctctgggaggcgacctggagaaggcgcactctatcatggatcaagaattcgtaactgaaaaaggcaatggtactatcactgaagacaagcaagatggtcagatgcaaagacatctaaaaccacgtcacatgtcgatgatagctattggcggtactatcgggacgggattgtttattggatccggacaaggtcttaaccaaggtggcccggtaggccttcttctaggttatagcaccatgggcatcgttgtctacagtgtgatggtttcacttggcgagatggtaacaatgtttccgattactggctccttcgtgcattacgcttcccgattcgttgacccagcattagggtttgctcttggatggaactattggtattgttatgccattactttacctactgaaatcaccgctgcagggattgtgattcaatattggacaaaaagtgtgaatgtggccgtatggataacaattttcctagtggcttcatgcggtgtaaatttatttggagtcagatggtacggggaggcagaattttggtgttccgctgtcaaagtaattgctatcgtttgcttgattatacttggcattatcattgatttaggtggcggtccaaatcatgatcgaattggatttagatactggatttctcctggcccattcaatcaattgaatggcattcctggttccactggtcgattcctcgccttctggtcggtctttattcaagcatctttttcatatcaaggcacggaaatcgtagctttggcagcaggggaagctctcaacccgagaaagaccatccccaaagccatcaacagggtcttttatcgtatcctattattttatgttggtggtgtgactgtgataggattgctggtgccctacaattcaccagatttgcttggtggtactggagatgccacttcatccccatttgtgattgccatcaagtctgcaggtatctcagtgctgccagatgtgctgaatgctgtcattttggcagttgtattttcagcagctaattcagatttgtatgctgcctcaagaatgacgtttggtttagctactgatggaatggcgccagcaatattctcccgttgtacaagcaacggtttacccatcgctggattgatcctcactattggatttggtttgctagcctacatgaatgttaattcttctaccggaacagttttccagtggctcgcaaatttctcttctgtgacaggacttctaacgtggtggtctatctctcttgcctacatcaggttttaccacggcttgatacatcacaaaatagaccgcaatacctttgcatacaaggctccttaccaaccatggctctcttacttttctattactatgtctactttaatcatcttcttcaacggttttgaggttttcatgagcggaagttggtcaacttcgaagtttgtatcggcatatctttctattccaatgtttatcgtcttctttataacatggaagatctatcacaagactgcttttgttaaaattgatcagatggactttgtaacgggaaaacgcgaattcgattcaatggaacaaattgagagcgagaaagaagttgagccagttggcaaatttgcacaatttcttgaatggttaatgtag

SEQ ID NO: 17346 - protein, 552 aa, Uromyces fabae
MSSDDVKALGGDLEKAHSIMDQEFVTEKGNGTITEDKQDGQMQRHLKPRHMSMIAIGGTIGTGLFIGSGQGLNQGGPVGLLLGYSTMGIVVYSVMVSLGEMVTMFPITGSFVHYASRFVDPALGFALGWNYWYCYAITLPTEITAAGIVIQYWTKSVNVAVWITIFLVASCGVNLFGVRWYGEAEFWCSAVKVIAIVCLIILGIIIDLGGGPNHDRIGFRYWISPGPFNQLNGIPGSTGRFLAFWSVFIQASFSYQGTEIVALAAGEALNPRKTIPKAINRVFYRILLFYVGGVTVIGLLVPYNSPDLLGGTGDATSSPFVIAIKSAGISVLPDVLNAVILAVVFSAANSDLYAASRMTFGLATDGMAPAIFSRCTSNGLPIAGLILTIGFGLLAYMNVNSSTGTVFQWLANFSSVTGLLTWWSISLAYIRFYHGLIHHKIDRNTFAYKAPYQPWLSYFSITMSTLIIFFNGFEVFMSGSWSTSKFVSAYLSIPMFIVFFITWKIYHKTAFVKIDQMDFVTGKREFDSMEQIESEKEVEPVGKFAQFLEWLM

SEQ ID NO: 17347 - DNA, 1773 bp, Saccharomyces cerevisiae
  CDS (1)..(1773)
atgacaaattcaaaagaagacgccgacatagaggagaagcatatgtacaatgagccggtcacaaccctctttcacgacgttgaagcttcacaaacacaccacagacgtgggtcaataccattgaaagatgagaaaagtaaagaattgtatccattgcgctctttcccgacgagagtaaatggcgaggatacgttctctatggaggatggcataggtgatgaagatgaaggagaagtacagaacgctgaagtgaagagagagcttaagcaaagacatattggtatgattgcccttggtggtactattggtacaggtcttttcattggtttatccacacctctgaccaacgccggcccagtgggcgctcttatatcatatttatttatgggttctttggcatattctgtcacgcagtccttgggtgaaatggctacattcatccctgttacatcctctttcacagttttctcacaaagattcctttctccagcatttggtgcggccaatggttacatgtattggttttcttgggcaatcacttttgccctggaacttagtgtagttggccaagtcattcaattttggacgtacaaagttccactggcggcatggattagtattttttgggtaattatcacaataatgaacttgttccctgtcaaatattacggtgaattcgagttctgggtcgcttccatcaaagttttagccattatcgggtttctaatatactgtttttgtatggtttgtggtgctggggttaccggcccagttggattccgttattggagaaacccaggtgcctggggtccaggtataatatctaaggataaaaacgaagggaggttcttaggttgggtttcctctttgattaacgctgccttcacatttcaaggtactgaactagttggtatcactgctggtgaagctgcaaaccccagaaaatccgttccaagagccatcaaaaaagttgttttccgtatcttaaccttctacattggctctctattattcattggacttttagttccatacaatgaccctaaactaacacaatctacttcctacgtttctacttctccctttattattgctattgagaactctggtacaaaggttttgccacatatcttcaacgctgttatcttaacaaccattatttctgccgcaaattcaaatatttacgttggttcccgtattttatttggtctatcaaagaacaagttggctcctaaattcctgtcaaggaccaccaaaggtggtgttccatacattgcagttttcgttactgctgcatttggcgctttggcttacatggagacatctactggtggtgacaaagttttcgaatggctattaaatatcactggtgttgcaggcttttttgcatggttatttatctcaatctcgcacatcagatttatgcaagctttgaaataccgtggcatctctcgtgacgagttaccatttaaagctaaattaatgcccggcttggcttattatgcggccacatttatgacgatcattatcattattcaaggtttcacggcttttgcaccaaaattcaatggtgttagctttgctgccgcctatatctctattttcctgttcttagctgtttggatcttatttcaatgcatattcagatgcagatttatttggaagattggagatgtcgacatcgattccgatagaagagacattgaggcaattgtatgggaagatcatgaaccaaagactttttgggacaaattttggaatgttgtagcatag

SEQ ID NO: 17348 - protein, 590 aa, Saccharomyces cerevisiae
MTNSKEDADIEEKHMYNEPVTTLFHDVEASQTHHRRGSIPLKDEKSKELYPLRSFPTRVNGEDTFSMEDGIGDEDEGEVQNAEVKRELKQRHIGMIALGGTIGTGLFIGLSTPLTNAGPVGALISYLFMGSLAYSVTQSLGEMATFIPVTSSFTVFSQRFLSPAFGAANGYMYWFSWAITFALELSVVGQVIQFWTYKVPLAAWISIFWVIITIMNLFPVKYYGEFEFWVASIKVLAIIGFLIYCFCMVCGAGVTGPVGFRYWRNPGAWGPGIISKDKNEGRFLGWVSSLINAAFTFQGTELVGITAGEAANPRKSVPRAIKKVVFRILTFYIGSLLFIGLLVPYNDPKLTQSTSYVSTSPFIIAIENSGTKVLPHIFNAVILTTIISAANSNIYVGSRILFGLSKNKLAPKFLSRTTKGGVPYIAVFVTAAFGALAYMETSTGGDKVFEWLLNITGVAGFFAWLFISISHIRFMQALKYRGISRDELPFKAKLMPGLAYYAATFMTIIIIIQGFTAFAPKFNGVSFAAAYISIFLFLAVWILFQCIFRCRFIWKIGDVDIDSDRRDIEAIVWEDHEPKTFWDKFWNVVA

SEQ ID NO: 17349 - DNA, 1827 bp, Saccharomyces cerevisiae
  CDS (1)..(1827)
atgaagatgcctctaaagaagatgtttaccagcacgtctcctcgtaactcttcttctcttgacagtgatcatgacgcttactattcgaaacaaaatcctgacaatttccctgtaaaggagcaagaaatctataacattgacctggaagaaaacaatgtgtcctctcgttcatccacctctacatcaccttcagcaagggacgactctttcgcagttccagatggtaaagacgaaaacacgcggttgaggaaagatttaaaggcaagacatatttctatgatcgccattggtggttcattaggtacaggtctgcttataggtacaggtaccgccttattgacgggtggtccggttgcgatgttaattgcatatgcctttgtcggccttttagtcttttacaccatggcctgtcttggtgaaatggcttcttacattccattggatggttttacaagttatgcctcacgttacgtggatcctgcattaggttttgctattggttatacttaccttttcaaatatttcatcttacctcccaaccaacttactgctgctgctttggtcattcaatattggatcagcagagaccgtgttaaccctggtgtgtggattactatattcttggttgttattgtcgctatcaatgtcgtcggtgtaaaattctttggtgaatttgaattttggttgtccagtttcaaagtcatggtaatgttgggtctaatcctgttactatttattattatgcttggtggaggtcctaaccatgaccgcctagggtttagatactggcgtgatcctggtgcgttcaaagaatattcgacggctatcactggtggtaaaggtaaatttgtttcgttcgttgctgttttcgtttacagtcttttcagttacacgggtattgaattgacaggtatcgtttgttctgaagctgagaatccaagaaaaagtgttccaaaggcaattaaattgacagtttaccgtatcattgttttttacctatgcaccgttttccttttgggtatgtgcgttgcatacaatgaccctcgtttactttccacaaaaggtaagagtatgtctgctgcggcatctccattcgtggttgccattcaaaactcaggtattgaagtcttacctcatatcttcaatgcttgtgtcttggttttcgttttcagtgcttgtaactcagatttgtacgtttcttccagaaatttatatgcgttggcaattgatggtaaagcgccaaagatcttcgctaagacaagtagatggggtgttccttacaatgctttaatactctccgtgctgttttgtggcttggcgtacatgaatgtgtcttcaggatcagcaaagattttcaactactttgttaacgttgtttctatgttcggaatcttgagttggatcaccattttaattgtttacatctacttcgataaagcctgccgtgctcaagggattgacaaatcaaaatttgcttatgtcgctcctggccaacgttatggtgcttattttgctttattcttctgcattttgattgctttaatcaaaaacttcactgttttcctaggtcataaatttgattataaaacattcatcaccgggtatattggcctgcctgtctatatcatttcttgggctggttacaaattgatatacaaaaccaaagtgataaagtctaccgacgtggatttgtacacatttaaggaaatatacgatagagaagaagaagagggaagaatgaaggaccaagaaaaggaagagcgtttaaaaagtaacggtaaaaatatggagtggttctatgaaaaatttttgggtaatatcttctag

SEQ ID NO: 17350 - protein, 608 aa, Saccharomyces cerevisiae
MKMPLKKMFTSTSPRNSSSLDSDHDAYYSKQNPDNFPVKEQEIYNIDLEENNVSSRSSTSTSPSARDDSFAVPDGKDENTRLRKDLKARHISMIAIGGSLGTGLLIGTGTALLTGGPVAMLIAYAFVGLLVFYTMACLGEMASYIPLDGFTSYASRYVDPALGFAIGYTYLFKYFILPPNQLTAAALVIQYWISRDRVNPGVWITIFLVVIVAINVVGVKFFGEFEFWLSSFKVMVMLGLILLLFIIMLGGGPNHDRLGFRYWRDPGAFKEYSTAITGGKGKFVSFVAVFVYSLFSYTGIELTGIVCSEAENPRKSVPKAIKLTVYRIIVFYLCTVFLLGMCVAYNDPRLLSTKGKSMSAAASPFVVAIQNSGIEVLPHIFNACVLVFVFSACNSDLYVSSRNLYALAIDGKAPKIFAKTSRWGVPYNALILSVLFCGLAYMNVSSGSAKIFNYFVNVVSMFGILSWITILIVYIYFDKACRAQGIDKSKFAYVAPGQRYGAYFALFFCILIALIKNFTVFLGHKFDYKTFITGYIGLPVYIISWAGYKLIYKTKVIKSTDVDLYTFKEIYDREEEEGRMKDQEKEERLKSNGKNMEWFYEKFLGNIF

SEQ ID NO: 17351 - DNA, 1410 bp, Bacillus subtilis
  CDS (1)..(1410): transl_table=11
atgaaccagtctcaatcaggattaaaaaaggaattaaagacccgccatatgacaatgatttcgattgccggtgtaatcggagccggcctatttgtaggcagcggtccagtgattcactcgaccggtccgggtgccgttgtttcttacgcgttagccggattattggtgatttttattatgagaatgctcggtgagatgtctgccgtaaacccgacgagcggatcgttttctcaatacgctcacgacgccatcggaccgtgggcaggatttacaatcggctggctgtactggtttttctgggtgatcgtcatagcgatcgaagccattgccggtgctggcattattcaatactggttccatgatattccgctgtggctgacaagtttgatcttgaccattgtgctcaccctgacaaacgtctactccgttaagtctttcggtgagtttgaatattggttctccctcattaaagttgtgactatcattgcttttctaatcgttggttttgcctttatttttggctttgcaccgggcagtgagccagtcggtttttcgaatcttacaggcaaaggcggatttttcccggagggcatcagctccgtattgctcggcattgtcgttgtcatcttctcttttatgggaactgaaatcgttgccattgcagcaggggaaacatccaacccgatcgaatctgtgacaaaagccaccagatccgttgtatggcgcatcatcgtcttttacgtgggctcaatcgccattgtcgtggcgctgttgccatggaattcagcaaatattttagaaagccctttcgtcgctgtacttgagcatataggagtgcccgcagccgcacagattatgaactttatcgtcctcacagccgtactctcttgcctgaattcaggtttgtataccacatccagaatgctgtattcacttgcagaaagaaatgaagcgccgcgccgttttatgaaattgagcaaaaaaggcgttcccgtacaagccattgtggccgggacatttttctcttatatcgcggtcgtaatgaactatttttcaccggataccgtctttttattcttagtcaactcatcaggcgcaatcgctttactcgtctatcttgtcatcgccgtttcccagctgaaaatgcggaaaaaactcgaaaaaacaaacccagaagcactgaagatcaaaatgtggctcttccctttcctaacctacttgaccatcatcgccatttgcggaattttagtgtccatggcgtttattgattccatgagagacgagctgctgctgacaggcgtcatcacgggaatcgttctgatttcttaccttgtgttcagaaaacgcaaggtgagcgagaaagcggctgccaacccagtcacacagcagcaacccgatatcctgccttaa

SEQ ID NO: 17352 - protein, 469 aa, Bacillus subtilis
MNQSQSGLKKELKTRHMTMISIAGVIGAGLFVGSGPVIHSTGPGAVVSYALAGLLVIFIMRMLGEMSAVNPTSGSFSQYAHDAIGPWAGFTIGWLYWFFWVIVIAIEAIAGAGIIQYWFHDIPLWLTSLILTIVLTLTNVYSVKSFGEFEYWFSLIKVVTIIAFLIVGFAFIFGFAPGSEPVGFSNLTGKGGFFPEGISSVLLGIVVVIFSFMGTEIVAIAAGETSNPIESVTKATRSVVWRIIVFYVGSIAIVVALLPWNSANILESPFVAVLEHIGVPAAAQIMNFIVLTAVLSCLNSGLYTTSRMLYSLAERNEAPRRFMKLSKKGVPVQAIVAGTFFSYIAVVMNYFSPDTVFLFLVNSSGAIALLVYLVIAVSQLKMRKKLEKTNPEALKIKMWLFPFLTYLTIIAICGILVSMAFIDSMRDELLLTGVITGIVLISYLVFRKRKVSEKAAANPVTQQQPDILP

SEQ ID NO: 17353 - DNA, 1428 bp, Bacillus subtilis
  CDS (1)..(1428): transl_table=11
gtgaatcttcaggagaacagcagccaacagctaaaacgcacaatgaaaagcaggcacctatttatgatctcattgggaggcgtcataggcacaggacttttcctcagtacgggctatacgctacatcaagccggacccggcggtacgatactcgcttatgtaatcggcgggttgatgatgtacctcgtcatgcaatgtctcggcgaattgtcggttgccaatgcggtgaccggctcttttcaaaaatatgctacaacatttatcggtccatctaccggttttatggtcggcatcatgtactggatcaattgggtggtgacggtaggctctgagtttaccgcatccggtattctcatgcagcgctggttccctgacagcagtgtatggatgtggagtgcgatttttgcagcccttctttttatatgcaacgcattttcagttaagttatttgcggaaactgaattttggttttccagcgtaaagattgtcaccattattttatttatcattttaggaggagccgccatgtttggcctgatctctttaaacggaacggcggatgctcctatgttgtcaaacttcacagatcatggcgggttgtttccaaatggctttctcgccgtttttatcgcgatgatatctgtgagcttcgccttttccggtacagagttaatcggcgttacagcaggagaatcagcaaatcctcaaaaggatataccgcgatccatccgtaatgtcgcatggagaaccgtgatttttttcattggcgctgtcttcatattatccgggttgatttcatggaaggacgcaggcgtgattgaaagcccgtttgtcgccgtatttgcggagatcggaattccttacgctgctgatattatgaatttcgtaatattaacagccttgctgtctgtcgccaactcaggcttatatgcttcgacccgtatgatgtggtctttagcaaatgaaaacatgatcagctcccgttttaagaaagtgacatctaaaggcattcctttaaatgccttaatgatcagtatggctgtatcttgtttatctctcgtttccagtatcgtggcccctggaactgtctatgtggtgatggtcgcaattgctggatttgcaggagtcgtggtctggatgagcattgccttgtcccaactcttgtttcgaaagagatttttgaaaaaagggggggatgtaaaagatctgacatttcgcacgccgctttatcctcttatgcctatagccgctctcttattatgttctgcttcttgtatcggtcttgcttttgatcccaatcaaagaatcgcacttttctgcggagttccttgtatcatcctttgctatctcatctaccatttcaaaagaaatgttacaaaagcgaaaaaaatcagccaagaggaatatccagccgatcacatcctataa

SEQ ID NO: 17354 - protein, 475 aa, Bacillus subtilis
MNLQENSSQQLKRTMKSRHLFMISLGGVIGTGLFLSTGYTLHQAGPGGTILAYVIGGLMMYLVMQCLGELSVANAVTGSFQKYATTFIGPSTGFMVGIMYWINWVVTVGSEFTASGILMQRWFPDSSVWMWSAIFAALLFICNAFSVKLFAETEFWFSSVKIVTIILFIILGGAAMFGLISLNGTADAPMLSNFTDHGGLFPNGFLAVFIAMISVSFAFSGTELIGVTAGESANPQKDIPRSIRNVAWRTVIFFIGAVFILSGLISWKDAGVIESPFVAVFAEIGIPYAADIMNFVILTALLSVANSGLYASTRMMWSLANENMISSRFKKVTSKGIPLNALMISMAVSCLSLVSSIVAPGTVYVVMVAIAGFAGVVVWMSIALSQLLFRKRFLKKGGDVKDLTFRTPLYPLMPIAALLLCSASCIGLAFDPNQRIALFCGVPCIILCYLIYHFKRNVTKAKKISQEEYPADHIL

SEQ ID NO: 17355 - DNA, 1722 bp, Trichoderma harzianum
  CDS (1)..(1722)
atgtcgaaagaggagagtggccatgtcactcccgagaagggcgacaatgtcgtcgactatcaggccagcacgacagtcctccccagcgagggccctgagcgcgacgccaactggttcacgcgcaatggcctcaacgtcgactccttcaagaagaagcactatggcccgggcatggtcgagcttgagcgtcccatgaaggctcgccatcttcacatgattgccattggtggttccattggtgctggtttcttcgtcggctcgggcggtgctctggccaaaggtggccctggttctctctttgtcgacttcctcattatcggtatcatgatgttcaacgtcgtgtacgctctcggtgaactcgccatcatgtaccccgtctctggttctttctacacatactctgctcgtttcatcgaccctgcctggggtttcgccatgggctggaactatgttcttcagtgggctgccgttcttccgcttgaattgacagtttgtggtattacgatatcgtactggaactcggaaatcaccacagccgcttggatctctctcttcctcggcgtcatcatcatcatcaacctgtttggcgctctcggctatgctgaagaggagttttgggcatcgtgcttcaagctggctgccaccgtcatcttcatgatcatcgcttttgtccttgtcctcggtggtggtcccaaggatggccgataccacgagtactggggtgcccgctactggtacgacccgggcgcgttcaagaacggcttcaagggcttctgctccgtcttcgtcaccgctgccttctccttctccggtactgagctggtcggtcttgccgctgccgagtctactaaccccaccaagaacatgcccggtgctatcaagcaggtcttctggcgtatcaccatcttttacatcctcggtctcttctttgtcggcctgctgatcaacagcgatgatcccgctctgctctcctctgccgcctacgctgactccaaggcctctccctttgtgcttgtcggcaagtacgctggcttgaagggtttcgaccacttcatgaacctcgtcattctcgcctccgtcttgtccatcggtgtctctggtgtgtatggtggatctcgaaccctgaccgctctggctcagcagggctatgctcccaagctcttcacctacattgacaagtctggccgtcccctgccctctgtcatcttcctcatcctgttcggcttcatcgcctatgtcagcttggatgccaccggtcccgttgtctttgactggcttcttgccatttccggcttggccgctctcttcacctggggctctgtctgccttgcccacattcgattccgcaaggcctggaagtaccacggccacactctggatgagattccattcaaggctgctggcggtgtctacggctcatacctcggccttttcatttgcgtcattgtcctgatggctcagttctataccgctattgcagcccctcccggatcaccaggcgttggtaccgcagaggacttcttcaagcagtacctggctgctcccgtcgtcctcggtttctggatcgttggatggctgtggaagcgccagcctttcttgagaaccaagaacattgacgttgacactggtctccgtgagtttgactgggacgagatcaacgcagagcgcacaagaattgctcccctgcctgcctggagacgcatcatccaccacaccttctaa

SEQ ID NO: 17356 - protein, 573 aa, Trichoderma harzianum
MSKEESGHVTPEKGDNVVDYQASTTVLPSEGPERDANWFTRNGLNVDSFKKKHYGPGMVELERPMKARHLHMIAIGGSIGAGFFVGSGGALAKGGPGSLFVDFLIIGIMMFNVVYALGELAIMYPVSGSFYTYSARFIDPAWGFAMGWNYVLQWAAVLPLELTVCGITISYWNSEITTAAWISLFLGVIIIINLFGALGYAEEEFWASCFKLAATVIFMIIAFVLVLGGGPKDGRYHEYWGARYWYDPGAFKNGFKGFCSVFVTAAFSFSGTELVGLAAAESTNPTKNMPGAIKQVFWRITIFYILGLFFVGLLINSDDPALLSSAAYADSKASPFVLVGKYAGLKGFDHFMNLVILASVLSIGVSGVYGGSRTLTALAQQGYAPKLFTYIDKSGRPLPSVIFLILFGFIAYVSLDATGPVVFDWLLAISGLAALFTWGSVCLAHIRFRKAWKYHGHTLDEIPFKAAGGVYGSYLGLFICVIVLMAQFYTAIAAPPGSPGVGTAEDFFKQYLAAPVVLGFWIVGWLWKRQPFLRTKNIDVDTGLREFDWDEINAERTRIAPLPAWRRIIHHTF

SEQ ID NO: 17357 - DNA, 1836 bp, Saccharomyces cerevisiae
  CDS (1)..(1836)
atgggcaggtttagtaacataataacgtccaataaatgggacgagaaacaaaacaacattggcgaacagagcatgcaggaattaccagaagaccagatagaacatgagatggaagcaatagatccaagtaataagacgaccccatactctattgatgagaaacagtacaacacaaaaaagaagcatgggtcattgcaaggtggcgcaattgctgatgtaaattcgataactaattcgttaacaagattgcaagttgtctctcatgaaacagatattaacgaggatgaagaagaagcccactatgaggataaacacgtgaagagagccttgaagcaaagacacattggtatgattgcactaggtggtacaatcggtactggtcttttcgttggtatctccactcccttgagtaatgctggccctgtggggtccctgattgcttacattttcatgggcaccattgtctacttcgttacccagtcacttggtgagatggctacgtttatccccgtgacatcatctatcactgtcttttcgaagaggttcttatcacctgcattcggtgtttctaacggctacatgtactggttcaattgggctattacttatgctgtggaggtttctgtcattggccaagttattgaatactggacagataaagttccattagcggcctggattgcgatattctgggtaattattactttgatgaattttttccctgtcaaagtttatggtgaatttgagttctgggtggcctctgttaaagttttagccattatgggttacttgatatatgctttgattattgtctgcggtggatcccaccagggccctatcggtttcaggtactggagaaatccaggagcctgggggccaggcatcatctccagtgataaaagtgaaggccgttttctcggatgggtctcctccttgattaatgctgcatttacgtaccaaggtactgaactggttgggatcaccgctggtgaagcggctaacccaagaaagaccgttccaagagctatcaataaagtcgtctttagaatcgtactattctatattatgtctttgttctttattggtctactggttccatacaacgattcccgtttatctgctagttctgctgttattgcatcatcacccttcgttatttccattcaaaacgctggtacttatgctcttccagatattttcaacgccgtggtgttgattactgttgtatctgccgctaattcgaatgtttacgttggttcccgtgttctttactctttagctaggactggtaacgcaccaaagcaatttggatacgtcaccagacagggtgttccatatctcggtgttgtttgcactgctgcattgggtcttttggcattcctggttgtcaataacaatgcaaacactgcatttaactggttgatcaacatttccactttggctgggttatgcgcctggttattcatctctttggcacatattaggttcatgcaagctttaaagcaccgtggtatttctcgtgatgatctgcccttcaaggccaaattgatgccttatggtgcctactacgcagccttttttgtcaccgtcatcatattcatccaagggttccaagcgttctgtccgttcaaagtttctgagtttttcacatcttacatctccttgattcttttagccgttgtgttcattggttgccagatatactacaaatgcagatttatttggaagctagaagatattgacatcgattccgacagaagagaaatcgaagcaattatttgggaagacgacgagcctaagaatttatgggagaaattctgggctgctgttgcatag

SEQ ID NO: 17358 - protein, 611 aa, Saccharomyces cerevisiae
MGRFSNIITSNKWDEKQNNIGEQSMQELPEDQIEHEMEAIDPSNKTTPYSIDEKQYNTKKKHGSLQGGAIADVNSITNSLTRLQVVSHETDINEDEEEAHYEDKHVKRALKQRHIGMIALGGTIGTGLFVGISTPLSNAGPVGSLIAYIFMGTIVYFVTQSLGEMATFIPVTSSITVFSKRFLSPAFGVSNGYMYWFNWAITYAVEVSVIGQVIEYWTDKVPLAAWIAIFWVIITLMNFFPVKVYGEFEFWVASVKVLAIMGYLIYALIIVCGGSHQGPIGFRYWRNPGAWGPGIISSDKSEGRFLGWVSSLINAAFTYQGTELVGITAGEAANPRKTVPRAINKVVFRIVLFYIMSLFFIGLLVPYNDSRLSASSAVIASSPFVISIQNAGTYALPDIFNAVVLITVVSAANSNVYVGSRVLYSLARTGNAPKQFGYVTRQGVPYLGVVCTAALGLLAFLVVNNNANTAFNWLINISTLAGLCAWLFISLAHIRFMQALKHRGISRDDLPFKAKLMPYGAYYAAFFVTVIIFIQGFQAFCPFKVSEFFTSYISLILLAVVFIGCQIYYKCRFIWKLEDIDIDSDRREIEAIIWEDDEPKNLWEKFWAAVA

SEQ ID NO: 17359 - DNA, 1725 bp, Schizosaccharomyces pombe
  CDS (1)..(1725)
atgctctccaaattttacgaagacatagattccaaattggaaaatgcaatgttatctcaaatagaaagcagtacaataacttgtgatggtaaatccctaaacacattgcctacccctaaacaagaggatgtcgagtttggcgttcctctgcagccagaagacactcaagatctccaaagaaagctgaagccccggcatatgcaaatgattgccataggaggatgcgttggcactggtctgtttgttggttcgggtaatgcactggccgatggtggtcctgctagtattcttatagccttcgcagtgataggaacttatgttttatttacaaccagcgcgttggcagaactctccgcaatttatcccgtttccggttcattttatacatacttttcgaaattcatcgacccggcatgggggtttgctgttggtatacagtattggttatcttttgccgtgaccgttccattagaacttacagttgccccgttgattattaatttttggaatgcatctggtccggtttcgatttggatttcagttttttacgtaattattatcgcgattaacatttggggaaccgaggggtatggtgaggtggaattttttttgagtatcatgaaagtcatttcagtcatcggttttgtaattctaagcataataattgcagcaggtggagtaccaactgatgatcgaggagtaatcggagtgtcatattggaaacaaccgttggtttttaacaatggattcaaagggttatgcgctgtttctgttatagctattttctccctgtcaggaaccgaactagttggtcttgccgcatcagaagcaaagaatcctcaaaaaacagttcccgcagcagtcaaacaaatattttggcgtattttcttgttctatattgttgctcttttcatgcttactttggtggttccgtctgacctacctgggctacgcacgagcgataactcaaatgtgctaatttcaccattcgttattgccattcaactggcaaatataagggcacttccgagcatcatgaacgtagtaattctgctttccacattatccgtaggaaattcagcttcctatgcggcgtcacgtgccttgtttgctttagcaaagaacggctatgcacctaagatttttaataaaactaacaaacgaggtcatccaatttatgcaattgccgtaacgcttttatttggttctatagcatacttcactgaagctggagttggcggcgcactctttggttggttgttatcaatatgtggtttgtcaacaacatttatatggggaagtatttgcctcgcccatattcaatttagaagagcgtggaaaatacaaaataggaaactagaagatcttccttaccgtagcatttttggagtatatggatctatttatggtgtggccatgacaatattggctttaattgcccaattttatgtcgcggtattcccaattggaaaaaaaccaaatccagtggatttttttcaggcatatatggctgcacccatattaattatcagctttgtggcatggaagttttttagacgtacatcatttgttcgtatcgaaaaaattgatctttcagagggtgcgcatggcgaacagaaacaaaatctcgaacccgtcatcaatatacccgttgaagagatagacttcccaatgaaagtagccaccaaggagagcatgaaaaatgtagagaaaaatgcgttatga

SEQ ID NO: 17360 - protein, 574 aa, Schizosaccharomyces pombe
MLSKFYEDIDSKLENAMLSQIESSTITCDGKSLNTLPTPKQEDVEFGVPLQPEDTQDLQRKLKPRHMQMIAIGGCVGTGLFVGSGNALADGGPASILIAFAVIGTYVLFTTSALAELSAIYPVSGSFYTYFSKFIDPAWGFAVGIQYWLSFAVTVPLELTVAPLIINFWNASGPVSIWISVFYVIIIAINIWGTEGYGEVEFFLSIMKVISVIGFVILSIIIAAGGVPTDDRGVIGVSYWKQPLVFNNGFKGLCAVSVIAIFSLSGTELVGLAASEAKNPQKTVPAAVKQIFWRIFLFYIVALFMLTLVVPSDLPGLRTSDNSNVLISPFVIAIQLANIRALPSIMNVVILLSTLSVGNSASYAASRALFALAKNGYAPKIFNKTNKRGHPIYAIAVTLLFGSIAYFTEAGVGGALFGWLLSICGLSTTFIWGSICLAHIQFRRAWKIQNRKLEDLPYRSIFGVYGSIYGVAMTILALIAQFYVAVFPIGKKPNPVDFFQAYMAAPILIISFVAWKFFRRTSFVRIEKIDLSEGAHGEQKQNLEPVINIPVEEIDFPMKVATKESMKNVEKNAL

SEQ ID NO: 17361 - DNA, 1404 bp, Escherichia coli
  CDS (1)..(1404)
atgcaaacaacacaacaaaatgcgccactgaagcgcacaatgaaaacgcgtcacctgattatgctttccttgggcggcgtgattggcacaggattattcttcaataccgggtacatcatttccaccactggagcggcgggaacgctgctggcctatctgattggtgcgctggtggtctggctggttatgcagtgtctgggcgagctgtcggtcgcgatgccggagaccggagcgtttcacgtttatgccgcgcgctatcttggtccggctaccgggtataccgtggcctggctttactggctgacctggaccgtggcgctgggttcgagctttaccgccgctggattctgtatgcagtactggtttccacaggtgccggtatgggtctggtgcgtggtgttctgcgcgattatttttggtctgaatgttatctccacgcgcttttttgccgaaggggagttctggttctcgctggtcaaagtggtcactatcatcgcctttatcatcctcggtggggcggcgattttcggctttattccgatgcaggatggctcgcccgcgccggggctgagtaatatcacggcagaaggctggttcccgcacggtggcttaccgattttgatgactatggtggcagtgaactttgctttttcgggtaccgagcttatcggcattgccgccggtgaaacggaaaacccgcgcaaagttatcccggtagcgattcgtactaccatcgcgcgactgattattttctttatcggcaccgtgtttgtgctggcagcgctgatcccgatgcagcaggtgggcgtggagaaaagcccgtttgtgctggtatttgagaaagtagggatcccgtacgccgctgatatttttaacttcgtgatcctgacggctattctttctgcagcgaactccgggttatatgcctccgggcgcatgctgtggtcgttgtcgaatgaacgtacgctaccggcctgttttgcgcgagtaacgaaaaacggcgtgccactgacggcgctgtcggtcagtatgctcggtggtgtgctggcgctgttttccagcgtggtggccccggacacggtatttgttgcgctgtcggcaatctccgggtttgcggtggtagcggtgtggctgagtatctgcgcctcgcattttgtttttcgtcgccgtcatctgcaacaaggtaaggcattgagtgaattacattatcgcgcgccgtggtatccgctggtgccagtattaggttttgtgctgtgcctggtggcctgtgttgggctggcattcgatccagcgcagagaattgcgttgtggtgcgggttaccgtttgttgcgttgtgctatggtgcttatttccttactcaaccccgaaacgcaaaacaggagccagaacatgtcgcagaataa

SEQ ID NO: 17362 - protein, 467 aa, Escherichia coli
MQTTQQNAPLKRTMKTRHLIMLSLGGVIGTGLFFNTGYIISTTGAAGTLLAYLIGALVVWLVMQCLGELSVAMPETGAFHVYAARYLGPATGYTVAWLYWLTWTVALGSSFTAAGFCMQYWFPQVPVWVWCVVFCAIIFGLNVISTRFFAEGEFWFSLVKVVTIIAFIILGGAAIFGFIPMQDGSPAPGLSNITAEGWFPHGGLPILMTMVAVNFAFSGTELIGIAAGETENPRKVIPVAIRTTIARLIIFFIGTVFVLAALIPMQQVGVEKSPFVLVFEKVGIPYAADIFNFVILTAILSAANSGLYASGRMLWSLSNERTLPACFARVTKNGVPLTALSVSMLGGVLALFSSVVAPDTVFVALSAISGFAVVAVWLSICASHFVFRRRHLQQGKALSELHYRAPWYPLVPVLGFVLCLVACVGLAFDPAQRIALWCGLPFVALCYGAYFLTQPRNAKQEPEHVAE

SEQ ID NO: 17363 - DNA, 1413 bp, Bacillus subtilis
  CDS (1)..(1413): transl_table=11
atgcagaatcataaaaatgaattgcagcgcagcatgaaaagcaggcatttgtttatgattgctttgggaggggtgattggcactgggctgtttctaggctctggctttaccattagccaggcgggaccgctcggcgccattgccgcgtatatcatcggcggatttttaatgtatctcgtcatgctttgtttaggagaattggctgttgccatgccggtggccggatcgtttcaggcctacgccactaaatttctgggacagtcgacaggctttatgattggctggctgtattggttcagctgggccaatacagtagggttagagctgacgtcagcaggcattttgatgcaaaggtggctgccctccgttccgatctggatatggtgcctcgtgttcggcatcgtcatctttttgattaatgcgctctctgtcagaagctttgcggaaatggaattttggttttcaagcatcaaagtggcggcgatcatattatttattgtgattggcggagccgctgtgtttggcttgattgactttaaaggcggacaggagacaccctttttgtctaactttatgactgatagagggcttttccctaatggggtgctggccgttatgtttacgctggtcatggtaaacttctcgttccagggaacggagcttgtcggcattgcggcaggggaaagtgaaagcccggaaaaaacactgccaaagtccattcgaaatgttatttggcgcacgctgtttttctttgtgctcgctatgttcgtcttggttgccatccttccgtacaaaacggcgggggtgattgaaagcccgtttgtagcagtactcgatcaaatcggcatcccattttcggcagatatcatgaactttgtcatcttaacggccattttatctgttgctaattcgggattgtatgcggcgtcgcgtatgatgtggtcactttcatcaaatcaaatgggtccctcctttctcaccagactgacaaaaaaaggcgtgccgatgaatgccctgctgattacgctaggcatttcaggctgttcgctgctgacaagtgtcatggctgcagaaacagtgtatttatggtgtatctcaatctcgggcatggtgacagttgtcgcgtggatgtccatttgtgcgtcgcaatttttctttcgcaggcgtttcctggcagaaggcggaaatgtgaatgatctggagttcagaacgccgctttatccgctagtcccgattctcggattttgtttatatggctgcgtgttgatcagccttattttcattccggatcaaagaattggcttatactgcggtgtgccgatcattattttctgttatgcatactatcatctaagcatcaaaaagcgtataaatcatgaaacgattgaaaaaaagcagacagaggcgcaatag

SEQ ID NO: 17364 - protein, 470 aa, Bacillus subtilis
MQNHKNELQRSMKSRHLFMIALGGVIGTGLFLGSGFTISQAGPLGAIAAYIIGGFLMYLVMLCLGELAVAMPVAGSFQAYATKFLGQSTGFMIGWLYWFSWANTVGLELTSAGILMQRWLPSVPIWIWCLVFGIVIFLINALSVRSFAEMEFWFSSIKVAAIILFIVIGGAAVFGLIDFKGGQETPFLSNFMTDRGLFPNGVLAVMFTLVMVNFSFQGTELVGIAAGESESPEKTLPKSIRNVIWRTLFFFVLAMFVLVAILPYKTAGVIESPFVAVLDQIGIPFSADIMNFVILTAILSVANSGLYAASRMMWSLSSNQMGPSFLTRLTKKGVPMNALLITLGISGCSLLTSVMAAETVYLWCISISGMVTVVAWMSICASQFFFRRRFLAEGGNVNDLEFRTPLYPLVPILGFCLYGCVLISLIFIPDQRIGLYCGVPIIIFCYAYYHLSIKKRINHETIEKKQTEAQ

SEQ ID NO: 17365 - DNA, 1404 bp, Bacillus subtilis
  CDS (1)..(1404): transl_table=11
gtgaatacaaaccaagataacggaaatcagctccagcggacaatgaaatcacgccatttgttcatgatttcattgggcggagtgatcggaaccggtttcttccttggaaccgggtttaccattaaccaagcgggaccgctcggcgcggttctgtcctatttagtgggcggctttatcatgtttttgaccatgctctgcttaggagagctggcagtcgcctttcctgtgtcggggtccttccagacctatgccacgaaatttatcagcccggccttcgggtttgcgttcggctggctgtactggctcggctgggcggttacatgcgccattgaatttttatcagcggggcagctgatgcaacgctggtttccgcatatagacgtgtggatctggtgtctggtctttgcggcactgatgtttattttaaatgcgatcaccacaaaagcctttgcggaatctgaattctggttctcaggcattaaaattttgattatccttttatttattattctcggcggagctgccatgtttggcctgattgatctgaagggcggagagcaggcgccgtttttgacacatttttatgaagacgggttatttccgaacggcataaaggcaatgctgattacgatgattactgtgaactttgcgtttcaggggactgagctgatcggggttgcagccggagaaagtgaagaccctgaaaaaacgattccgcggtccatcaaacagacagtatggagaacgcttgtgttctttgtgctttcaatcattgtcattgccggcatgattccgtggaaacaggcgggtgtcgtggaaagtccatttgttgccgtatttgagcaaatcggaatcccatatgcagctgatatcatgaactttgttattttaatcgcactgttatctgttgcgaactcaggtttatacgcatcaacacgtattctgtacgcgatggcgaatgaaggacaagccttcaaagcgcttggcaaaacaaatcagcgcggtgtaccgatgtactcgttaatcgtaacgatggctgtggcctgcctatcacttctgacaaagtttgcgcaggctgaaaccgtatatatggtactgttatctttggcgggcatgagcgcgcaggtcggctggattacgatctcgctttcccaaatcatgttcagacgcaaatatatccgtgagggcgggaagatagaagatttgaaatttaaaacaccgctgtacccggtgcttccgctgatcggcctaacgttaaatacggtcgtgctcatcagtcttgcatttgatccggagcagcgtatcgcgctgtattgcggcgtaccgtttatgatcatttgctacatcatttatcatgtcgtcattaaaaaacgccagcaggcaaatcgtcagctagagctttaa

SEQ ID NO: 17366 - protein, 467 aa, Bacillus subtilis
MNTNQDNGNQLQRTMKSRHLFMISLGGVIGTGFFLGTGFTINQAGPLGAVLSYLVGGFIMFLTMLCLGELAVAFPVSGSFQTYATKFISPAFGFAFGWLYWLGWAVTCAIEFLSAGQLMQRWFPHIDVWIWCLVFAALMFILNAITTKAFAESEFWFSGIKILIILLFIILGGAAMFGLIDLKGGEQAPFLTHFYEDGLFPNGIKAMLITMITVNFAFQGTELIGVAAGESEDPEKTIPRSIKQTVWRTLVFFVLSIIVIAGMIPWKQAGVVESPFVAVFEQIGIPYAADIMNFVILIALLSVANSGLYASTRILYAMANEGQAFKALGKTNQRGVPMYSLIVTMAVACLSLLTKFAQAETVYMVLLSLAGMSAQVGWITISLSQIMFRRKYIREGGKIEDLKFKTPLYPVLPLIGLTLNTVVLISLAFDPEQRIALYCGVPFMIICYIIYHVVIKKRQQANRQLEL

SEQ ID NO: 17367 - DNA, 25 bp, Artificial sequence
  Primer sequence
atggtttccgaaactaaaaccacag

SEQ ID NO: 17368 - DNA, 25 bp, Artificial sequence
  Primer sequence
ttatttcttatcgttctgcgggaac

SEQ ID NO: 17369 - protein, 489 aa, Artificial sequence
  Consensus
  Variant (2)..(2): Xaa in position 2 is any amino acid
  Variant (4)..(4): Xaa in position 4 is any amino acid
  Variant (6)..(7): Xaa in position 6 to 7 is any amino acid
  Variant (11)..(11): Xaa in position 11 is any amino acid
  Variant (16)..(18): Xaa in position 16 to 18 is any or no amino acid
  Variant (21)..(21): Xaa in position 21 is any amino acid
  Variant (29)..(29): Xaa in position 29 is any amino acid
  Variant (32)..(33): Xaa in position 32 to 33 is any amino acid
  Variant (35)..(36): Xaa in position 35 to 36 is any amino acid
  Variant (40)..(40): Xaa in position 40 is any or no amino acid
  Variant (42)..(42): Xaa in position 42 is any amino acid
  Variant (47)..(49): Xaa in position 47 to 49 is any amino acid
  Variant (51)..(51): Xaa in position 51 is any amino acid
  Variant (55)..(55): Xaa in position 55 is any amino acid
  Variant (58)..(59): Xaa in position 58 to 59 is any amino acid
  Variant (65)..(66): Xaa in position 65 to 66 is any amino acid
  Variant (69)..(70): Xaa in position 69 to 70 is any amino acid
  Variant (74)..(75): Xaa in position 74 to 75 is any amino acid
  Variant (78)..(78): Xaa in position 78 is any amino acid
  Variant (82)..(85): Xaa in position 82 to 85 is any amino acid
  Variant (88)..(88): Xaa in position 88 is any amino acid
  Variant (92)..(92): Xaa in position 92 is any amino acid
  Variant (95)..(96): Xaa in position 95 to 96 is any amino acid
  Variant (98)..(98): Xaa in position 98 is any amino acid
  Variant (100)..(101): Xaa in position 100 to 101 is any amino acid
  Variant (103)..(103): Xaa in position 103 is any amino acid
  Variant (105)..(110): Xaa in position 105 to 110 is any amino acid
  Variant (113)..(114): Xaa in position 113 to 114 is any amino acid
  Variant (116)..(121): Xaa in position 116 to 121 is any amino acid
  Variant (122)..(125): Xaa in position 122 to 125 is any or no amino acid
  Variant (127)..(128): Xaa in position 127 to 128 is any amino acid
  Variant (131)..(132): Xaa in position 131 to 132 is any amino acid
  Variant (135)..(136): Xaa in position 135 to 136 is any amino acid
  Variant (139)..(140): Xaa in position 139 to 140 is any amino acid
  Variant (142)..(142): Xaa in position 142 is any amino acid
  Variant (144)..(144): Xaa in position 144 is any amino acid
  Variant (148)..(148): Xaa in position 148 is any amino acid
  Variant (152)..(152): Xaa in position 152 is any amino acid
  Variant (154)..(154): Xaa in position 154 is any amino acid
  Variant (158)..(159): Xaa in position 158 to 159 is any amino acid
  Variant (162)..(162): Xaa in position 162 is any amino acid
  Variant (168)..(170): Xaa in position 168 to 170 is any amino acid
  Variant (172)..(172): Xaa in position 172 is any amino acid
  Variant (174)..(190): Xaa in position 174 to 190 is any amino acid
  Variant (191)..(198): Xaa in position 191 to 198 is any or no amino acid
  Variant (200)..(201): Xaa in position 200 to 201 is any amino acid
  Variant (203)..(210): Xaa in position 203 to 210 is any amino acid
  Variant (211)..(220): Xaa in position 211 to 220 is any or no amino acid
  Variant (222)..(224): Xaa in position 222 to 224 is any amino acid
  Variant (228)..(228): Xaa in position 228 is any amino acid
  Variant (236)..(236): Xaa in position 236 is any amino acid
  Variant (241)..(242): Xaa in position 241 to 242 is any amino acid
  Variant (244)..(244): Xaa in position 244 is any amino acid
  Variant (246)..(246): Xaa in position 246 is any amino acid
  Variant (253)..(255): Xaa in position 253 to 255 is any amino acid
  Variant (264)..(265): Xaa in position 264 to 265 is any amino acid
  Variant (267)..(267): Xaa in position 267 is any amino acid
  Variant (270)..(271): Xaa in position 270 to 271 is any amino acid
  Variant (276)..(279): Xaa in position 276 to 279 is any amino acid
  Variant (281)..(283): Xaa in position 281 to 283 is any amino acid
  Variant (284)..(293): Xaa in position 284 to 293 is any or no amino acid
  Variant (296)..(297): Xaa in position 296 to 297 is any amino acid
  Variant (300)..(302): Xaa in position 300 to 302 is any amino acid
  Variant (305)..(306): Xaa in position 305 to 306 is any amino acid
  Variant (309)..(309): Xaa in position 309 is any amino acid
  Variant (313)..(313): Xaa in position 313 is any amino acid
  Variant (322)..(322): Xaa in position 322 is any amino acid
  Variant (329)..(330): Xaa in position 329 to 330 is any amino acid
  Variant (336)..(336): Xaa in position 336 is any amino acid
  Variant (339)..(348): Xaa in position 339 to 348 is any amino acid
  Variant (350)..(353): Xaa in position 350 to 353 is any amino acid
  Variant (354)..(354): Xaa in position 354 is any or no amino acid
  Variant (358)..(359): Xaa in position 358 to 359 is any amino acid
  Variant (362)..(363): Xaa in position 362 to 363 is any amino acid
  Variant (365)..(369): Xaa in position 365 to 369 is any amino acid
  Variant (371)..(372): Xaa in position 371 to 372 is any amino acid
  Variant (374)..(381): Xaa in position 374 to 381 is any amino acid
  Variant (382)..(383): Xaa in position 382 to 383 is any or no amino acid
  Variant (385)..(386): Xaa in position 385 to 386 is any amino acid
  Variant (388)..(389): Xaa in position 388 to 389 is any amino acid
  Variant (390)..(393): Xaa in position 390 to 393 is any or no amino acid
  Variant (396)..(399): Xaa in position 396 to 399 is any amino acid
  Variant (401)..(401): Xaa in position 401 is any amino acid
  Variant (403)..(404): Xaa in position 403 to 404 is any amino acid
  Variant (406)..(407): Xaa in position 406 to 407 is any amino acid
  Variant (409)..(411): Xaa in position 409 to 411 is any amino acid
  Variant (415)..(419): Xaa in position 415 to 419 is any amino acid
  Variant (421)..(423): Xaa in position 421 to 423 is any amino acid
  Variant (424)..(426): Xaa in position 424 to 426 is any or no amino acid
  Variant (428)..(428): Xaa in position 428 is any amino acid
  Variant (431)..(433): Xaa in position 431 to 433 is any amino acid
  Variant (436)..(437): Xaa in position 436 to 437 is any amino acid
  Variant (439)..(440): Xaa in position 439 to 440 is any amino acid
  Variant (442)..(449): Xaa in position 442 to 449 is any amino acid
  Variant (451)..(462): Xaa in position 451 to 462 is any amino acid
  Variant (463)..(475): Xaa in position 463 to 475 is any or no amino acid
  Variant (477)..(478): Xaa in position 477 to 478 is any amino acid
  Variant (480)..(485): Xaa in position 480 to 485 is any amino acid
  Variant (487)..(488): Xaa in position 487 to 488 is any amino acid
LXRXLXXRHLXMIALXXXGGXIGTGLFLXSGXXIXXAGPXGXLLAYXXXGXMVYXLMXXLGELAXXMPXXGSFXXYAXRFVXXXXGFXLGWXYWXXWXVXXAXEXXXXXXVMXXWXXXXXXXXXXWXXIFXXLIXXLNXXSXRXFGEXEFWXSXIKVXXIIXFIILGXXXIXGXXXXXXXXXXXXXXXXXXXXXXXXXFXXGXXXXXXXXXXXXXXXXXXLXXXFSFXGTELIGIXAGESXXPXKXIPKAIRXXXWRILLFYVXXIXVIXXLIPYXXXXLXXXXXXXXXXXXXPFXXVFXXXGIXXAAXIMNXVILTAVLSXANSGLYXXTRMLWXLAXXXXXXXXXXKXXXXXGVPXXALXXTXXXXXLXXLXXXXXXXXXXYXXLXXXXXXSGXXXXIXWXXIXXSXXXFRRXXXXXGXXXXXXLXYKXXXYPXXPXXAXXXXXXXXLXXXXXXXXXXXXXXXXXXXXXXXXXYXXIXXXXXXYXXY

SEQ ID NO: 17370 - protein, 78 aa, Artificial sequence
  Consensus
  Variant (2)..(2): Xaa in position 2 is Ile or Leu
  Variant (3)..(3): Xaa in position 3 is Ala or Ser
  Variant (4)..(4): Xaa in position 4 is Ile, Leu, Met or Val
  Variant (7)..(7): Xaa in position 7 is any amino acid
  Variant (14)..(14): Xaa in position 14 is any amino acid
  Variant (15)..(16): Xaa in position 15 to 16 is any or no amino acid
  Variant (18)..(23): Xaa in position 18 to 23 is any amino acid
  Variant (24)..(25): Xaa in position 24 to 25 is any or no amino acid
  Variant (27)..(27): Xaa in position 27 is Ala or Pro
  Variant (28)..(28): Xaa in position 28 is any amino acid
  Variant (29)..(29): Xaa in position 29 is Gly or Ser
  Variant (30)..(32): Xaa in position 30 to 32 is any amino acid
  Variant (33)..(33): Xaa in position 33 is Ala, Gly, Ser or Thr
  Variant (34)..(34): Xaa in position 34 is Phe or Tyr
  Variant (35)..(37): Xaa in position 35 to 37 is any amino acid
  Variant (38)..(38): Xaa in position 38 is Ala, Gly or Ser
  Variant (39)..(39): Xaa in position 39 is any amino acid
  Variant (40)..(40): Xaa in position 40 is Ile, Leu, Met or Val
  Variant (41)..(41): Xaa in position 41 is any amino acid
  Variant (42)..(42): Xaa in position 42 is Phe, Trp or Tyr
  Variant (43)..(46): Xaa in position 43 to 46 is any amino acid
  Variant (47)..(47): Xaa in position 47 is Ala, Cys, Ser or Thr
  Variant (48)..(48): Xaa in position 48 is Ile or Leu
  Variant (49)..(49): Xaa in position 49 is Ala, Asp or Gly
  Variant (51)..(51): Xaa in position 51 is Leu or Met
  Variant (52)..(52): Xaa in position 52 is Ala, Cys, Ser, Thr or Val
  Variant (53)..(53): Xaa in position 53 is Ala, Ser, Thr or Val
  Variant (54)..(55): Xaa in position 54 to 55 is any amino acid
  Variant (57)..(58): Xaa in position 57 to 58 is any amino acid
  Variant (59)..(59): Xaa in position 59 is Ala, Gly or Ser
  Variant (60)..(60): Xaa in position 60 is Ala, Ser or Thr
  Variant (61)..(63): Xaa in position 61 to 63 is any amino acid
  Variant (64)..(64): Xaa in position 64 is Phe, His or Tyr
  Variant (65)..(65): Xaa in position 65 is Ala, Gly, Asn, Pro, Ser or Thr
  Variant (66)..(67): Xaa in position 66 to 67 is any amino acid
  Variant (68)..(68): Xaa in position 68 is Phe, His or Tyr
  Variant (69)..(69): Xaa in position 69 is Ile, Leu or Val
  Variant (70)..(70): Xaa in position 70 is Asp, Glu, Gly, Asn or Ser
  Variant (71)..(71): Xaa in position 71 is any amino acid
  Variant (72)..(72): Xaa in position 72 is Ala, Gly or Ser
  Variant (73)..(73): Xaa in position 73 is any amino acid
  Variant (74)..(74): Xaa in position 74 is Ala or Gly
  Variant (75)..(77): Xaa in position 75 to 77 is any amino acid
  Variant (78)..(78): Xaa in position 78 is Ala, Gly, Ser or Thr
MXXXGGXIGTGLFXXXGXXXXXXXXGXXXXXXXXXXXXXXXXXXXXXXXEXXXXXPXXXXXXXXXXXXXXXXXXXXXX

SEQ ID NO: 17371 - protein, 59 aa, Artificial sequence
  Consensus
  Variant (2)..(21): Xaa in position 2 to 21 is any amino acid
  Variant (22)..(23): Xaa in position 22 to 23 is any or no amino acid
  Variant (25)..(25): Xaa in position 25 is any amino acid
  Variant (26)..(26): Xaa in position 26 is Phe, Ile, Leu, Met or Val
  Variant (27)..(27): Xaa in position 27 is Ala, Gly, Pro, Ser or Thr
  Variant (28)..(28): Xaa in position 28 is Ala, Ser, Thr or Val
  Variant (29)..(30): Xaa in position 29 to 30 is any amino acid
  Variant (31)..(31): Xaa in position 31 is Phe or Tyr
  Variant (32)..(32): Xaa in position 32 is Ala or Gly
  Variant (34)..(34): Xaa in position 34 is any amino acid
  Variant (36)..(36): Xaa in position 36 is Phe or Tyr
  Variant (38)..(38): Xaa in position 38 is any amino acid
  Variant (39)..(39): Xaa in position 39 is Ala or Ser
  Variant (40)..(40): Xaa in position 40 is any amino acid
  Variant (41)..(41): Xaa in position 41 is Phe, Ile, Leu or Val
  Variant (44)..(44): Xaa in position 44 is any amino acid
  Variant (45)..(45): Xaa in position 45 is Ala, Thr or Val
  Variant (46)..(46): Xaa in position 46 is Ile, Met or Val
  Variant (47)..(47): Xaa in position 47 is Ile, Leu, Met or Val
  Variant (48)..(49): Xaa in position 48 to 49 is any amino acid
  Variant (50)..(50): Xaa in position 50 is Ile, Leu or Val
  Variant (51)..(51): Xaa in position 51 is Ala, Gly, Ile, Leu or Val
  Variant (52)..(58): Xaa in position 52 to 58 is any amino acid
WXXXXXXXXXXXXXXXXXXXXXXNXXXXXXXXEXEXWXXXXKVXXXXXXXXXXXXXXXG

SEQ ID NO: 17372 - protein, 47 aa, Artificial sequence
  Consensus
  Variant (2)..(2): Xaa in position 2 is Cys, Ser, Thr or Val
  Variant (4)..(4): Xaa in position 4 is any amino acid
  Variant (5)..(5): Xaa in position 5 is Ile, Leu, Met or Val
  Variant (7)..(7): Xaa in position 7 is any amino acid
  Variant (8)..(8): Xaa in position 8 is any or no amino acid
  Variant (10)..(10): Xaa in position 10 is any or no amino acid
  Variant (13)..(13): Xaa in position 13 is Ala, Gln, Ser or Thr
  Variant (14)..(15): Xaa in position 14 to 15 is any amino acid
  Variant (17)..(18): Xaa in position 17 to 18 is any amino acid
  Variant (19)..(19): Xaa in position 19 is Ala, Asp, Asn, Ser, Thr or Val
  Variant (20)..(20): Xaa in position 20 is Ile, Leu, Met or Val
  Variant (22)..(22): Xaa in position 22 is any amino acid
  Variant (23)..(23): Xaa in position 23 is Ala, Gly, Ser or Val
  Variant (24)..(29): Xaa in position 24 to 29 is any amino acid
  Variant (31)..(33): Xaa in position 31 to 33 is any amino acid
  Variant (35)..(35): Xaa in position 35 is Phe or Tyr
  Variant (36)..(37): Xaa in position 36 to 37 is any amino acid
  Variant (38)..(38): Xaa in position 38 is Ala, Cys, Ser or Thr
  Variant (39)..(39): Xaa in position 39 is Ile, Leu, Met or Val
  Variant (40)..(40): Xaa in position 40 is any amino acid
  Variant (41)..(41): Xaa in position 41 is Phe, Ile, Leu or Val
  Variant (42)..(42): Xaa in position 42 is Ile, Leu, Met or Val
  Variant (43)..(43): Xaa in position 43 is Ala, Cys, Gly, Ser or Val
  Variant (44)..(45): Xaa in position 44 to 45 is any amino acid
  Variant (46)..(46): Xaa in position 46 is Phe, Ile, Leu or Val
  Variant (47)..(47): Xaa in position 47 is Asn, Pro or Ser
GXEXXGXXAXGEXXXPXXXXPXXXXXXXXRXXXFXXXXXXXXXXXXX

SEQ ID NO: 17373 - protein, 66 aa, Artificial sequence
  Consensus
  Variant (2)..(8): Xaa in position 2 to 8 is any amino acid
  Variant (10)..(12): Xaa in position 10 to 12 is any amino acid
  Variant (14)..(14): Xaa in position 14 is Ala or Gly
  Variant (15)..(15): Xaa in position 15 is Ala, Asp, Gly, Gln, Ser or Thr
  Variant (16)..(16): Xaa in position 16 is any amino acid
  Variant (17)..(17): Xaa in position 17 is Phe, Ile, Leu or Met
  Variant (19)..(19): Xaa in position 19 is any amino acid
  Variant (20)..(20): Xaa in position 20 is Ile or Val
  Variant (21)..(21): Xaa in position 21 is Ile, Leu or Val
  Variant (22)..(22): Xaa in position 22 is Ile, Leu or Met
  Variant (23)..(23): Xaa in position 23 is any amino acid
  Variant (24)..(24): Xaa in position 24 is Ala or Ser
  Variant (25)..(25): Xaa in position 25 is Ala, Ile, Leu or Val
  Variant (26)..(26): Xaa in position 26 is Ile, Leu, Met or Val
  Variant (28)..(28): Xaa in position 28 is Ala, Cys, Ser or Val
  Variant (29)..(29): Xaa in position 29 is any amino acid
  Variant (30)..(30): Xaa in position 30 is Asn or Thr
  Variant (31)..(31): Xaa in position 31 is any amino acid
  Variant (32)..(32): Xaa in position 32 is Ala, Gly, Ser or Val
  Variant (33)..(33): Xaa in position 33 is Ile, Leu, Met or Val
  Variant (34)..(34): Xaa in position 34 is Phe or Tyr
  Variant (35)..(35): Xaa in position 35 is Ala, Ser, Thr or Val
  Variant (36)..(36): Xaa in position 36 is Ala, Cys, Gly, Asn, Ser or Thr
  Variant (37)..(37): Xaa in position 37 is Ala, Gly, Ser, Thr or Val
  Variant (39)..(61): Xaa in position 39 to 61 is any amino acid
  Variant (62)..(62): Xaa in position 62 is any or no amino acid
  Variant (64)..(65): Xaa in position 64 to 65 is any amino acid
  Variant (66)..(66): Xaa in position 66 is Ala or Ser
FXXXXXXXGXXXAXXXXNXXXXXXXXSXXXXXXXXXXRXXXXXXXXXXXXXXXXXXXXXXXXPXXX

SEQ ID NO: 17374 - DNA, 1163 bp, Escherichia coli
  CDS (215)..(1009)
aagcttggctgtctcaggtttgttcctgattggttacggcgcgtttcgcatcattgttgagtttttccgccagcccgacgcgcagtttaccggtgcctgggtgcagtacatcagcatggggcaaattctttccatcccgatgattgtcgcgggtgtgatcatgatggtctgggcatatcgtcgcagcccacagcaacacgtttcctgaggaaccatgaaacagtatttagaactgatgcaaaaagtgctcgacgaaggcacacagaaaaacgaccgtaccggaaccggaacgctttccatttttggtcatcagatgcgttttaacctgcaagatggattcccgctggtgacaactaaacgttgccacctgcgttccatcatccatgaactgctgtggtttctgcagggcgacactaacattgcttatctacacgaaaacaatgtcaccatctgggacgaatgggccgatgaaaacggcgacctcgggccagtgtatggtaaacagtggcgcgcctggccaacgccagatggtcgtcatattgaccagatcactacggtactgaaccagctgaaaaacgacccggattcgcgccgcattattgtttcagcgtggaacgtaggcgaactggataaaatggcgctggcaccgtgccatgcattcttccagttctatgtggcagacggcaaactctcttgccagctttatcagcgctcctgtgacgtcttcctcggcctgccgttcaacattgccagctacgcgttattggtgcatatgatggcgcagcagtgcgatctggaagtgggtgattttgtctggaccggtggcgacacgcatctgtacagcaaccatatggatcaaactcatctgcaattaagccgcgaaccgcgtccgctgccgaagttgattatcaaacgtaaacccgaatccatcttcgactaccgtttcgaagactttgagattgaaggctacgatccgcatccgggcattaaagcgccggtggctatctaattacgaaacatcctgccagagccgacgccagtgtgcgtcggtttttttaccctccgttaaattcttcgagacgccttcccgaaattttgcaacgtcctgcaacggcgtaaatagtccggaagatgcgccgaagaaatagaaactggccaagctt

SEQ ID NO: 17375 - protein, 264 aa, Escherichia coli
MKQYLELMQKVLDEGTQKNDRTGTGTLSIFGHQMRFNLQDGFPLVTTKRCHLRSIIHELLWFLQGDTNIAYLHENNVTIWDEWADENGDLGPVYGKQWRAWPTPDGRHIDQITTVLNQLKNDPDSRRIIVSAWNVGELDKMALAPCHAFFQFYVADGKLSCQLYQRSCDVFLGLPFNIASYALLVHMMAQQCDLEVGDFVWTGGDTHLYSNHMDQTHLQLSREPRPLPKLIIKRKPESIFDYRFEDFEIEGYDPHPGIKAPVAI

SEQ ID NO: 17376 - DNA, 927 bp, Xenopus tropicalis
  CDS (1)..(927)
atgcctgtcatttccgagcccgtcgcctccagctgccccgagcaggggccagggaaggcggagaatcgggacgagctgcagtacttggatcagatcaagcatatcctagagcgtgggcaccgcaaggaagatcgcactggcaccgggaccgtatcggtattcggcatgcaagcccgctacagcctgcgagatcagtttcctttgctgacaacaaaacgtgtcttctggaaaggagtgctagaagaacttttgtggtttattaagggatgtaccaactcaaaagaactttctgcaaaaggtgtaaagatctgggatgcaaatggctcccgggaatttttggacaagcaaggattctcaaacagagaggaaggagatcttggaccagtgtatggctttcagtggaggcactttggtgctgaatacaaagacacttatacagattactcaggtcaaggtgttgaccaactaaggaatgtaattgaaacaatcaaaaacaacccagatgaccgaagaattataatgtgcagctggaaccctaaagatatttctcttatggctctgccgccttgtcacacactttgccagttctacgtaatcgataaagagttatcctgtcagctgtaccagcggtctggggacatgggcctgggagtgcccttcaacattgccagttatgccttgctcacttatatgattgctcatgtcactggattgaagccaggagactttgtccacaccttgggcgatgctcatgtttatcttaaccacactgaacctttaaagcttcaacttcaaagaacacctcgcccattccccaagctaaaaatcttgcgcaaagtggaaaacattgatgacttcactgcagatgattttctaatagaaggctataacccccacccctctattaaaatggaaatggctgtgtga

SEQ ID NO: 17377 - protein, 308 aa, Xenopus tropicalis
MPVISEPVASSCPEQGPGKAENRDELQYLDQIKHILERGHRKEDRTGTGTVSVFGMQARYSLRDQFPLLTTKRVFWKGVLEELLWFIKGCTNSKELSAKGVKIWDANGSREFLDKQGFSNREEGDLGPVYGFQWRHFGAEYKDTYTDYSGQGVDQLRNVIETIKNNPDDRRIIMCSWNPKDISLMALPPCHTLCQFYVIDKELSCQLYQRSGDMGLGVPFNIASYALLTYMIAHVTGLKPGDFVHTLGDAHVYLNHTEPLKLQLQRTPRPFPKLKILRKVENIDDFTADDFLIEGYNPHPSIKMEMAV

SEQ ID NO: 17378 - DNA, 780 bp, Saccharomyces cerevisiae
  CDS (1)..(780)
atgactatggacggaaaaaacaaagaagaagagcaatatcttgatctatgcaaaagaatcattgatgaaggtgaatttaggccagatagaacaggcactgacgctaacctattgtctgagcaaggtgttaagatttgggacggtaatggatctcgtgaatatttagataagatggggttcaaagataggaaagtaggagatctggggcccgtttacggatttcaatggaggcattttggtgctaaatacaagacgtgcgatgacgactatactggacaaggtattgatcaattgaaacaggttatacataaactaaagacaaatccctacgatagaagaatcattatgagtgcctggaacccagctgattttgacaaaatggctttgccgccatgccatattttttcacagttctatgtcagtttccccaaagaaggagaaggatccggtaagccccgcctttcatgcttattgtaccaacgttcttgtgatatggggttgggagtaccatttaacattgcatcatatgctttgttgactagaatgattgctaaagttgtcgacatggagccaggtgagttcattcatactttgggggatgcacatgtttataaagaccacattgatgccttgaaagaacaaatcaccagaaatccaagaccattcccgaaactaaagattaaaagggacgttaaagacattgatgatttcaagttgacagactttgaaattgaagattataatcctcatccaagaattcaaatgaaaatgagtgtataa

SEQ ID NO: 17379 - protein, 259 aa, Saccharomyces cerevisiae
MTMDGKNKEEEQYLDLCKRIIDEGEFRPDRTGTDANLLSEQGVKIWDGNGSREYLDKMGFKDRKVGDLGPVYGFQWRHFGAKYKTCDDDYTGQGIDQLKQVIHKLKTNPYDRRIIMSAWNPADFDKMALPPCHIFSQFYVSFPKEGEGSGKPRLSCLLYQRSCDMGLGVPFNIASYALLTRMIAKVVDMEPGEFIHTLGDAHVYKDHIDALKEQITRNPRPFPKLKIKRDVKDIDDFKLTDFEIEDYNPHPRIQMKMSV

SEQ ID NO: 17380 - DNA, 873 bp, Ateline herpesvirus 3
  CDS (1)..(873)
atggaggagccgcatgcagagcaccagtacctctctcaggtcaagcacattttaaattgtgggaattttaaacacgacagaacaggagttggaacattgagtgtttttggaatgcagtctagatacagcttagaaaaggattttcctctcttaacaactaagagagtattttggagaggtgttgtggaagaattgttgtggtttatcagaggatctactgacagcaaagagcttgcagcatctggtgtgcacatttgggatgcaaatggatctaggtcctatttagataagcttggtttctgtgatagagaagaaggagaccttggacctgtttatggattccaatggaggcattttggagcagaatatcaaggtcttaagcacaattatggtggagaaggcgttgatcaattaaagcagataattaataccatacacacaaacccaaccgatagaagaatgttgatgtgtgcttggaatgtcttagatgttccaaaaatggcgttgcccccctgtcatgtattgagtcagttttatgtgtgtgatggaaagctttcctgtcagttatatcaaagatcagctgatatgggactaggggtgccttttaacattgctagctattctctattaacttgtatgatcgcccatgtcactgatttagttcctggagaatttattcacactttaggagatgctcacatttatgtgaatcacattgatgctctcacagagcagcttacgcgaactcccaggcctttcccaacactaaagtttgccagaaagattgcatctattgatgattttaaagcaaatgacattattctggaaaactataacccttaccctagcataaaaatgcccatggctgtttaa

SEQ ID NO: 17381 - protein, 290 aa, Ateline herpesvirus 3
MEEPHAEHQYLSQVKHILNCGNFKHDRTGVGTLSVFGMQSRYSLEKDFPLLTTKRVFWRGVVEELLWFIRGSTDSKELAASGVHIWDANGSRSYLDKLGFCDREEGDLGPVYGFQWRHFGAEYQGLKHNYGGEGVDQLKQIINTIHTNPTDRRMLMCAWNVLDVPKMALPPCHVLSQFYVCDGKLSCQLYQRSADMGLGVPFNIASYSLLTCMIAHVTDLVPGEFIHTLGDAHIYVNHIDALTEQLTRTPRPFPTLKFARKIASIDDFKANDIILENYNPYPSIKMPMAV

SEQ ID NO: 17382 - DNA, 879 bp, Melanoplus sanguinipes entomopoxvirus
  CDS (1)..(879)
atggaaatcacatcatcagatgaatatcaatatttaaaaggtatatcagaaatattatctaatggaagaataaccaaaaatagaacaggtgtagatacaaaaactgtatatggtttaactatgaaatataaattagatgattcatttccattatttacaacaaaatcaatgttttggagaggaattgttgaagaattattatggtttatatctggatcaactaatacaaatattctaaaaaataaaggaatccatatttgggatgaaaatggatcattaaaatatataaaaaaacgtggttttaatgatagaaaagaaggtgatttaggtccagtttatggttttcaatggcgtcattttggtgctaaatatattgatatggatacaaattatacaaatcaaggatttgatcaattaacacatattataaataaaataaaaaataaacctgaatctagaaatataatattaacagcctggaatcctatagatgttgaaaatatggttataccaccttgtcattgttttgtacaatttcatgtaattaataataaatatcttacatgtcaaatgtatcaaagatcagctgatatgggtttaggtgtaccatttaatgttgctagttatagtttattgacttatatgattgcacatttaactaatttaaaaccatatgaatttattcataatattggtaatgcacatatatatgttaatcatattaatggattaaaaaaacaattagaacgtacaccaaacccatttccaaaattaaaaataaaaagacaagtagataatatagatgattttaaatttgatgattttgaattaattgattataaccatttgggaaaaataaaattagatatggttgtttaa

SEQ ID NO: 17383 - protein, 292 aa, Melanoplus sanguinipes entomopoxvirus
MEITSSDEYQYLKGISEILSNGRITKNRTGVDTKTVYGLTMKYKLDDSFPLFTTKSMFWRGIVEELLWFISGSTNTNILKNKGIHIWDENGSLKYIKKRGFNDRKEGDLGPVYGFQWRHFGAKYIDMDTNYTNQGFDQLTHIINKIKNKPESRNIILTAWNPIDVENMVIPPCHCFVQFHVINNKYLTCQMYQRSADMGLGVPFNVASYSLLTYMIAHLTNLKPYEFIHNIGNAHIYVNHINGLKKQLERTPNPFPKLKIKRQVDNIDDFKFDDFELIDYNHLGKIKLDMVV

SEQ ID NO: 17384 - DNA, 888 bp, Cercopithecine herpesvirus 9
  CDS (1)..(888)
atggcgatgaatcgttataacataaaacattccgaatatcaatacttggagcaagttaattttattttacacaatggtgtacaaaaaacagatcgaaccggaactggaacgttatctgtatttggaatgcaatctcgatataacttgagaaatgaatttcccttattaactacgaaacgggtattttggaaaggcgttgttgaagagttattatggtttattaaaggatcaacaaattctaccgagcttgtagaaaaaggagttaagatttggagcgcacatggatctaagcaatttttacacagcaatggatttgacaaccgtcaagagggggatttgggtcctgtgtatggatttcaatggagacattttggagctgaatatgttgacatgaacacaaattattttggacaaggagtagatcaattacaaaatgttattaatttaattaaaacgaacccaaacgacagaagaattattttatgcgcctggaacgctaaagatgtgcctttaatggctttgcctccatgtcatatgctatgccaattttacgttgctaataatgaattgtcgtgtcaaatgtatcaacgatccgctgatatgggactgggtgttcctttcaatattgcaagttatgcgctgcttacgtatatgattgcacatgttacagatttaaaaacgggtgacttagtccacaccataggagacgcgcatatttaccttaatcatatagaacctttaaaattacagttaacacgacaaccaaaacaattcccaactcttcgcattactcgaactgttaaagatattaacgattttaaagctgatgattttgtgttagaaggttataatccccataattcaattccaatggaaatgtctgtttaa

SEQ ID NO: 17385 - protein, 295 aa, Cercopithecine herpesvirus 9
MAMNRYNIKHSEYQYLEQVNFILHNGVQKTDRTGTGTLSVFGMQSRYNLRNEFPLLTTKRVFWKGVVEELLWFIKGSTNSTELVEKGVKIWSAHGSKQFLHSNGFDNRQEGDLGPVYGFQWRHFGAEYVDMNTNYFGQGVDQLQNVINLIKTNPNDRRIILCAWNAKDVPLMALPPCHMLCQFYVANNELSCQMYQRSADMGLGVPFNIASYALLTYMIAHVTDLKTGDLVHTIGDAHIYLNHIEPLKLQLTRQPKQFPTLRITRTVKDINDFKADDFVLEGYNPHNSIPMEMSV

SEQ ID NO: 17386 - DNA, 987 bp, Mycoplasma pneumoniae M129
  CDS (1)..(987): transl_table=4
atgagctttaaaataaccgttttaagttattgcaaaaactcttttaaaaaagttattcgcttattttgcaagcttaaaaaaagatttttatacaatgctacaccatcgaagtttaggagagttatgcagcagtatctagatttagcccgttatgttttagagcacggaaaataccgtccaaatcgcactgatactgctggcattggtgtctttggttaccagatgcactttgatatttcaaaacactttccgctcttgactacgaagaaggtgcactgaaagtcgattgtgcacgaacttttgtggttcattaagggtgacaccaatattaagtacctagtcgacaataaggtcaacatttggaatgaatgaccttacgaaagctttaaaaagtcacctcactttaacggtgagagtcaaaaggagttcattgaacggattcgacaagacgcgaagtttgcccaacagtttggtaacctcggacccgtttatggaaagcaatggcgtgactttaacggagtcgatcaattgaaaaaggtaattgcgcaaattaaggtaaatccgttttcgcggcgcttaattgtgtctagttgaaatcccaatgaggtggatcaaatgttgctcccgccttgtcattcactgtaccagttttacgtacaggacgggcagttgagctgccagttgtaccagcgcagtggtgatatttttctaggtatccccttcaacattgcgtcctactctcttctggtgtacttagttgctaaggaaactaacctaaaaccagggagctttgtccacaccattggcgatgcccacatttacgaaaatcacttggaacaaattaagttgcaattaacacgtcaacccaaaccattgcccaaggtagttttaaagagtgataaatcaatttttgattatcaattcgatgatattgaactggtggattacgaccaccaccctacaattaaaggagaggtagcagtttaa

SEQ ID NO: 17387 - protein, 328 aa, Mycoplasma pneumoniae M129
MSFKITVLSYCKNSFKKVIRLFCKLKKRFLYNATPSKFRRVMQQYLDLARYVLEHGKYRPNRTDTAGIGVFGYQMHFDISKHFPLLTTKKVHWKSIVHELLWFIKGDTNIKYLVDNKVNIWNEWPYESFKKSPHFNGESQKEFIERIRQDAKFAQQFGNLGPVYGKQWRDFNGVDQLKKVIAQIKVNPFSRRLIVSSWNPNEVDQMLLPPCHSLYQFYVQDGQLSCQLYQRSGDIFLGIPFNIASYSLLVYLVAKETNLKPGSFVHTIGDAHIYENHLEQIKLQLTRQPKPLPKVVLKSDKSIFDYQFDDIELVDYDHHPTIKGEVAV

SEQ ID NO: 17388 - DNA, 888 bp, Invertebrate iridescent virus 6
  CDS (1)..(888)
atggatattaataatgaagaaaaacaatatttaaatttattagaaaaagttctttttcaaggcgaagatcgtgacgatagaacaggaattggaactaaaaatgtatttggagaacaattaaaatttaatttaagaacatcttttccgttactaactacaaaaaaagttttttggaaaggagttgtagaagaactcttatggtttattagcgggagtacagatgtttctgtattaaatcaaaaaggagttaaaatttggaataaaaatgcagaatcgttttatacacaacaaaatctttttaaaaaaaatgatttaggacctatttatggttttcagtggagacattatggtgaaaattatattgggtgcgataataaatatggtggtatagatcaactcaaaaatattattacaacaattcaaaatgaaccttgggatagaagaatgatattattagcttggaacccaaaggataattctaaaatggcacttcctccttgtcattgtatagcacattttgatgtaagttcaaaaataaatggtaaaagagaattgtcttgtcatttatttcaaagatctgcagatatggggttgggagttccttttaacatagcaagttatgcattattaacacatataatagctcatgtctcatcaaccaatacagaattaattgttcctggagattttgttcacacattaagtaatgttcatatttataaaaatcatattaaagctcttacagaacaaatatcgagaattccaagaaaatttccaactttagaaattataaataaaaataaaaatattgatgcattttcaagtaaagattttgtattaaaagattataatccatatccagctttagaaatggaaatggcgttataa

SEQ ID NO: 17389 - protein, 295 aa, Invertebrate iridescent virus 6
MDINNEEKQYLNLLEKVLFQGEDRDDRTGIGTKNVFGEQLKFNLRTSFPLLTTKKVFWKGVVEELLWFISGSTDVSVLNQKGVKIWNKNAESFYTQQNLFKKNDLGPIYGFQWRHYGENYIGCDNKYGGIDQLKNIITTIQNEPWDRRMILLAWNPKDNSKMALPPCHCIAHFDVSSKINGKRELSCHLFQRSADMGLGVPFNIASYALLTHIIAHVSSTNTELIVPGDFVHTLSNVHIYKNHIKALTEQISRIPRKFPTLEIINKNKNIDAFSSKDFVLKDYNPYPALEMEMAL

SEQ ID NO: 17390 - DNA, 1479 bp, Arabidopsis thaliana
  CDS (1)..(1479)
atggcttctactggtgaaactatatgtaacaatggccaaagcgcagtttcagtaacaaggaggaggagttaccaagttgtaatagcggcgacaagagacatgggtcttggtatggacatgaaacttccttgggatctaccttcagagtatcagtttttccaagatgttacaactaggacatccgatcccacgaagaggaacgcgactataatgggaagaaaatcatgggaatctactcctctagagattcgtcctcttcctggtcggctcaatattgtcttgacaaagtctagctgccacaacattgccattgatgagaatgtactggtgtctagtagcatggaatcggctcttgaacttctagccactgagccctattccttgtccattgagaaggtctttgtcataggaggcggcgagttgttaaggaattatatgaatgcatccatctgtgatgctatccacctaaccgaaatcgatataagcgtgccatgtgacgcatttgcaccgagagtggatacttctctgtaccgtccgtggtactcatcatttccagttgtggaaaatggaattcggtatagtttcaacacttatgtccgaagaaaagatgccattgttggctccggtgaaaagaaaagtgttgctgagtcagatttgaaggagtactcgtttttgcctaagatggttttcgagaggcatgaggagtttggttacttgaatcttgttcaaaacattatatctagtggagacatgaatgacaatagtactctttctaaatttggctgtcagatgcggttcaatctgcgcaagactttcccgcttctcacgaccaagaaaatattctggcttggtgttgtagaggaaatactacaacttatcagtggttcaaacaatcccaaggaaaacggtagtcatatatgggacaccgatgaggcaaaagaatatcttgacagtttcggagtgaatgccaccgaagaagatggagacaacccattcttgcatggacttcactggaaacattgtgatgctaggtttgtgattcaagaattcagtcagctctctgatgttataaacaaaataaagaacaatcctcatgatcaaaggatcatgcttgccgcttgtaatccattagatttcaagttgtcggtatctccttgtcatacgttcacacagttctatgtggcaaatggtgaagtttcttgtcaaatataccaaagctcaaccgaagcgagtatcgggattcctttcagtatcgctacatactctcttttgacatgcatcatcgctcatgtttgcgatcttggagctggtgatttcatccatgtgattggacaagcctatattaacaaagctcacgtcaaggctatacaaaaacagcttcaaatctcccctaaacccttcccgattttgaaaatcaaccctgagaaaaagaagatggacaactttgaggcctctgatttggaactcatgaggatataa

SEQ ID NO: 17391 - protein, 492 aa, Arabidopsis thaliana
MASTGETICNNGQSAVSVTRRRSYQVVIAATRDMGLGMDMKLPWDLPSEYQFFQDVTTRTSDPTKRNATIMGRKSWESTPLEIRPLPGRLNIVLTKSSCHNIAIDENVLVSSSMESALELLATEPYSLSIEKVFVIGGGELLRNYMNASICDAIHLTEIDISVPCDAFAPRVDTSLYRPWYSSFPVVENGIRYSFNTYVRRKDAIVGSGEKKSVAESDLKEYSFLPKMVFERHEEFGYLNLVQNIISSGDMNDNSTLSKFGCQMRFNLRKTFPLLTTKKIFWLGVVEEILQLISGSNNPKENGSHIWDTDEAKEYLDSFGVNATEEDGDNPFLHGLHWKHCDARFVIQEFSQLSDVINKIKNNPHDQRIMLAACNPLDFKLSVSPCHTFTQFYVANGEVSCQIYQSSTEASIGIPFSIATYSLLTCIIAHVCDLGAGDFIHVIGQAYINKAHVKAIQKQLQISPKPFPILKINPEKKKMDNFEASDLELMRI

SEQ ID NO: 17392 - DNA, 1698 bp, Arabidopsis thaliana
  CDS (1)..(1698)
atgaggtgtttgcaaaactccgcaaagactctacctttagcgtttaaatcggcattgctgcctttgtctcaaaggtggttctgtaaattttctcctaagccatcctcattgacaaacattttcaaggtttcaatttcaaccatggcaaacactctcaatggaaatgtgatcatgacttcaaagcctcagagtacttaccaagttgtggtagctgcaaccaaggaaatgggtattggtaaagacggaaaacttccatggaatttgcctaccgatctcaagttcttcaaggatttaactttgtccacttcggattctgctaagaagaacgctgttgttatgggtaggaaaacgtgggagtctattcccaaaaagtataggccactctctggtcgcctgaatgttgtcttgtctcgttctagcggtttcgatatagccaacactgaaaatgttgtaacttgcagtagcatagattctgctctagacttattagctgcacctccgtttagtctgtccattgagaaagtgtttgtaataggaggtggcgacatattgagggaagctttgaataaaccgagctgtgaagccatccacataactgagattgatacaagtatcgactgtgatacatttattcccacggttgacacttctgcatatcagccttggtgttcgtcgtttccaatatgtgaaaatggtcttcgattttccttcacgactcatgttcgtgtaaagagttcttctgccggtgaagcctctgatgagagtgatgggtcaaaggttcttcaagttgattggaagaagttttcttctgttcttcctaaaatgatttttgaccggcatgaggaatatctctacttaaatctggtcaaagagataatctcaaatggaaacttaaaagacgataggacagggactggtacattatctaaatttggttgtcagatgaaattcaatttacgcaggaattttccacttctgacgacaaagagagttttctggagaggtgttgttgaggaacttctatggttcataagcggttcaaccaatgcaaaggtacttcaagaaaagggtatccgtatatgggatgggaatgcgtcgagagcatatcttgatggtattggactgactgagagagaggaaggtgaccttggacccgtttatggatttcagtggagacactttggtgctaagtacacagatatgcatgctgattatactggccaaggatttgatcagctcttagatgtaattaacaagatcaagaacaatcctgatgatcgacggattataatgtcagcttggaatccttctgatcttaagctgatggcacttcctccatgccacatgtttgcacagttttatgttgcaaatggagaactttcatgtcaaatgtatcagcgttcagccgatatgggtctcggcgtaccgtttaacattgcctcatactcccttcttacatgcattcttgctcacgtctgcgatcttgttcctggtgattttatccatgtgattggagatgctcatgtttacaaaaaccatgtcaggcctctgcaagagcaacttgagaacccaccaaaaccttttcctgttttgaagataaatccagagaagaaagatatagattcttttgttgcggatgactttgagctcattggctatgatcctcacaagaaaatagatatgaaaatggctgtttag

SEQ ID NO: 17393 - protein, 565 aa, Arabidopsis thaliana
MRCLQNSAKTLPLAFKSALLPLSQRWFCKFSPKPSSLTNIFKVSISTMANTLNGNVIMTSKPQSTYQVVVAATKEMGIGKDGKLPWNLPTDLKFFKDLTLSTSDSAKKNAVVMGRKTWESIPKKYRPLSGRLNVVLSRSSGFDIANTENVVTCSSIDSALDLLAAPPFSLSIEKVFVIGGGDILREALNKPSCEAIHITEIDTSIDCDTFIPTVDTSAYQPWCSSFPICENGLRFSFTTHVRVKSSSAGEASDESDGSKVLQVDWKKFSSVLPKMIFDRHEEYLYLNLVKEIISNGNLKDDRTGTGTLSKFGCQMKFNLRRNFPLLTTKRVFWRGVVEELLWFISGSTNAKVLQEKGIRIWDGNASRAYLDGIGLTEREEGDLGPVYGFQWRHFGAKYTDMHADYTGQGFDQLLDVINKIKNNPDDRRIIMSAWNPSDLKLMALPPCHMFAQFYVANGELSCQMYQRSADMGLGVPFNIASYSLLTCILAHVCDLVPGDFIHVIGDAHVYKNHVRPLQEQLENPPKPFPVLKINPEKKDIDSFVADDFELIGYDPHKKIDMKMAV

SEQ ID NO: 17394 - DNA, 1164 bp, Deinococcus radiodurans R1
  CDS (1)..(1164): transl_table=11
ttgaggtatttcacgcccccgcccggcgcggtctactgcccgcatgaacctagaaccctaccagcaggcttcgcccgagcgcctgcgcctttacctgtccctcttcgccatggtcgcgctgaccgtgctgctcggcggccagcggacgggcgacctcggcgtgcgcggcaccctacggcgcagcgcctttgcacgcggcatgtttgccgacatcggggccatcagcacgctgggggcgctttatctcgtcctgaacggcagaacctccgtgcgggtgcccgctgctatcgccacgttgtttgtcggaagttttgcgctgctgcccgcactggcctacgaagactgggccgccatgcaggagcgcaggcagtgaaacagtacctcgattttctccgccacatccgcgaccacgggaccgacaagatggaccgcaccggcaccggcacccgctcggtgttcgggtatcagatgcgcttcgacctctctgaaggctttcccctggtcacgaccaagcgggtgcacctgaagtccatcatctacgagctgctgtggtttctgcgcggcgacagcaacgtgcgctggctgcaggagcacggcgtgaccatctgggacgaatgggcgcgcgagggcggcgaactcgggccggtctacggcgtgcagtggagaagctggcccgactatggcggcgggcagattgaccagatttcgcaggtcatcgagcaaatcaagacgaatccggactcaagaaggctgattgtctccgcctggaacgtggcgcagattgacgagatggccctccccccctgccacctgctctttcagttctacgtggcggacgggaaactcagttgccagctctaccagcgcagcgccgacagctttctgggcgtgccgttcaacatcgccagttacgcgctgctgaccatgatggtggcccaggtctgcggcctcgaacccggcgagttcatctggacgggtggcgactgccacatctacagcaatcacatggagcaggtggagcgccaactgaagcgcgagccgaggcccttgccgaagatgcggctcaatcccgcagtcaaagacatgtttgctttccagtacgaggactttacgttggaagggtacgacccgcatccgggcatcaaggcggaggtggcggtatga

SEQ ID NO: 17395 - protein, 387 aa, Deinococcus radiodurans R1
MRYFTPPPGAVYCPHEPRTLPAGFARAPAPLPVPLRHGRADRAARRPADGRPRRARHPTAQRLCTRHVCRHRGHQHAGGALSRPERQNLRAGARCYRHVVCRKFCAAARTGLRRLGRHAGAQAVKQYLDFLRHIRDHGTDKMDRTGTGTRSVFGYQMRFDLSEGFPLVTTKRVHLKSIIYELLWFLRGDSNVRWLQEHGVTIWDEWAREGGELGPVYGVQWRSWPDYGGGQIDQISQVIEQIKTNPDSRRLIVSAWNVAQIDEMALPPCHLLFQFYVADGKLSCQLYQRSADSFLGVPFNIASYALLTMMVAQVCGLEPGEFIWTGGDCHIYSNHMEQVERQLKREPRPLPKMRLNPAVKDMFAFQYEDFTLEGYDPHPGIKAEVAV

SEQ ID NO: 17396 - DNA, 801 bp, Mycobacterium tuberculosis CDC1551
  CDS (1)..(801): transl_table=11
gtgtcaatcgtgacgccatacgaggacctgctgcgcttcgtgctcgaaacgggtacgcccaaatccgaccgcaccggcaccggaacccgcagcctgttcggccagcagatgcgctatgatttgtcggccggtttcccgctgctcactaccaagaaagtccatttcaaatcggtagcctacgagctgctgtggtttttgcgcggcgattccaatatcggttggctgcacgagcacggagtcaccatctgggacgaatgggcaagtgatacaggcgaactcgggccgatctacggtgtacaatggcgatcgtggccggctccatccggtgagcacatcgaccagatcagcgcggcgctggatttgctgcgcaccgatcccgattcccggcgcatcatcgtgtcggcctggaacgtcggcgaaatcgagcggatggcgctgccgccctgtcatgcgttcttccagttctacgtcgccgatggccggctgagctgtcagctctaccaacgcagcgccgacctgtttctgggtgtgccgttcaacatcgccagctatgcgttgctcacccacatgatggccgcccaggccggcttgtcggtcggcgagttcatctggaccggtggcgactgccacatctacgacaatcacgtcgagcaagtacggctgcagctcagccgcgagccgcggccatatccgaaactacttctagccgaccgggattcaatcttcgagtacacctatgaagacatcgttgtgaagaactacgatccgcatccggcgatcaaagctccagtcgcggtatga

SEQ ID NO: 17397 - protein, 266 aa, Mycobacterium tuberculosis CDC1551
MSIVTPYEDLLRFVLETGTPKSDRTGTGTRSLFGQQMRYDLSAGFPLLTTKKVHFKSVAYELLWFLRGDSNIGWLHEHGVTIWDEWASDTGELGPIYGVQWRSWPAPSGEHIDQISAALDLLRTDPDSRRIIVSAWNVGEIERMALPPCHAFFQFYVADGRLSCQLYQRSADLFLGVPFNIASYALLTHMMAAQAGLSVGEFIWTGGDCHIYDNHVEQVRLQLSREPRPYPKLLLADRDSIFEYTYEDIVVKNYDPHPAIKAPVAV

SEQ ID NO: 17398 - DNA, 840 bp, Agrobacterium tumefaciens str. C58
  CDS (1)..(840): transl_table=11
gtgctattatattcccttgatatcagggaatcggcggcagaacgcatgaaacaatatctcgatcttctccggcatgtgatggaaaccggctccgaccgcggagaccgcaccggcaccggcacgcgttcggtattcggttaccagatgcgtttcgacctttccgaaggttttccggttctcaccacaaagaaactgcatctgcgctccatcatccatgagctgctgtggttcctaaacggcgataccaatattgcctatctcaaggaaaatggtgtttccatctgggatgaatgggccgatgagaacggcgatctcggtccggtctatggcgcgcaatggcggtcctggccagcgcctgatggccgccatatcgaccagatcgcgcttctgatcgaggcgcttaaaaccaatcccaattcccgccgccacatcgtttcggcctggaacccggcgctggtggacgaaatggcgctgccgccctgccattgcctgttccagttctatgtgtccgatggaaagctgtcctgccagctttaccagcgctcggccgatattttcctcggcgtgcccttcaatatcgcatcctacgcgctgctgacgctgatggtggcgcaggtcgtgggcctcaagcccggcgatttcgttcatacccttggtgatgcgcatatctacgccaaccatttcgaacaggcgcagctgcagatgacgcgtacgccgaaggccttgccgaccatgcgcctcaaccctgatgtgaagaaccttttcggctttaagttcgaggactttacgctggagaattacgaggccgattcaagcatcaaggcaccgatcgcggtatga

SEQ ID NO: 17399 - protein, 279 aa, Agrobacterium tumefaciens str. C58
MLLYSLDIRESAAERMKQYLDLLRHVMETGSDRGDRTGTGTRSVFGYQMRFDLSEGFPVLTTKKLHLRSIIHELLWFLNGDTNIAYLKENGVSIWDEWADENGDLGPVYGAQWRSWPAPDGRHIDQIALLIEALKTNPNSRRHIVSAWNPALVDEMALPPCHCLFQFYVSDGKLSCQLYQRSADIFLGVPFNIASYALLTLMVAQVVGLKPGDFVHTLGDAHIYANHFEQAQLQMTRTPKALPTMRLNPDVKNLFGFKFEDFTLENYEADSSIKAPIAV

SEQ ID NO: 17400 - DNA, 870 bp, Shrimp white spot syndrome virus
  CDS (1)..(870)
atggagggagaacatcaatatttgaacctagtcagggagatcctagaaagaggagtgaagaaggacgatagaactggaacaggaactctatccatttttggaccccaaatgaggttctctcttcgagacgacactattccagttctcactaccaagaaaattttctggagaggagttgtggaagaactcttgtggttcatcaggggcaatacagacgccaaagaattggccaagaagaagatacacatctggaacgctaatgggtcgcgggaatttttggacagtagagggttatacgatagagcagagggagatttgggacccgtatacggattccaatggcgtcattttggtgctgaatatgatacctgttcttccgattatactggaaagggtattgatcaattggccaatatactaaagaccctgagagaaaatccagatgatagaaggatgattatgacggcatggaatcctatggatcttcaccttatggctcttcctccatgccacatgactgctcaattttatgtggctaatggagaattgtcgtgccagttgtatcagcgaagcggagatgtcgggttgggcgtgcccttcaatattgcatcatactctcttctgactcatctgatggccagtatggtgggtctaaaaccgggagagtttatcctcactcttggtgacgcacacatttataatacccacattgaggtgttaaagaagcagttgtgccgcgtccctagaccattccctaagttgaggattttaatggctccagaaaaaattgaggactttactatcgacatgttttatcttgaggggtatcaaccacacagtggaaacttgcagatgaaaatggctgtttga

SEQ ID NO: 17401 - protein, 289 aa, Shrimp white spot syndrome virus
MEGEHQYLNLVREILERGVKKDDRTGTGTLSIFGPQMRFSLRDDTIPVLTTKKIFWRGVVEELLWFIRGNTDAKELAKKKIHIWNANGSREFLDSRGLYDRAEGDLGPVYGFQWRHFGAEYDTCSSDYTGKGIDQLANILKTLRENPDDRRMIMTAWNPMDLHLMALPPCHMTAQFYVANGELSCQLYQRSGDVGLGVPFNIASYSLLTHLMASMVGLKPGEFILTLGDAHIYNTHIEVLKKQLCRVPRPFPKLRILMAPEKIEDFTIDMFYLEGYQPHSGNLQMKMAV

SEQ ID NO: 17402 - DNA, 1116 bp, Salmonella enterica subsp. enterica serovar Typhi str. CT18
  CDS (1)..(1116): transl_table=11
gtgaggttgattttgtctatcctactgaatcgagactttacgaacggtcagtttgccagtggttcgtatgccaaagtggttgaaacggtgctcaactctggcgttcacgcgggtgatcgcaccggaaccggcacaaaaagcgtttcatatgtcccttcctactacatgctgactggcggctctgttccacttatctccggaaaagccgtcaacctgaagccgttactggttgagctggagtggtatctcaaaggaacgggcaacattcagttcctgaaagacaatggcgtcaaaatctgggatgcctgggctgatgaaaatggcgatttaggcccggtctatggcaagcaatggcgtcggtgggaagacacccgcatcgtgagccatagcgagtatttgagcaaaatcgacacgttccgtgagcgcgggtacaaggtcgaggggtatctgggcgtaagtgaagatcgcgttgtgttgtcacgtgaaatcgaccagctacagcgtatcgttcacacgcttcgcaccaacccgacagatcgtcgcatcctgctgaatgcctggaatgttggcgaactggaagacatgaagctgccgccatgccatttcgtgttttcactgtggagtcgcaagctggactttgagacccgactgacgatggccaccgacattggcattcagcacaaccgccacggccacgagtccatttacacccagatgctgtgtcttctggaaagagatggcggcattacggaaaacctgctggacgagctgggcatcccgaaacgcatcctgaactcatgcctggtgcagcgcagcgtcgatacctttgttggtatgccgttcaatattgccggttacggcattctcacccacttcctcgcgaagatcaccggccacatggctggcgcattcgtgcattttggctttgacgttcatctctacgacaaccacatgggaggcgttgaggagctgatgaagcgcgagccgcccaaagagtccgacccggttgtcatttttccgcatgaatgggccgaactggacgacttcaaatgggaaggtgtgcaggtgtgcggctacagccctcttccgtggatcaaggttccagtggcggtgtga

SEQ ID NO: 17403 - protein, 371 aa, Salmonella enterica subsp. enterica serovar Typhi str. CT18
MRLILSILLNRDFTNGQFASGSYAKVVETVLNSGVHAGDRTGTGTKSVSYVPSYYMLTGGSVPLISGKAVNLKPLLVELEWYLKGTGNIQFLKDNGVKIWDAWADENGDLGPVYGKQWRRWEDTRIVSHSEYLSKIDTFRERGYKVEGYLGVSEDRVVLSREIDQLQRIVHTLRTNPTDRRILLNAWNVGELEDMKLPPCHFVFSLWSRKLDFETRLTMATDIGIQHNRHGHESIYTQMLCLLERDGGITENLLDELGIPKRILNSCLVQRSVDTFVGMPFNIAGYGILTHFLAKITGHMAGAFVHFGFDVHLYDNHMGGVEELMKREPPKESDPVVIFPHEWAELDDFKWEGVQVCGYSPLPWIKVPVAV

SEQ ID NO: 17404 - DNA, 1002 bp, Cercopithecine herpesvirus 17
  CDS (1)..(1002)
atgattgtcctggtgcatctcggtatctgctacgttaaaaaaattatacccgtttgcgtggctggaatcgcggccgcacgactccgggttttttccgcacccgaaggtgccgcggccgtccgctgcgcgtgccgcggcgaccacggcgagctgcagtacttggcgcacctggatttaattattaaacacggcgtgcagagggaggacaggacgggcgtgggcaccaggtccgtgttcgggcttcaggcccgatataacctcagggacgagtttcctctgttaaccaccaaaagggtgttttggaggggcgtcgtggaggagttgctgtggtttatcaggggctccaccgactccaccgaactgtcgcgccgcggcgtaaaaatttgggacgcgcacgggtcccgcgcctttttggcggcgcagggcttcggggaccgccgcgagggcgatctggggccggtgtacgggttccagtggagacattttggggcggagtacaggggggccgacgccaactacgagggtcagggggtggaccagctgcgttacgtggtggatctaattaacaggcggccccacgatcggcgcatcgttatgtgcgcgtggaaccccgcggacctcgcgcggatggctctccctccttgtcacgttttgtgtcagttttacgtggctcggggggagctgtcctgccagctgtaccagaggtccgccgacatgggcctcggggtcccgtttaacatcgccagctacgccctcctgacgtatctgatcgctcacgtcacgggcctgaccccgggagactttgtgcacaccttgggtgacgcccacgtttacaacaaccacgttgatcccctgctgcttcagctgcggaggaccccgcgtccgtttccgcggctgaagattttgagaaaggtggcgcgtctggaggactttacgcgcgcggatctgagtctcgagggctacgacccccatccccacatagagatggagatggccgtttga

SEQ ID NO: 17405 - protein, 333 aa, Cercopithecine herpesvirus 17
MIVLVHLGICYVKKIIPVCVAGIAAARLRVFSAPEGAAAVRCACRGDHGELQYLAHLDLIIKHGVQREDRTGVGTRSVFGLQARYNLRDEFPLLTTKRVFWRGVVEELLWFIRGSTDSTELSRRGVKIWDAHGSRAFLAAQGFGDRREGDLGPVYGFQWRHFGAEYRGADANYEGQGVDQLRYVVDLINRRPHDRRIVMCAWNPADLARMALPPCHVLCQFYVARGELSCQLYQRSADMGLGVPFNIASYALLTYLIAHVTGLTPGDFVHTLGDAHVYNNHVDPLLLQLRRTPRPFPRLKILRKVARLEDFTRADLSLEGYDPHPHIEMEMAV

SEQ ID NO: 17406 - DNA, 960 bp, Danio rerio
  CDS (1)..(960)
atgcccgacacggcagtggaagtgacaaacggacattgcgttaacggagaaagcaagaaagaagaaacaaacggagggaaaaaggagttttctctgttttgcgacgagcgcgggtatttgagtctggtggagtttattttgcagaatggagcgaagaaaggcgacaggacaggcacaggagtgatctctgtgttcgggacacaagccagatacagtctcagagatcagtttccgttgctgacgaccaaaagagttttctggaaaggcatattggaggagctgctgtggttcatcaagggttcaacaaacgccaaagatctgtcggagaagggtgtgaggatttgggatgctaacggctccagagagtttctggataagaacggattcaccgatcgggaggaaggagatctgggtccagtttatggatttcagtggaggcattttggagccgaatacaaagatatgcatactgattattctggagaaggagtcgatcagttacagaaagttattgacaccatcaagtcaaacccagaggaccgaaggatcatcatgtgtgcctggaatcctaaagatctccctctgatggcgctgccgccctgtcatgcgttgtgtcagttttacgtgtcgaacggtgagttgtcatgtcagctgtaccagcgatcgggagacatcggcctcggtgtcccattcaacatcgccagctacgccctgctgacctacatgatcgcccacatcactggactcaagcctggggatttcgttcatacattaggtgacgcccacatctacaccaatcacatcgagcctttaaaagagcagattcagcgagagccgcgtccgttccccaaactccggattaaacgcaaagttgaacaaattaatgatttctgtgctgaagattttgagatctatgattatgacccacatcctacaatcaaaatgcaaatggctgtttag

SEQ ID NO: 17407 - protein, 319 aa, Danio rerio
MPDTAVEVTNGHCVNGESKKEETNGGKKEFSLFCDERGYLSLVEFILQNGAKKGDRTGTGVISVFGTQARYSLRDQFPLLTTKRVFWKGILEELLWFIKGSTNAKDLSEKGVRIWDANGSREFLDKNGFTDREEGDLGPVYGFQWRHFGAEYKDMHTDYSGEGVDQLQKVIDTIKSNPEDRRIIMCAWNPKDLPLMALPPCHALCQFYVSNGELSCQLYQRSGDIGLGVPFNIASYALLTYMIAHITGLKPGDFVHTLGDAHIYTNHIEPLKEQIQREPRPFPKLRIKRKVEQINDFCAEDFEIYDYDPHPTIKMQMAV

SEQ ID NO: 17408 - DNA, 1878 bp, Schizosaccharomyces pombe 972h-
  CDS (1)..(1878)
atgtcacaacctttgcatgccaggtttgctaccagggctgtaaaaaatcccatgatccttgagaaagagcgacaacttacggattctaaatatcatattttggtcgctgcaacgggttcggttgcggcgataaaattgacattaatcgttaaatccctactgacatacaagggcgtcgacgttcaagtcgttttaacggatccggctcgtaactttgttgagaaagaggacttaacggctttgggtgtcaatgtttataacaatgcggatgattggaaaaattgggacggactcgaatgtcctatcacacatattgagctacgtcgatgggcacatcttttgttaattgcccctttaagtgcaaatactatggccaaaatggcaaatggtctctgtgacaatttacttacctctcttatacgtgcctgggcccctttaaaaccaattctcttggctcccgcaatgaataccttgatgtggactaatcctataactcaggaacatttgagcgctattagcagaatatacaagaatagtgaatttatcatgccaatcgagaaagtgcttgcctgtggtgatattggcatgggcggtatggccgaatggagaaacattgtaggcagagttgccgataaattgcagctagaacaaaagtctgtcttgccgaacgctgtgaaaaacatcgatggacaagatgatgactctagtgaacaaactgctgcttttgaagagtacgatgatgatgatgatgacgatgttgatgataatgaacaatccaacagtatgattgaaacttctgcaaatgcagatattacccccaaggcctctcttttaccctctactacagaatcttctataagcaaagatcacgagacctcccaagctccattaggctcggaatcggtggatactcaggcctctgaaaatgttactaccaaacccgaacctcctgtaccatttacttcctccgaatatagaaatacagaagaagagcaatacctaaatttgattcgatatatccttgaaaatggccagtcgcggcccgatcgcacgggaactggtacgagatcggtatttgctcctccacaactacgcttttctttaaggaataatactctacctcttctcactacaaagcgtgtttttttacgtggtgtgcttgaagagttactttggtttattcacggtgatactaatgccaatcatttaagtgaaaaagggattcatatatgggatggcaatggcagtagagaattcctagacagcagagggcttactgatcgtaaagttggtgacctcggtcctatatatggttttcaatggagacatttcggagcgcaatatgttgattgcgatactgactataccaataaaggagtggatcagctggctcaggttatatctaccctcaaattaaacccttatgaccgtcgtataattctttcagcttggaacccattagctattcctgaaatggctttaccaccttgccatatattttgccagttttatgtcagtgagccttgcaagcctgggggaaagccccaactttctagtatgatgtatcagcgctctgccgacatggggcttggagttccttttaacattgcttcttattctctcttaacacatatgatagctcacatgtgcggctatgaagctgccgaatttgttcacgtaatgggtgattgtcatatatacaatgatcatttagaggcattacaaactcagttggaaagagttcctaaagctttccctaagttgtttttcaaacgtgatgctaaagacatagggtctattgatagtttcagcgttgatgatttcgcagttgaaggttataatccttatggccctattaaaatgaaaatgagtgtctaa

SEQ ID NO: 17409 - protein, 625 aa, Schizosaccharomyces pombe 972h-
MSQPLHARFATRAVKNPMILEKERQLTDSKYHILVAATGSVAAIKLTLIVKSLLTYKGVDVQVVLTDPARNFVEKEDLTALGVNVYNNADDWKNWDGLECPITHIELRRWAHLLLIAPLSANTMAKMANGLCDNLLTSLIRAWAPLKPILLAPAMNTLMWTNPITQEHLSAISRIYKNSEFIMPIEKVLACGDIGMGGMAEWRNIVGRVADKLQLEQKSVLPNAVKNIDGQDDDSSEQTAAFEEYDDDDDDDVDDNEQSNSMIETSANADITPKASLLPSTTESSISKDHETSQAPLGSESVDTQASENVTTKPEPPVPFTSSEYRNTEEEQYLNLIRYILENGQSRPDRTGTGTRSVFAPPQLRFSLRNNTLPLLTTKRVFLRGVLEELLWFIHGDTNANHLSEKGIHIWDGNGSREFLDSRGLTDRKVGDLGPIYGFQWRHFGAQYVDCDTDYTNKGVDQLAQVISTLKLNPYDRRIILSAWNPLAIPEMALPPCHIFCQFYVSEPCKPGGKPQLSSMMYQRSADMGLGVPFNIASYSLLTHMIAHMCGYEAAEFVHVMGDCHIYNDHLEALQTQLERVPKAFPKLFFKRDAKDIGSIDSFSVDDFAVEGYNPYGPIKMKMSV

SEQ ID NO: 17410 - DNA, 864 bp, Streptococcus pyogenes MGAS315
  CDS (1)..(864): transl_table=11
atgcttacagaaaggttattagagatgacaaaagctgaccagatttttaaagctaatattcaaaaaattataaacgaaggatcattgagtgagcaagcacgtcctaaatataaagatggtcgaacagctcattctaagtatattactggggcgtttgctgaatatgatttagctaaaggagagtttcccatcacaactttacgacccattccaattaaatctgctataaaggaattattttggatatatcaagatcagtctaacagtttagatgtgctagaagctaaatataatgttcattattggaatgaatgggaagttgaccagacacgtactattgggcaacgttatggtgctgtagtcaaaaaacatgatatcatctcaaaaatactaaagcaattagcagaaaatccttggaatcgtcgtaatgtcatttctctctgggactatgaagcatttgaggagacaaaagggttgttgccatgtgcctttcaaatcatgtttgatgttagacgtgtaggggaagatctttatttagatgctagtttgacgcaacgttctaatgacatattagttgctcatcacatcaatgccatgcaatacgttgccttgcagatgatgattgctaaacattttggatggaaaataggtaagttcttttattttgttaacaatttacatatttatgacaaccaatttgatcaggctcaagaattgctaaaacgacagccagttgctagtcagcctaagcttgttttaaatgttccagataggactaatttctttgatattaaaccagatgattttgaattacaaaattatgatccagtgaagcctcagttgcactttgaccttgctatttaa

SEQ ID NO: 17411 - protein, 287 aa, Streptococcus pyogenes MGAS315
MLTERLLEMTKADQIFKANIQKIINEGSLSEQARPKYKDGRTAHSKYITGAFAEYDLAKGEFPITTLRPIPIKSAIKELFWIYQDQSNSLDVLEAKYNVHYWNEWEVDQTRTIGQRYGAVVKKHDIISKILKQLAENPWNRRNVISLWDYEAFEETKGLLPCAFQIMFDVRRVGEDLYLDASLTQRSNDILVAHHINAMQYVALQMMIAKHFGWKIGKFFYFVNNLHIYDNQFDQAQELLKRQPVASQPKLVLNVPDRTNFFDIKPDDFELQNYDPVKPQLHFDLAI

SEQ ID NO: 17412 - DNA, 876 bp, Heliothis zea virus 1
  CDS (1)..(876)
atgcagacaaactgggaagagcaccaatacttgaacacgatcagaagtatcattgaaactggtaatcgccgcatggatcgcaccaaagtgggcaccctgtctcactttggagtgatgcatcggtactcgttgagggacaatagtctgcctctgttgacgaccaagactgtctttgtcaagggcgtcatcgaggagctcttgtggatgatttccggatcgaccaatgccaaagagctgagccgaaagggtgtacacatttggagcggcaacagtagtcgaagcgttttggattcgctcggcttcaccgacagacaagagggcgatctgggacccgtgtacggattccagtggagacactcgggcaccaagtatgtagactgcgagacagactattcgggtcagggtgttgatcaattgcagacaatcattgacactctcaagaccaatccaacagacaggaggatcgtaatgtgttcatggaatcctgcagatttgcaccaaatggcactaccaccgtgtcactgtttggctcagttttactcgtacgatggcaaattgtcatgcttaatgtatcagaggagtgccgacatgggcctcggtgtaccctttaacattgcaagctattctatgttgacgcacatgattgctcacattaccggcctgaaagcgcacgagttcgtacacaccattggcgacgctcacgtgtatttaaatcacatcgagccattaaaggtgcaactcgaacgggagccgagaccttttcccaagctggagtttgctcgtaaagttgaaaatattgacagttttaagtacgaagattttataataaaaggttacgatccatacccgaagattcccatggttctggctgtttag

SEQ ID NO: 17413 - protein, 291 aa, Heliothis zea virus 1
MQTNWEEHQYLNTIRSIIETGNRRMDRTKVGTLSHFGVMHRYSLRDNSLPLLTTKTVFVKGVIEELLWMISGSTNAKELSRKGVHIWSGNSSRSVLDSLGFTDRQEGDLGPVYGFQWRHSGTKYVDCETDYSGQGVDQLQTIIDTLKTNPTDRRIVMCSWNPADLHQMALPPCHCLAQFYSYDGKLSCLMYQRSADMGLGVPFNIASYSMLTHMIAHITGLKAHEFVHTIGDAHVYLNHIEPLKVQLEREPRPFPKLEFARKVENIDSFKYEDFIIKGYDPYPKIPMVLAV

SEQ ID NO: 17414 - DNA, 1827 bp, Plasmodium falciparum 3D7
  CDS (1)..(1827)
atgatggaacaagtctgcgacgttttcgatatttatgccatatgtgcatgttgtaaggttgaaagcaaaaatgaggggaaaaaaaatgaggtttttaataactacacatttagaggtctaggaaataaaggagtattaccatggaaatgtaattccctagatatgaaatatttttgtgcagttacaacatatgtgaatgaatcaaaatatgaaaaattgaaatataagagatgtaaatatttaaacaaagaaactgtggataatgtaaatgatatgcctaattctaaaaaattacaaaatgttgtagttatgggaagaacaagctgggaaagcattccaaaaaaatttaaacctttaagcaataggataaatgttatattgtctagaaccttaaaaaaagaagattttgatgaagatgtttatatcattaacaaagttgaagatctaatagttttacttgggaaattaaattactataaatgttttattataggaggttccgttgtttatcaagaatttttagaaaagaaattaataaaaaaaatatattttactagaataaatagtacatatgaatgtgatgtattttttccagaaataaatgaaaatgagtatcaaattatttctgttagcgatgtatatactagtaacaatacaacattggattttatcatttataagaaaacgaataataaaatgttaaatgaacaaaattgtataaaaggagaagaaaaaaataatgatatgcctttaaagaatgatgacaaagatacatgtcatatgaaaaaattaacagaattttacaaaaatgtagacaaatataaaattaattatgaaaatgatgatgatgatgaagaagaagatgattttgtttattttaattttaataaagaaaaagaagagaaaaataaaaattctatacatccaaatgattttcaaatatataatagcttgaaatataaatatcatcctgaataccaatatttaaatattatttatgatattatgatgaatggaaataaacaaagtgatcgaacgggagtaggtgttttaagtaaattcggatatattatgaaatttgatttaagtcaatatttcccattattaactacgaagaaattatttttaagaggaattattgaagaattgctttggtttattagaggagaaacaaatggtaatacgttgttaaataagaatgtaaggatatgggaagctaatggtactagggaatttttagataatagaaaattatttcatagagaagttaacgatttaggacctatttatggttttcaatggagacatttcggtgctgaatatacaaatatgtatgataattatgaaaataaaggagtggatcaattaaaaaatataataaatttaattaaaaatgatcctacaagtagaagaattcttttgtgtgcatggaatgtaaaagatcttgaccaaatggcattacctccttgtcatattttatgtcagttttatgttttcgatgggaaattatcatgtattatgtatcaaagatcatgtgatttagggctaggagtaccttttaatattgcttcttattctatttttactcatatgattgcacaagtctgtaatttgcaacctgcgcagttcatacacgttttaggaaatgcacatgtttataataatcacattgatagtttaaaaattcaacttaacagaataccctatccattcccaacacttaaattaaatccagatattaaaaatattgaagattttacaatttcggattttacaatacaaaattatgttcatcatgaaaaaatttcaatggatatggctgcttaa

SEQ ID NO: 17415 - protein, 608 aa, Plasmodium falciparum 3D7
MMEQVCDVFDIYAICACCKVESKNEGKKNEVFNNYTFRGLGNKGVLPWKCNSLDMKYFCAVTTYVNESKYEKLKYKRCKYLNKETVDNVNDMPNSKKLQNVVVMGRTSWESIPKKFKPLSNRINVILSRTLKKEDFDEDVYIINKVEDLIVLLGKLNYYKCFIIGGSVVYQEFLEKKLIKKIYFTRINSTYECDVFFPEINENEYQIISVSDVYTSNNTTLDFIIYKKTNNKMLNEQNCIKGEEKNNDMPLKNDDKDTCHMKKLTEFYKNVDKYKINYENDDDDEEEDDFVYFNFNKEKEEKNKNSIHPNDFQIYNSLKYKYHPEYQYLNIIYDIMMNGNKQSDRTGVGVLSKFGYIMKFDLSQYFPLLTTKKLFLRGIIEELLWFIRGETNGNTLLNKNVRIWEANGTREFLDNRKLFHREVNDLGPIYGFQWRHFGAEYTNMYDNYENKGVDQLKNIINLIKNDPTSRRILLCAWNVKDLDQMALPPCHILCQFYVFDGKLSCIMYQRSCDLGLGVPFNIASYSIFTHMIAQVCNLQPAQFIHVLGNAHVYNNHIDSLKIQLNRIPYPFPTLKLNPDIKNIEDFTISDFTIQNYVHHEKISMDMAA

SEQ ID NO: 17416 - DNA, 861 bp, Enterobacteria phage RB69
  CDS (1)..(861): transl_table=11
atgaaacaataccaatacctgattaatgatatcctagaaaatggctacgaaacagacgaccgtacaggcacaggcactattgccctgttcggaactaaattgcgatgggacctgactaaaggattccctgcagtaacaaccaagaagcttgcatggaaagcttgtattgccgaactactgtggttcatgtctggttctaccaatgttaatgatttgcgtattcgtactcatggtagtctaattgaaggtaaaactatttgggacgacaactatgaaaatcaggcaaaagaccttggatatcatagcggcgaacttggtcctatttatggtaagcaatggcgtgattttggtggtgtagaccaattggtcaaaactatcgaccgtattaaagctcttcctaatgatcgtcgacaaatagtttctgcatggaaccctgccgaaattgaccaaatggctcttcctccttgtcatatgttctatcaatttaatgtgcgtaatggacatcttgatttacaatggtatcaacgcagtgtagatgttttcttgggcctgccgttcaacatcgcctcgtacgctgccttgacgcatattgtagcgaagatgtgtaaccttatcccgggtgatttagtgttctcaggcggcaacacgcatatctacagcaatcatgtagaacaatgcaaagaagttcttcgtcgtgaacctaaagagttgtgttctcttgaaattaattggcctagtaattttgagaattggcctacaaaaatccaaatggactgggttactggaacgatgacacattctgatttcgttcttaaaaattacgaatctcatccaactatcaaagctaaaatggcggtataa

SEQ ID NO: 17417 - protein, 286 aa, Enterobacteria phage RB69
MKQYQYLINDILENGYETDDRTGTGTIALFGTKLRWDLTKGFPAVTTKKLAWKACIAELLWFMSGSTNVNDLRIRTHGSLIEGKTIWDDNYENQAKDLGYHSGELGPIYGKQWRDFGGVDQLVKTIDRIKALPNDRRQIVSAWNPAEIDQMALPPCHMFYQFNVRNGHLDLQWYQRSVDVFLGLPFNIASYAALTHIVAKMCNLIPGDLVFSGGNTHIYSNHVEQCKEVLRREPKELCSLEINWPSNFENWPTKIQMDWVTGTMTHSDFVLKNYESHPTIKAKMAV

SEQ ID NO: 17418 - DNA, 804 bp, Porphyromonas gingivalis W83
  CDS (1)..(804): transl_table=11
ttgcgtggtatgaaacagtatttggatctgcttcgccgcatcctcgacgagggagtacgaaaagaagaccgcacgggtacgggtacgatcagcgtattcggccatcagatgtgctttgaccttgaagagggatttcccttgcttacgaccaagcgattgcacttgaagtccattatatacgaactgctttggttcctcagaggtgacacgaacgtgcattacctgcaggaacatggcgtacgcatttggaacgaatgggctgatgagaacggcgatttgggacctatatatggctaccagtggcgcagttggccggactatcggggagggcatatagaccaaatgcaggaggtgctgcgccagctgcgcgaagaaccggacagccggcgcattatcgtatgctcgtggaatgtaggccagcttgccgatatgcatctgcctccatgccactgtttcatgcagttctatgtcgctgacggccggctgagcctgcaactctatcagcgcagtgccgattcttttctgggcataccgttcaacatagcttcgtatgcactcctgctacaaatgatcgctcatgtcacagggctgaaacccgggcgattcgtacatacactgggcgacgcccatatctatcttaaccacctcgaacaggtacagctacaactgagtcgtgagccgagagcgttgccccgaatggtactgaatccggaggtgtccgatctcttcgacttccgatacgaagacttccgactcgaagggtatgatccgcatccgcacattgcgggcgttgtagcagtctga

SEQ ID NO: 17419 - protein, 267 aa, Porphyromonas gingivalis W83
MRGMKQYLDLLRRILDEGVRKEDRTGTGTISVFGHQMCFDLEEGFPLLTTKRLHLKSIIYELLWFLRGDTNVHYLQEHGVRIWNEWADENGDLGPIYGYQWRSWPDYRGGHIDQMQEVLRQLREEPDSRRIIVCSWNVGQLADMHLPPCHCFMQFYVADGRLSLQLYQRSADSFLGIPFNIASYALLLQMIAHVTGLKPGRFVHTLGDAHIYLNHLEQVQLQLSREPRALPRMVLNPEVSDLFDFRYEDFRLEGYDPHPHIAGVVAV

SEQ ID NO: 17420 - DNA, 840 bp, Bacteriophage 44RR2.8t
  CDS (1)..(840): transl_table=11
atgattcaatataaagacttagttgaagatgttatcgcgaatggccgtcgcaaaaccgatcgcaccggtgttggcactcggtcagtatttggccgaatgctgcgattcgatttgtctaaaggtttccctgcggtgacgtgcaaacagctagcgtggaaatcggtagttggcgaattgctgtggtttatcagcggctccactaacgtcgaccatcttcgcaggataacccatgggccgaattccgataagcgaactatttgggatgccaactatgaagaacaggcaatcaatcttggatattctgatggttatttaggcccggtatatggcaagcagtggcgtcagtttggcaataagaacccagtcgatcagttgcaaaaagttatcgaccaaatcaaatcgaatccagattcccgccgtcttctggttgttgcttggaacccggaagatatcgatgctatggctctgccaccatgccatttcgcattccaattcgaagtatatgaaggcaaattgagtcttatgtggtcccaacgaagcgtcgacgtcgggttgggtctcccattcaatatcgcttcttacgccctcttggttcacattattgcaggcatatgcggtcttgaagtcggcgaacttgtattttctggtgcagatgtccacgtttacgagaatcacgtcgatgatttggttgaaatcttctggcgggatccacgtccgctgccgaaacttgcctactacgacgtagctaatttggctgaattgcgcaccatgactgttgacgactacgttctgacggaatatgatcctcacccgccaatcaagatgccgatggccgtatga

SEQ ID NO: 17421 - protein, 279 aa, Bacteriophage 44RR2.8t
MIQYKDLVEDVIANGRRKTDRTGVGTRSVFGRMLRFDLSKGFPAVTCKQLAWKSVVGELLWFISGSTNVDHLRRITHGPNSDKRTIWDANYEEQAINLGYSDGYLGPVYGKQWRQFGNKNPVDQLQKVIDQIKSNPDSRRLLVVAWNPEDIDAMALPPCHFAFQFEVYEGKLSLMWSQRSVDVGLGLPFNIASYALLVHIIAGICGLEVGELVFSGADVHVYENHVDDLVEIFWRDPRPLPKLAYYDVANLAELRTMTVDDYVLTEYDPHPPIKMPMAV

SEQ ID NO: 17422 - DNA, 834 bp, Bacteriophage Aeh1
  CDS (1)..(834): transl_table=11
atgaaagcttatctagatatcatcaattatactttcgagaacggcgaagatgaaatggatcggacgggtgtgggtacccgttctgttcttggtcaagtgtttcgacacgatatggcagacggtttccccgctgttaccacaaagacgttagcgtggaaagctgttcgcggtgagtgtctgtggtttatgaacggttttacaaacgttgaagttcttcgagcgatgacatatggcgttggatcgtcttccaaaacgatttgggacgataatttcaatcatcaaggggtagcactgggttacaccgatggtgagcttggtcctgtttatggcaagcaatggcgcgactttaacggcgttgatcaacttgctaaagctatcgaacgaatcaagactaatccagaatgtcgtcgtaatatcgtttgtgcttggaatccggttgatcttgacaaaatggctctgcctccttgtcacgttctgttccgtttcagcgttaagcgcggccggttgaatctgacttggtatcagcgttctgtggatactttcttgggtctgccgtttaacatcgctagttatggcctgctgcttgaaatcgtagcccagatcaccggatacaaagctggcattcttaccggtatgctcgatgatacacatatctatcacaatcactttgaacaagttcaagagcaattacagcgtgaaccacacaagcttccgacattgaagtttaaaaaccgctttacaaccctggaagaagcgtgtaatctgtctgtagatgatattgaactagaggattacaagtgccactcagctatcaaagcacctatggcagtgtaa

SEQ ID NO: 17423 - protein, 277 aa, Bacteriophage Aeh1
MKAYLDIINYTFENGEDEMDRTGVGTRSVLGQVFRHDMADGFPAVTTKTLAWKAVRGECLWFMNGFTNVEVLRAMTYGVGSSSKTIWDDNFNHQGVALGYTDGELGPVYGKQWRDFNGVDQLAKAIERIKTNPECRRNIVCAWNPVDLDKMALPPCHVLFRFSVKRGRLNLTWYQRSVDTFLGLPFNIASYGLLLEIVAQITGYKAGILTGMLDDTHIYHNHFEQVQEQLQREPHKLPTLKFKNRFTTLEEACNLSVDDIELEDYKCHSAIKAPMAV

SEQ ID NO: 17424 - DNA, 900 bp, Bacteriophage Felix 01
  CDS (1)..(900): transl_table=11
atgtcacaagctgatttgagttacaaaaatatcctgaaccatgttttatccgttggtgaactacgtactacacgaactggagatgttatctctgcatttgctccaccacaatttcgttttgatatgcgtactggttttccactcttaacatctaaacaggtgtttacacggcaagttattggggaagctttatggttcctgaatggtgagaataaacttagtgaactccgttaccgtacttggggtgaaaatgatggggaacgctggactatctggtcagatgattttaaacgctggttaagctctaattattcttctgaacaagactggttagaagatgcaggtggaagaatctacggagttcagtggagaaactttgaaggtcataatggttgtgttgtagaccagttagaaaccttagtaacgaagatgaaaggtgatatcacagaccgttacatgcttgtcaatgcttggaatgcagcagatattgcagctaactcaatggctttagcaccttgtcatgttatgtttcagatttatatcactaacgaaggtgaagttgacttacaatggtatcagcgttctgtagacacctttttaggacttccgtttaacattgcatcttatggttttattctggaagtactttgcaagatgactgggtacactccacgatacttgataggtgtctttggggatactcagatttatcagaaccatatgaagcaggtttatgaattgatgaataatgaagagttccatgcaccaacttttgagattggtctaccacttaacacgctaagtgacctaaaacaccttactgcgagtgattttattggtggtattaacaactacaaacacgcagggaagattgaagcacctttgtcagtaggtaagtaa

SEQ ID NO: 17425 - protein, 299 aa, Bacteriophage Felix 01
MSQADLSYKNILNHVLSVGELRTTRTGDVISAFAPPQFRFDMRTGFPLLTSKQVFTRQVIGEALWFLNGENKLSELRYRTWGENDGERWTIWSDDFKRWLSSNYSSEQDWLEDAGGRIYGVQWRNFEGHNGCVVDQLETLVTKMKGDITDRYMLVNAWNAADIAANSMALAPCHVMFQIYITNEGEVDLQWYQRSVDTFLGLPFNIASYGFILEVLCKMTGYTPRYLIGVFGDTQIYQNHMKQVYELMNNEEFHAPTFEIGLPLNTLSDLKHLTASDFIGGINNYKHAGKIEAPLSVGK

SEQ ID NO: 17426 - DNA, 1023 bp, Eremothecium gossypii
  CDS (1)..(1023)
atgagctggcgcagcttgaaagaccctacttacgcgaggcaagctcattatatatatcagctaaccttgcaacggaatatgggtcttcctaatctgaaaatggattcagttaaatcggacacgaggtcgtcggtcaatgcagaggagcagcagtaccttgacttgtgcaagcgcatcattgagcatggtgaattcagacctgatagaactggtaccggcacgtactcgttatttgcgccgccgcaacttcggttcgatctgagtggcgataagtttccgctactaaccaccaagaaggtatttacgcggggcatcatacttgaactattatggttcatagcaggctgcacggacggtaagaagctatcggaacagggggttaaaatctgggagggaaacgggtcgagagaatatttagacggactagggttgcacgaccgccgggaaggtgatctcgggccggtttacggattccaatggcgccacttcggagcggaatacgggacatgcgatgacgattatacgggaaagggtgtggaccagctgagggagctaatagataagattaagaacaagccatatgaccgtcgcattatcttgtcggcttggaatcccgcagatttcccaaagatggcgcttcctccatgtcatgtgctctcccagttctatgtaagttttggacctgaaggcagcagacctaagctctcttgccagctctaccaacggtcttgcgacatgggtcttggtgttccatttaatattgcatcgtatgccctcctgacgaaaatgattgcaatggtgtgtgacatggacgctggtgaattcatccatacaatgggagacgcacatgtctacagtgaccatatagctgcgctaaaagaacaaatcgaacgtgtccccagggaattccccaacttacgtattaaaagaaaggtgacagatatagacgattttaccctcgatgacttcgagattacggactataatccacaccccagaatacaaatgaatatgagcgtttag

SEQ ID NO: 17427 - protein, 340 aa, Eremothecium gossypii
MSWRSLKDPTYARQAHYIYQLTLQRNMGLPNLKMDSVKSDTRSSVNAEEQQYLDLCKRIIEHGEFRPDRTGTGTYSLFAPPQLRFDLSGDKFPLLTTKKVFTRGIILELLWFIAGCTDGKKLSEQGVKIWEGNGSREYLDGLGLHDRREGDLGPVYGFQWRHFGAEYGTCDDDYTGKGVDQLRELIDKIKNKPYDRRIILSAWNPADFPKMALPPCHVLSQFYVSFGPEGSRPKLSCQLYQRSCDMGLGVPFNIASYALLTKMIAMVCDMDAGEFIHTMGDAHVYSDHIAALKEQIERVPREFPNLRIKRKVTDIDDFTLDDFEITDYNPHPRIQMNMSV

SEQ ID NO: 17428 - DNA, 870 bp, Anopheles gambiae str. PEST
  CDS (1)..(870)
atgaatgaagaggaacaagcatatttgcagttaattcgtgacattatcaataaaggaagcaaacgcctcgaccgcacgggtgttggtaccttgtcgatatttggagcccagatgcgatttagtctacgcgacgggatcataccgttgttaacaacaaaaaaggtattctttagaggagtggccgaagaactactttggtttatcaagggctcgacgaatgtcaaggatttgcaagcaaagggagtacgcatttgggatggtaacagcactcgagagtatctggattcgtgcggcttcaccgatcgtgaggaaggggatttgggcccggtatatgggtttcagtggcgccactttggtgccacctacaaaacatgccacgacgattacacaggtcagggaatagatcagctggctgaagtgatcgacaaaattaagaacaatccctacgatcgtcgaatcatcatgtgcgcttggaatccttctgatattcctaacatggcactaccgccatgccactgcttggcacagtttttcgttagtgatggagagctgtcgtgtcagatgtatcaacgttcggccgacgtaggtctgggcgtgccctttaacattgccagctactccttgctgacccacatgatcgcgcatgtcaccggactaaaggcaggagagtttatccataccaccggcgacactcacatttatttgaatcacgtcgatggcttgcgtgagcaaatagaaaggacgcccaaaaaattcccaacactcgtttttaaacgaaaggtagaatcaattgacaattttacctatgacgattttgaaatcttgaattacaacccccagtctgcgataaaaatgaagatggcagtttaa

SEQ ID NO: 17429 - protein, 289 aa, Anopheles gambiae str. PEST
MNEEEQAYLQLIRDIINKGSKRLDRTGVGTLSIFGAQMRFSLRDGIIPLLTTKKVFFRGVAEELLWFIKGSTNVKDLQAKGVRIWDGNSTREYLDSCGFTDREEGDLGPVYGFQWRHFGATYKTCHDDYTGQGIDQLAEVIDKIKNNPYDRRIIMCAWNPSDIPNMALPPCHCLAQFFVSDGELSCQMYQRSADVGLGVPFNIASYSLLTHMIAHVTGLKAGEFIHTTGDTHIYLNHVDGLREQIERTPKKFPTLVFKRKVESIDNFTYDDFEILNYNPQSAIKMKMAV

SEQ ID NO: 17430 - DNA, 1107 bp, Neurospora crassa
  CDS (1)..(1107)
atgacagtcaccacatccgagcccgttgcgccagcgcagtcgcagtcgcaaacctcctctcgcaccaacccaacatcaaagcgtcatgaagaataccaatacctcgatctcgtccgtcaaattctggacgaaggtgaactccgtgaagaccgaacaggaacaggcacctactccatcttcgccccgacccccctgaagttcgccctctctcgaccctcctcctcctccccctcctcggggtcctcctccgatccatcctcgccagactacacctacacccccatcctcccgctccttacgaccaagcgggtcttcaccaaagccgtcctcctcgagctcctctggttcatctccgcctcgacctcctccaccacgctctccgcccagggagtcaaaatctgggatggtaacggatcccgcgccttcctcgacatgctcggtctttcccaccgcaaagaaggtgacctaggtcccgtatatggtttccaatggcggcactttggcgccgaatacgtcgattgcgagaccgattacaccgggcagggcgtggaccaactccagcgcatcatcgacactctccgcaacaacccgtacgatcgcagactgattctgagtgcatggaaccccaaggacatgagccagatggtgctgccgccttgtcacatgtttgcgcagttttatgtgtcgtacccggggtcgaggacacggggtggtgcaacacagacacagaataaggaaggggaactggacacaccaccaaaggagaagaagccaaggggtcacttgcactgccagttgtatcaaaggtcgtgtgacatgggactgggtgtgccctttaacattgccagctacgcgctgctgacgcacatgctcgcgcacgtgtgtgacttggtgccggggagcttgacccatgttatgggcgatgcgcatgtctatctcaaccatgtggacgcgctcaagacgcagctggagcgcgagccgagggagttcccgacgctggagatccagagggagaagggaggtagtatcgatgggtggaaggccgaggattttgttatcaaggggtacgagccacacaagacgattgctatggaaatgtctgtgtag

SEQ ID NO: 17431 - protein, 368 aa, Neurospora crassa
MTVTTSEPVAPAQSQSQTSSRTNPTSKRHEEYQYLDLVRQILDEGELREDRTGTGTYSIFAPTPLKFALSRPSSSSPSSGSSSDPSSPDYTYTPILPLLTTKRVFTKAVLLELLWFISASTSSTTLSAQGVKIWDGNGSRAFLDMLGLSHRKEGDLGPVYGFQWRHFGAEYVDCETDYTGQGVDQLQRIIDTLRNNPYDRRLILSAWNPKDMSQMVLPPCHMFAQFYVSYPGSRTRGGATQTQNKEGELDTPPKEKKPRGHLHCQLYQRSCDMGLGVPFNIASYALLTHMLAHVCDLVPGSLTHVMGDAHVYLNHVDALKTQLEREPREFPTLEIQREKGGSIDGWKAEDFVIKGYEPHKTIAMEMSV

SEQ ID NO: 17432 - DNA, 1020 bp, Magnaporthe grisea 70-15
  CDS (1)..(1020)
atggcagacgcaggtgctaaaccagcccagaatggcacagaaagacatgaagagtaccaatatctcgatcttgtgcgcgagatactcgacaatggcgagcacaggccagacaggaccggcacgggcacatactccatcttcgcaccgcgccccctcaagttctccctcaacaaggacggcacgccaatcctccctctgctgacgacgaagcgcgtcttctcgcgggccgtgatcctcgagctgctgtggttcgtgtcgggcgcgacgtcggcgaagcccctgagcgacgccggggtcaagatctgggacggcaacggcagccgtgagttcctggacgggctgggattgcagcaccgcgaggtgggcgacctgggccccgtctacggcttccaatggcgccactttggcgccgaatacaccgactgccacgcagactacacgggccagggcgtcgaccagctcgccgaggtcgtgcacaagctccgcacgaacccgtacgaccgccgcatggttcttagtgcttggaaccccaaggacctcaagcttatggtcctgccgccgtgccacatgtttgcgcagttttacgtctcgtatcccaaggccggcagtgacagcaacggcaacggaaacaccacagaaggcgcggaccagacgtcatcgccatccaagccaaagggccacctccactgccagctctaccagcggtcctgcgacatgggcctaggcgtgcccttcaacattgccagctacgcactgctgacgcacatgattgcgcgtgccacgggtctagtgcccgggtcgctgacgcacgtcatgggcgatgctcacgtctacgccgaccacgtcgacgcactccggacgcagctggagcgcgagccgaggccgttccccgagctcgagatcaacaggcccgaggtcccggagggtggcgacggcgtcattgacggctggaagctcgaggactttgtcatcaaggggtatgacccgcacaaggctattgctatgaagatgtctgtctga

SEQ ID NO: 17433 - protein, 339 aa, Magnaporthe grisea 70-15
MADAGAKPAQNGTERHEEYQYLDLVREILDNGEHRPDRTGTGTYSIFAPRPLKFSLNKDGTPILPLLTTKRVFSRAVILELLWFVSGATSAKPLSDAGVKIWDGNGSREFLDGLGLQHREVGDLGPVYGFQWRHFGAEYTDCHADYTGQGVDQLAEVVHKLRTNPYDRRMVLSAWNPKDLKLMVLPPCHMFAQFYVSYPKAGSDSNGNGNTTEGADQTSSPSKPKGHLHCQLYQRSCDMGLGVPFNIASYALLTHMIARATGLVPGSLTHVMGDAHVYADHVDALRTQLEREPRPFPELEINRPEVPEGGDGVIDGWKLEDFVIKGYDPHKAIAMKMSV

SEQ ID NO: 17434 - DNA, 978 bp, Gibberella zeae PH-1
  CDS (1)..(978)
atgaccatctcacagaataacacagatcccagtccctctaatggctcaaaatttatcaaccatgaagagaaccagtaccttgacctcgttcgggaaattcttgagaccggcgagcgtcgaccagatcgtaccggtacaggaacattctcaatcttcgctcctcgacccctgaaattcgccctcaacaacaacgggacccccattctccccctccttaccacgaagcgtgtcttcactcgcgccgtcattgccgagctcctctggttcattgagggtaacacctcttccaagagtctcagtgaggccggtatcaagatctgggatggaaacggctcgcgcgaatttctcgataaccttggtcttcaacatcgtgaggtcggcgacctaggtcctgtatacggcttccaatggcggcactttggcgctgagtacgtcgatgccaagacagattataccggccagggcgtagaccagcttgccgagatcattcacaagctacgaaccaacccttatgaccgccgcttagttctttctgcctggaaccctgccgacatgaagaagatggttctaccgccttgtcatatgtttgcccagttctacgtatcctatccccgaagcaaggacgagaactcagaggagaagccccaaggacaccttcactgtcagttatatcaacgatcttgcgacatgggtctgggcgttcccttcaacattgctagctacgcgctgctgacacacatgatggcacacgtctgtgagctggtccctggaagccttacccatgtcatgggtgatgctcatgtgtacctcgatcacgttgatgccctcaaggtccaacttgagcgcgagccgcgaaactttcccgagttggaaattgccagagaaaagggtggaagcattgatggatggaaggcagatgactttaccgtcaagggatatgacccccataaaacaattgctatgaagatgtctgtatga

SEQ ID NO: 17435 - protein, 325 aa, Gibberella zeae PH-1
MTISQNNTDPSPSNGSKFINHEENQYLDLVREILETGERRPDRTGTGTFSIFAPRPLKFALNNNGTPILPLLTTKRVFTRAVIAELLWFIEGNTSSKSLSEAGIKIWDGNGSREFLDNLGLQHREVGDLGPVYGFQWRHFGAEYVDAKTDYTGQGVDQLAEIIHKLRTNPYDRRLVLSAWNPADMKKMVLPPCHMFAQFYVSYPRSKDENSEEKPQGHLHCQLYQRSCDMGLGVPFNIASYALLTHMMAHVCELVPGSLTHVMGDAHVYLDHVDALKVQLEREPRNFPELEIAREKGGSIDGWKADDFTVKGYDPHKTIAMKMSV

SEQ ID NO: 17436 - DNA, 1665 bp, Ustilago maydis 521
  CDS (1)..(1665)
atggcgatgcctcgcgtgttcctcgcgcgacacggcgagaccgaatggtccatctcgggccagcacactggtcgatccgatatcccactcaccccacacggtgaagaggtgatgcgacaacttgcgcccagcatcgtcggcgtcggcaacggcaagttgattgacccgactagactcaatcacatctttgtcagtccacgcaagcgatcgcagcgtacgcttgagatcatgctacagcacatccccgcctcgcagcgtttgggcatccctgacgtcgagatcgtccaggactgccgcgagtgggactacggtgcgtacgaagggctcaagacggacgagattcgagccaaacatcccggatgggatatctggaccgaaggaacacccgatcatcctgacagacccgacgagctgccaggtgagtcggcacagcacatgagcgatcgtgttgactcggtcatcgctaaaatccgcagtctgcaatctgggcatgtcgacaagcgcaatcagggtcacgatgtgggcagtaagacgtgcgatgttctacttgtatgccacggtcacttcaaccgggtgttcgttgctcgatggctcggtttaccgctgaccaacggacgtttgttcgaaatggatgcaggcggaatggtggtcctcggctatgcgcatcacagctttgctgaacctaccgtcgccggtatcttctcgtccaaaactggccccaagggtgacaaggaaggtgctcccggctcgtgtgggtcagcgaaacacgaagaatcgcagtacctcgagctggttcaacgagttatctcaacgggcgaatcaagaccggatcgaacgggcacaggtacgctcgcacttttcgctccgcaaccgagtttgcgattcgacttgacgaacggcaccttgcctctgctcaccaccaagcgagtgttcttccgcggagtgctggaggagttactctggttcgtgggtggtaaaaccgatgccaagcttctcaccgagaagagcgtgcacatttgggacggcaacggatctcgggccttcctcgactctcgtggactctcgcatcgtcgggaaggcgatctaggacccgtctatggtttccaatggcgacactttggtgctacgtacaaagactgtgataccgactacgccggtcagggtgtcgatcaactggcttccgtgatcgacaagattcgcaacaatcctaccgatcgtcgtatcttgctcagcgcatggaacccggcagatctcgaactgatggcgcttccgccatgccacatgtttgctcaattctttgtctcgaacctggacgcctattcgaagggtcaaggtaaaaagcacctctcgtgccagatgtaccagcgttcctgcgaccttgggttgggtgtacctttcaacattgctagctatgcgttgctaacctacatgatcgccaaagtgaccgattgcgaacccaaggaactcatactggcaatgggtgatgctcacgtttacaaggaccatgtgcaaccgctcaaggcgcagttggagagagacccgcttcccttccctaagctcaagatcgaaagggacgtcaaggatattgacgactttacgttcgatgatttcgtcgtgcaaggttacaaatgtcacggaaagatcgatatgaagatgagcgtttag

SEQ ID NO: 17437 - protein, 554 aa, Ustilago maydis 521
MAMPRVFLARHGETEWSISGQHTGRSDIPLTPHGEEVMRQLAPSIVGVGNGKLIDPTRLNHIFVSPRKRSQRTLEIMLQHIPASQRLGIPDVEIVQDCREWDYGAYEGLKTDEIRAKHPGWDIWTEGTPDHPDRPDELPGESAQHMSDRVDSVIAKIRSLQSGHVDKRNQGHDVGSKTCDVLLVCHGHFNRVFVARWLGLPLTNGRLFEMDAGGMVVLGYAHHSFAEPTVAGIFSSKTGPKGDKEGAPGSCGSAKHEESQYLELVQRVISTGESRPDRTGTGTLALFAPQPSLRFDLTNGTLPLLTTKRVFFRGVLEELLWFVGGKTDAKLLTEKSVHIWDGNGSRAFLDSRGLSHRREGDLGPVYGFQWRHFGATYKDCDTDYAGQGVDQLASVIDKIRNNPTDRRILLSAWNPADLELMALPPCHMFAQFFVSNLDAYSKGQGKKHLSCQMYQRSCDLGLGVPFNIASYALLTYMIAKVTDCEPKELILAMGDAHVYKDHVQPLKAQLERDPLPFPKLKIERDVKDIDDFTFDDFVVQGYKCHGKIDMKMSV

SEQ ID NO: 17438 - DNA, 3207 bp, Gallus gallus
  CDS (1)..(3207)
atgagcaggcatcccggatgggatgcggtgtccctccttgacctccctgcgcgttttggcctcctaagtgcccgaatgcctcgttggtaccgaagtgagaaatcccgaaccgcgggtgcgtacccatcaggtgggacgtgcggcgctcagcctcaaaccatcctactggattcaaagggatcccgctcagtgcgtggcctgaagaatatgtgcgcacaaagatttgctgcaaacctgcccttactttggcaattgaaggtggcaatacaggtttgtgatcccgctctaatccgtaacatcagtgctgatgaaggagagctcatgcaccgtatgccacttcattcttgggatgagcaaagcagtgcaggcgccagagaggctttcccactgcagaaaggagacgtgcgtgatttggcctctgcagtgcagctggagtcagtgctggtgctgaaagcctttgaggggggagttcatttatatcaacatgttttgaaatgtttccattttgatgaaaaatgcactgctgcaaaggaaaacattttgatggaaaagccagccaatattttaggtactgttcgaagacaggatggcggtttattacaacccgcagatgaaggaaatgaacatatttcaaggacgtatgcagatgtagagttctgcttgctcatctgtgtcagtgctgggcctgaagaggagctaacccagctgtcctgcagaaactctcctactgtccagcacgagcagcttccctccgagaaagaacatgaagtcctcttggttatttataatacacttgctatggctgaatggtcaccagtgtgcgccaaccaggcaggaggaaatgaatctccgggaaaacctgaagagtacgtatgcagggttgtgctggaagccttcaggcccaggtctccacttaggcttgctctggtttgctttgcctttcatgctcgctggagtcaagaggttctgcctttaactttatctgaagttggggagaaatatgtagatgaagaggtaaagaaagctttgattggtattaagcacatgaaaattatgatggaaagaaatgaagataagcacatagatctgatgaaaaccttgaagaagagcagtgaagaaaaacaggaagctttgcggcttatggatgaagtaaaggaaagattagaagaagaagaaagacaatgccaagcatctttgaaaaatctatgggatgaatgtgaaacttgtttagaaagtacctgcatgcgattctatacgacttgcagacgtggtttatcaacatttagaagcaaggttgaagattttttgaggaaaatacctccacttattttcccttttcgtgaagatcaaggaaaagacatccagtttaatgaaaagcctgagaaagaggatactcagctagtaaaaatggaagatctgtttagccaactgttatcagacatgggctcagtgtttgacagaagtttcatgtttttcaagcagatgcaaaaagaatttgaccaatcctttcaaacatatttcatgtctgatctggatttgagtgaatcccccagcatgcctgctttacctgaggccattaccagaaatgatggcttacagaaagactggggtataccggccttcctgcagacagtctttgatttcagcaagacagtgtttgaaggtgtcagtgaggtgattactgaggtattcgatgaatacaaagataatagaagagatttgccagaacaagccaaaggttctgacaggggtggcatgttctcaaaaattgtgtcaggacgtcaaaggactctgtgcaaagagcttcgagagaattcctctggatgcacacagtttcatgagagatgtcagaaatgtcaagacaatcttttgcatgattgcccaaatgttcctgaactgcacatgaagtttgatgaagcctttaagctggttaatctctctggtgagcagtatgagcagattctccagatggttcagcgtcatacagaagacacttcctacctgctgaacaaaatgaaagaaagatttgggtgggtgtctgagttatccaatatgaccatcggaccagaaaatattttcaatatagttaagtcaagcaaacctcctcttgaaatcaatgagaacacctcgcacgcaggttttcagaggcggcgctcacggggcctcccggagggggcggggagggaggtggcagcccgcccctgcgtgccgctgcgcgggaaggaaggcttttggcgggctcggcggggacgggcggacagccggagcgcacccggctgcggggaccgcccgtgccgcctcctgcccgccatgccggccgcggaggaaccgtcgagcggcctggagggcggcgagccgcagtatctgcagcaggtgcggcacatcctgcagcacggccaccgaaaggaggaccgcacgggcaccggcaccatctccgtcttcggcatgcaggcgcggtacagtctgagagatcagttcccactgctgacaacaaagagggtgttctggaaaggagtgctggaggagctactgtggtttatcaagggttctacaaatgccaaagagctctctgcaaagggtgtgaagatttgggatgccaatgggtcacgtgagttcctggataagcaggggttttgcaccagagaagagggggacttgggaccagtttatggtttccaatggaggcattttggagcagattacaaagacatgcacacagattattccaaccaaggagttgatcagttacaaaaagtgattgagatgatcaaaaccaatccagatgacagaagaatcatcatgtgtgcttggaatcccaaagatatttctctgatggctttgccaccttgccatgctctttgccagttctatgttctaaatggtgaactgtcttgccaactgtatcagaggtctggagatatgggactaggagtgcctttcaacatcgccagctattcgctgctcacatacatgattgcccacgtcacagggctgaagcctggggaattcatacacaccttaggagatgctcacatatatctgaatcatgtggagcctctaaaagttcaacttcaaagggagcccagacctttacccaaactcagaattcttcgtaaggttgaagacatcagtgactttaaggcagaagattttcagattgaagattataatcctcatccacctattaagatggagatggctgtttaa

SEQ ID NO: 17439 - protein, 1068 aa, Gallus gallus
MSRHPGWDAVSLLDLPARFGLLSARMPRWYRSEKSRTAGAYPSGGTCGAQPQTILLDSKGSRSVRGLKNMCAQRFAANLPLLWQLKVAIQVCDPALIRNISADEGELMHRMPLHSWDEQSSAGAREAFPLQKGDVRDLASAVQLESVLVLKAFEGGVHLYQHVLKCFHFDEKCTAAKENILMEKPANILGTVRRQDGGLLQPADEGNEHISRTYADVEFCLLICVSAGPEEELTQLSCRNSPTVQHEQLPSEKEHEVLLVIYNTLAMAEWSPVCANQAGGNESPGKPEEYVCRVVLEAFRPRSPLRLALVCFAFHARWSQEVLPLTLSEVGEKYVDEEVKKALIGIKHMKIMMERNEDKHIDLMKTLKKSSEEKQEALRLMDEVKERLEEEERQCQASLKNLWDECETCLESTCMRFYTTCRRGLSTFRSKVEDFLRKIPPLIFPFREDQGKDIQFNEKPEKEDTQLVKMEDLFSQLLSDMGSVFDRSFMFFKQMQKEFDQSFQTYFMSDLDLSESPSMPALPEAITRNDGLQKDWGIPAFLQTVFDFSKTVFEGVSEVITEVFDEYKDNRRDLPEQAKGSDRGGMFSKIVSGRQRTLCKELRENSSGCTQFHERCQKCQDNLLHDCPNVPELHMKFDEAFKLVNLSGEQYEQILQMVQRHTEDTSYLLNKMKERFGWVSELSNMTIGPENIFNIVKSSKPPLEINENTSHAGFQRRRSRGLPEGAGREVAARPCVPLRGKEGFWRARRGRADSRSAPGCGDRPCRLLPAMPAAEEPSSGLEGGEPQYLQQVRHILQHGHRKEDRTGTGTISVFGMQARYSLRDQFPLLTTKRVFWKGVLEELLWFIKGSTNAKELSAKGVKIWDANGSREFLDKQGFCTREEGDLGPVYGFQWRHFGADYKDMHTDYSNQGVDQLQKVIEMIKTNPDDRRIIMCAWNPKDISLMALPPCHALCQFYVLNGELSCQLYQRSGDMGLGVPFNIASYSLLTYMIAHVTGLKPGEFIHTLGDAHIYLNHVEPLKVQLQREPRPLPKLRILRKVEDISDFKAEDFQIEDYNPHPPIKMEMAV

SEQ ID NO: 17440 - DNA, 897 bp, Candida glabrata CBS138
  CDS (1)..(897)
atgacagttacaaacttagaagagaaacaatacttagatttgtgtgagagaattataaaagagggtgaatttagaccagacagaacaggtacaggtacgtatagtcttttcgcacctccacagcttaggtttagtttgaaagatgacacttttcctctattaactaccaagaaagtttttacgaaaggtatcatcttagaactgttgtggtttattgcaggctgtactgacgctaagaaactatccgatcaaggtgttaaaatatgggaaggaaatgggtcccgtgaatacttggacaagatgggttttgttgacagaagagaaggtgatctaggtccagtctatggtttccaatggagacattttggtgctgaatacaagacctgtgaagatgactacacaggtcaaggtgttgatcaactgaaagaagttatccacaagttgaagacaaatccatacgacagaagaataatcatgagtgcgtggaacccacctgattttcctaaaatggcattgcctccatgtcatgttttttcccaattttacgttaactttccaaaggatggcaagccacaactttcttgcctgttataccagagatcttgtgatatgggccttggtgttcctttcaatattgcatcttatgcactattaacaaaaatgattgcacatgtttgtgatatggaaccaggtgaatttattcacacattaggtgatgcccatgtatataaggaccacgttgatgcattgaaggaacaaatatcaagaactccaagagacttcccaaaactgaggataaataggaaggtatctgacattgatgactttaaatttgaggattttgtgttagaggaatacgatccacatccaagaattcaaatgaatatgagtgtttaa

SEQ ID NO: 17441 - protein, 298 aa, Candida glabrata CBS138
MTVTNLEEKQYLDLCERIIKEGEFRPDRTGTGTYSLFAPPQLRFSLKDDTFPLLTTKKVFTKGIILELLWFIAGCTDAKKLSDQGVKIWEGNGSREYLDKMGFVDRREGDLGPVYGFQWRHFGAEYKTCEDDYTGQGVDQLKEVIHKLKTNPYDRRIIMSAWNPPDFPKMALPPCHVFSQFYVNFPKDGKPQLSCLLYQRSCDMGLGVPFNIASYALLTKMIAHVCDMEPGEFIHTLGDAHVYKDHVDALKEQISRTPRDFPKLRINRKVSDIDDFKFEDFVLEEYDPHPRIQMNMSV

SEQ ID NO: 17442 - DNA, 939 bp, Kluyveromyces lactis NRRL Y-1140
  CDS (1)..(939)
atgacgctgagcgatgaaaacgtgaagagagttaagcttgaggctgttaacgcggaagaacagcagtatttggatttatgtgaaaggattatcaatgagggagaattcagaccagatagaactggtacagggacttattccctttttgcgcctccacagttacggtttaatttgagcaatgatactttcccgcttctcactacgaagagagtgtttacgaaaggtattattttggagctcttatggtttgttgctggatgtacagacgggaagaaattatcagaacaaggcgttaagatatgggaaggtaacggttctcgtgagtacctggactcacttgggttgactgacagaagagagggggatttaggaccagtttacgggttccaatggagacattttggggccgaatataagacatgtgatgatgattatagtggtcaaggtgttgatcagttgaaggagattattcataagttgaagacaaatccatacgacagaagaataattctttctgcatggaaccctccggatttccccaagatggctttaccgccatgccatgttttctcgcaattttacgtcagtttccccaagggagaaggtgccaaaccaagattgtcatgtgtactttatcagagatcatgtgatatgggtctaggagtaccctttaacatcgcgtcgtatgcgctactgacgaagatgattgctatggtctgtgatatggaacctggtgaatttattcacactttgggtgatgcgcatgtttataaagatcatgttgatgcattaaggacacaaattgccagagagccaagagctttcccaaaattgaagataaagagaaatgtcagtgatatcgacgatttcaaatacgaagacttcgaaataactgactataaccctcatgggaagattcaaatgaagatgagcgtttga

SEQ ID NO: 17443 - protein, 312 aa, Kluyveromyces lactis NRRL Y-1140
MTLSDENVKRVKLEAVNAEEQQYLDLCERIINEGEFRPDRTGTGTYSLFAPPQLRFNLSNDTFPLLTTKRVFTKGIILELLWFVAGCTDGKKLSEQGVKIWEGNGSREYLDSLGLTDRREGDLGPVYGFQWRHFGAEYKTCDDDYSGQGVDQLKEIIHKLKTNPYDRRIILSAWNPPDFPKMALPPCHVFSQFYVSFPKGEGAKPRLSCVLYQRSCDMGLGVPFNIASYALLTKMIAMVCDMEPGEFIHTLGDAHVYKDHVDALRTQIAREPRAFPKLKIKRNVSDIDDFKYEDFEITDYNPHGKIQMKMSV

SEQ ID NO: 17444 - DNA, 951 bp, Debaryomyces hansenii CBS767
  CDS (1)..(951)
atgacggtatctacaaacacagcagagcaaacatacttggatttgtgtgaacgtatcataaatgaaggagaacatcgtccagatagaactggaacgggtactaaatcgctttttgctcctccacagttgagatttaatctctcagacgatacattccctctacttactacaaagaaggttttttcgagagcaatcattcatgagttgttatggttcgtgcaaggatgtacagatgctaaaaagttgtcggaaaagggtgtgaagatttgggaaggcaatggatcaagagaatacttggactcaatagggttgacggaccgtcgtgagggcgatttaggtccagtttatgggttccaatggaggcattttggggcagagtacaaggattgcgatgccgattattcgggacaaggggttgatcaattacaggatgttataaaagaattgaaaacaaatccatacgacaggagaattatcatgtcagcatggaatccaccagattttgctaagatggcattgccaccttgccatgtattctgccaattttgcgtcaactttccaaacgagactccagactctaacacaaataaacaacaaaagacgtcgtccagaccaaaattatcgtgtttactataccaacgttcatgtgatatgggattgggtgttccattcaatattgcttcgtatgccttattaaccaagatgattgcacatatagtcgacatggattgtggtgagtttatccatacattaggtgatgctcatgtgtatttggaccatgtagatgctctaaaagaacaattggtcagaactcctaaagatttccctaaattaataatcaaggaagaaagaaaagatgaaatcaagtctattgatgatttcaaatttgaagattttgaaataattggctacgatccttatggtcccattaaaatgaaaatgagtgtttag

SEQ ID NO: 17445 - protein, 316 aa, Debaryomyces hansenii CBS767
MTVSTNTAEQTYLDLCERIINEGEHRPDRTGTGTKSLFAPPQLRFNLSDDTFPLLTTKKVFSRAIIHELLWFVQGCTDAKKLSEKGVKIWEGNGSREYLDSIGLTDRREGDLGPVYGFQWRHFGAEYKDCDADYSGQGVDQLQDVIKELKTNPYDRRIIMSAWNPPDFAKMALPPCHVFCQFCVNFPNETPDSNTNKQQKTSSRPKLSCLLYQRSCDMGLGVPFNIASYALLTKMIAHIVDMDCGEFIHTLGDAHVYLDHVDALKEQLVRTPKDFPKLIIKEERKDEIKSIDDFKFEDFEIIGYDPYGPIKMKMSV

SEQ ID NO: 17446 - DNA, 891 bp, Yarrowia lipolytica CLIB99
  CDS (1)..(891)
atgaccactctcaacgaacaaggatacctcgatctgtgcgcacgcgtgatcgaagagggtgaatcacgtgacgaccgaaccggcaccgggactctctctctgtttgccccccctcagcttcgattcgatctgtccaacgacattcttcccctgctcaccaccaagcgagtcttctaccgaggcgttctggaggagcttttgtggtttgtggctggatgcaccgacggcaaaaaactgagcgagaaaaacattcacatctgggacggaaatggatctaaggagttcctggaaaaggccgggctgggccacagacgagagggagacctgggaccggtctatggcttccaatggcgccatttcggagccgagtacaagaattgtgacacggattacactggccaaggcgtggaccagctcaaacaggtgatacacactctcagaaccaaccctcacgaccgtcgaatcattctgtctgcatggaaccccgccgatctcccaaagatggcgcttcctccctgtcacatgttttgccagttttatgtgtcgtacaaaaactcggaacgaggacgtctgtcgtgtcagctgtatcagcgatcatgtgacctgggtcttggagtccccttcaacattgcctcctacgctctgctcacccgaatgattgcccaggtcaccgatttggactgtggagagctcattcacaccatgggagacgcccatgtgtacaaggatcacgtggacgcactcaagcagcagattgctcgaacgccaggccagttccccaagctcacttttgcacgagatatcaaggacattgacggtttcaactacgaggactttgtgctcgagggatacaagccccagtccaagattgagatgcagatgagcgtttag

SEQ ID NO: 17447 - protein, 296 aa, Yarrowia lipolytica CLIB99
MTTLNEQGYLDLCARVIEEGESRDDRTGTGTLSLFAPPQLRFDLSNDILPLLTTKRVFYRGVLEELLWFVAGCTDGKKLSEKNIHIWDGNGSKEFLEKAGLGHRREGDLGPVYGFQWRHFGAEYKNCDTDYTGQGVDQLKQVIHTLRTNPHDRRIILSAWNPADLPKMALPPCHMFCQFYVSYKNSERGRLSCQLYQRSCDLGLGVPFNIASYALLTRMIAQVTDLDCGELIHTMGDAHVYKDHVDALKQQIARTPGQFPKLTFARDIKDIDGFNYEDFVLEGYKPQSKIEMQMSV

SEQ ID NO: 17448 - DNA, 978 bp, Canis familiaris
  CDS (1)..(978)
atgcccgcccccggctccgagctgcagcgcccgccatcgccgcccgccgcgcagaagccgcgcgcccggccgcagccgcctccccacggggagctgcagtacctggggcaggtggagcacatcctgagctgcggggcccggaagcacgaccgcacgggcacgggcacgctgtcggtgttcggcatgcaggcgcgctacagcctgagagatgaatttcctctgctgacaaccaaacgtgtattttggaagggtgttttggaggagttgctgtggtttatcaagggatccacaaacgctaaggaactgtcttccaggggagtgaaaatctgggatgccaatgggtctcgagactttttggacagcctgggattcgccaaccgagaagaaggggatttaggcccaatttatggctttcagtggaggcattttggggcagaatacaaagataaggattcagattattcaggtcaaggagtcgaccagctgcaaaaagtgattgacacaatcaaaaccaaccctgacgacagaagaattattctgtgtggttggaatccaaaagatcttcctctgatggccctacctccgtgccatgccctctgccagttctatgtggtgaacggtgagctgtcctgccagctataccagaggtcaggagacatggggctgggcgtgcccttcaacatcgccagctacgccctgctcacctacatgatcgcacacatcacaggcctgaagccaggtgacttcatacatactttgggagatgcgcatatttacctgaatcacattgagccgctgaaaatacagctgcagcgagaaccaaggcctttcccgaagctcagaatccttcgaagagttgagaaaattgatgacttcaaggctgaagactttcagatcgaggggtctgcgaatttcaagaattacacatcagctgttaaccccaaatttgagcaagctgaggaacaccagcattcttaa

SEQ ID NO: 17449 - protein, 325 aa, Canis familiaris
MPAPGSELQRPPSPPAAQKPRARPQPPPHGELQYLGQVEHILSCGARKHDRTGTGTLSVFGMQARYSLRDEFPLLTTKRVFWKGVLEELLWFIKGSTNAKELSSRGVKIWDANGSRDFLDSLGFANREEGDLGPIYGFQWRHFGAEYKDKDSDYSGQGVDQLQKVIDTIKTNPDDRRIILCGWNPKDLPLMALPPCHALCQFYVVNGELSCQLYQRSGDMGLGVPFNIASYALLTYMIAHITGLKPGDFIHTLGDAHIYLNHIEPLKIQLQREPRPFPKLRILRRVEKIDDFKAEDFQIEGSANFKNYTSAVNPKFEQAEEHQHS

SEQ ID NO: 17450 - DNA, 1257 bp, Canis familiaris
  CDS (1)..(1257)
atgcccgcccccggctccgagctgcagcgcccgccgtcgccgcccgccgcgcagaagccgcgcgcccggccgcagccgcctccccacggggagctgcagtacttggggcaggtggagcacatcctgagctgcggggcccggaagcacgaccgcacgggcacgggcacgctgtcggtgttcggcatgcaggcgcgctacagcctgagagatcatgcgtggacacagcggaccgctctggcccacgagcggacacggtctggggttgtctgcctcccagtagacaccgggacgggacctgcctgggctgggccacgggcttcgctgcagagcccccttcttttttttattgctcctcctcctgtctctccgacctggcccctcggttttgcaaagtatttaaaaattggagcgaacgaatacggtcgggtcagcggcgcgcgggaagagggcgcgaacccagaggggctgggccggaacttgcggttccatgaatttcctctgctgacaaccaaacgtgtattttggaagggtgttttggaggagttgctgtggtttatcaagggatccacaaacgctaaggaactgtcttccaggggagtgaaaatctgggatgccaatgggtctcgagactttttggacagcctgggattcgccaaccgagaagaaggggatttaggcccaatttatggctttcagtggaggcattttggggcagaatacaaagataaggattcagattattcaggtcaaggagtcgaccagctgcaaaaagtgattgacacaatcaaaaccaaccctgacgacagaagaattattctgtgtggttggaatccaaaagatcttcctctgatggccctacctccgtgccatgccctctgccagttctatgtggtgaacggtgagctgtcctgccagctataccagaggtcaggagacatggggctgggcgtgcccttcaacatcgccagctacgccctgctcacctacatgatcgcacacatcacaggcctgaagccaggtgacttcatacatactttgggagatgcgcatatttacctgaatcacattgagccgctgaaaatacagctgcagcgagaaccaaggcctttcccgaagctcagaatccttcgaagagttgagaaaattgatgacttcaaggctgaagactttcagatcgaggggtctgcgaatttcaagaattacacatcagctgttaaccccaaatttgagcaagctgaggaacaccagcattcttaa

SEQ ID NO: 17451 - protein, 418 aa, Canis familiaris
MPAPGSELQRPPSPPAAQKPRARPQPPPHGELQYLGQVEHILSCGARKHDRTGTGTLSVFGMQARYSLRDHAWTQRTALAHERTRSGVVCLPVDTGTGPAWAGPRASLQSPLLFFIAPPPVSPTWPLGFAKYLKIGANEYGRVSGAREEGANPEGLGRNLRFHEFPLLTTKRVFWKGVLEELLWFIKGSTNAKELSSRGVKIWDANGSRDFLDSLGFANREEGDLGPIYGFQWRHFGAEYKDKDSDYSGQGVDQLQKVIDTIKTNPDDRRIILCGWNPKDLPLMALPPCHALCQFYVVNGELSCQLYQRSGDMGLGVPFNIASYALLTYMIAHITGLKPGDFIHTLGDAHIYLNHIEPLKIQLQREPRPFPKLRILRRVEKIDDFKAEDFQIEGSANFKNYTSAVNPKFEQAEEHQHS

SEQ ID NO: 17452 - DNA, 918 bp, Apis mellifera
  CDS (1)..(918)
atgaatgaatatgaaataattacatcacaggaatgctttcaaaatgaaaaaaaacatgaagaatatcaatatttaaatttgatcgaaaaaatcattaaagatggaacaagaaaagatgatcgtactggcgtgggaacgttgtccattttcggaacccagatgagatttaatttacgaaataatatatttccattattaactacaaaacgcgtattttggaaaggtgtagtggaggaattgttatggtttattaaaggatccacaaatgcaaagaaattaagtgaaaaggatgttcatatttgggatgcaaatagttcacgtgaattcttagattcttgtggttttatagatagagaagaaggagatttaggtcctatttatggatttcaatggagacattttggtgcaacatataaagatatgtacaaagattataatggagaaggtattgatcaattaaaagaagttatagataagatacgatattctcccaatgatagaagaattataatgacagcatggaatccaattgatattccaaaaatggctttacctccttgtcattgtttcgttcaattttatgtaagcaatgaagaattatcatgccaactttatcaaagaagtgcggatatgggtcttggtgtaccatttaatattgcatcttattctttattaatttatatactggcacatattacaaacttgaagccaggtgaatttatacatacaatgggcgattgtcatgtataccttaatcatatatccgcacttaaggaacaaatcaaacgtgtaccaaaaccatttccatatttaaaaatcattagaaacgttgaagatataaacgattttacagcaaatgattttgaactgattggatatgacccacatgcaaaaatctctatgccaatggccgtttaa

SEQ ID NO: 17453 - protein, 305 aa, Apis mellifera
MNEYEIITSQECFQNEKKHEEYQYLNLIEKIIKDGTRKDDRTGVGTLSIFGTQMRFNLRNNIFPLLTTKRVFWKGVVEELLWFIKGSTNAKKLSEKDVHIWDANSSREFLDSCGFIDREEGDLGPIYGFQWRHFGATYKDMYKDYNGEGIDQLKEVIDKIRYSPNDRRIIMTAWNPIDIPKMALPPCHCFVQFYVSNEELSCQLYQRSADMGLGVPFNIASYSLLIYILAHITNLKPGEFIHTMGDCHVYLNHISALKEQIKRVPKPFPYLKIIRNVEDINDFTANDFELIGYDPHAKISMPMAV

SEQ ID NO: 17454 - DNA, 1965 bp, Aspergillus nidulans FGSC A4
  CDS (1)..(1965)
atgccttctgcgcttacttttgatttgcatcggaagtgttctactactaaagcgcgcgcaagcaccctccacctccctcatggatccgtctcgctcccaatcttcatgcctgtcgcgacacaggcaagtctcaagggccttacatatgaccaattgaaacaaacagggtgcatgctctgcctcaataacacgtaccaccttggcttgaagccagggcaggctgtactggatgaggtagggggagcacatgcgctgcaaggctggaatcgcaacatcctaacagacagcggtggctttcaaatggtttctcttctcgagctcgcggaagtcactgaggagggtgtccggtttctgtcaccgcacgatggcacgccgatgctgctcacaccggaacactcaatctcactacagaattccattgggtccgatattatcatgcagcttgacgatgtgatagcgactacatcgccagatcacgaacggattcatgaagccatggagcgctcggtgcgctggctagatcggtgcattgcagcccacaaaaccccagaaacgcagaatttattctgcattattcaagggggactggatctagagctgcgaaaacggtgctgcgcggagatggtagcacgcgacacgccaggaattgcgataggtgggctgtcaggtggagaggcgaaagaggatttctgtaaagttgttgatacatgtactggtctccttccggaatataagccgcgatatgtgatgggcgtgggctatcaggaggacttgattgtgggagtggcccttggagcggacatgttcgactgtgtatggccgacaagaactgccccaagggaagaaggaggttccggcattacgagagcctatctccaccacctggctgctaaagagacagccggggcgcatctgatagagtcaagcacgacagggtacaaaatgactgtctcactggacactcccagagaaaatgccaccaccgccaccgccggtcctcaacccccagcccacaacccctctcacgaagaacaccaatacctcaacctgatccgccaaatccttgcggaaggcgagcaccgccctgaccggacgggcacgggaacacgctcaatcttcgccccaaaccctatgcgcttctcgctctcgaagcccagccccacgaacccatctacaaagatcccaatcctccccctcctcaccacaaaacgcgtcttcttgcgcgccgtccttgccgaacttctctggttcatatccggctcaacatcaagcattccgctctccgaagcgggcatcaaaatctgggatgggaacggatcgcgtgagttcctcgacaaagtcgggctctcgcaccgcgaagttggcgacctcggccccgtatacggattccagtggcgccatttcggggctgagtatgtcgatgcccatacggattatacagggcagggagttgaccagttagcggacattgtgaggaagattaaggagacgccgtttgatcgccggatcatcatgtcggcgtggaatccagcggacctgaagaagatggcgcttccgccttgccatatgtttgcgcagtactatgtttcttatcctgagggcattgaggatgggaagggcaaaggcaagggagagttgagctgtttgttgtaccagaggagttgtgatatggggctgggcgtcccattcaacattgcttcatatgcgttgctgacgcacatcattgctcatgcgacggatttgaacccggggaagttgatccatactatgggtgatgcgcacgtatacctggaccatgtggaagccttggaagagcagttgactagggaacctacggattttccagagttgaagattaagagggaggaccgggggagcggagttattgacggctggaaagaagaggaattcgaggtcattggctatgcgcctcacaaggcgatcaagatgaaaatgagtgtttag

SEQ ID NO: 17455 - protein, 654 aa, Aspergillus nidulans FGSC A4
MPSALTFDLHRKCSTTKARASTLHLPHGSVSLPIFMPVATQASLKGLTYDQLKQTGCMLCLNNTYHLGLKPGQAVLDEVGGAHALQGWNRNILTDSGGFQMVSLLELAEVTEEGVRFLSPHDGTPMLLTPEHSISLQNSIGSDIIMQLDDVIATTSPDHERIHEAMERSVRWLDRCIAAHKTPETQNLFCIIQGGLDLELRKRCCAEMVARDTPGIAIGGLSGGEAKEDFCKVVDTCTGLLPEYKPRYVMGVGYQEDLIVGVALGADMFDCVWPTRTAPREEGGSGITRAYLHHLAAKETAGAHLIESSTTGYKMTVSLDTPRENATTATAGPQPPAHNPSHEEHQYLNLIRQILAEGEHRPDRTGTGTRSIFAPNPMRFSLSKPSPTNPSTKIPILPLLTTKRVFLRAVLAELLWFISGSTSSIPLSEAGIKIWDGNGSREFLDKVGLSHREVGDLGPVYGFQWRHFGAEYVDAHTDYTGQGVDQLADIVRKIKETPFDRRIIMSAWNPADLKKMALPPCHMFAQYYVSYPEGIEDGKGKGKGELSCLLYQRSCDMGLGVPFNIASYALLTHIIAHATDLNPGKLIHTMGDAHVYLDHVEALEEQLTREPTDFPELKIKREDRGSGVIDGWKEEEFEVIGYAPHKAIKMKMSV

SEQ ID NO: 17456 - DNA, 1566 bp, Cryptosporidium hominis
  CDS (1)..(1566)
atgagtgaaaagaacgtttcaattgttgtggcagcttctgttttgagcagtgggataggaattaacggacaattaccttggtctatatctgaggatttgaaatttttttcaaagataactaataataaatgtgactcgaataagaagaatgcactaattatgggaagaaaaacatgggattcaattggaagaagacctcttaaaaatagaataattgtcgttatttcctccagcttaccacaagatgaagccgatcctaatgttgttgtatttagaaaccttgaagactcaatagagaatcttatgaatgatgactcaattgagaatattttcgtctgtggtggtgaatccatatacagggatgctttaaaggataactttgtagatagaatatacttaacaagggtggcactagaagatatagaatttgacacttatttcccagaaatacctgagacattcttaccagtatatatgtctcagacattctgtactaagaatatctcttatgattttatgatttttgaaaaacaagaaaaaaaaactttacaaaattgtgaccctgccagaggtcaattaaagtccattgatgatacagttgatcttcttggtgaaatatttgggattagaaaaatgggaaatagacacaagtttccaaaagaagaaatctacaacactccaagtattcgattcggaagagaacattatgagtttcagtacctggaccttctttctagggtcttagagaatggagcttatagggaaaataggacaggcattagtacatattcaatatttggtcagatgatgagatttgatatgagagaatcttttccacttttgactacaaaaaaagttgcaatcagatccatttttgaggagttaatatggtttattaagggagatactaatggaaatcatttgattgagaaaaaagtttatatttggtcaggaaatggctcgaaagaatatttggaaagaattggtttagggcatagagaggagaatgatttgggcccgatctatggttttcagtggagacattacaatggagagtacaaaacgatgcatgacgattataccggagttggagttgatcagcttgcaaaacttattgagaccctaaagaataacccaaaggatagaaggcatatactaacagcctggaatccatctgccctatctcaaatggctcttccgccttgccatgtgctttctcagtattatgttaccaatgataattgtcttagttgcaacctttatcaaaggagttgtgacttgggattaggatctccatttaacattgcatcttatgctatacttaccatgatgcttgctcaagtttgtggttatgaaccaggtgagcttgctatttttattggagatgcccatatctatgaaaatcacctaacacaattaaaagaacaattaagccgcactccacgtccatttccacaactcaaattcaaaagaaaagttgaaaatattgaagactttaaatgggaagacatcgaattaatcggatattatccatatcccactattaaaatggacatggcggtataa

SEQ ID NO: 17457 - protein, 521 aa, Cryptosporidium hominis
MSEKNVSIVVAASVLSSGIGINGQLPWSISEDLKFFSKITNNKCDSNKKNALIMGRKTWDSIGRRPLKNRIIVVISSSLPQDEADPNVVVFRNLEDSIENLMNDDSIENIFVCGGESIYRDALKDNFVDRIYLTRVALEDIEFDTYFPEIPETFLPVYMSQTFCTKNISYDFMIFEKQEKKTLQNCDPARGQLKSIDDTVDLLGEIFGIRKMGNRHKFPKEEIYNTPSIRFGREHYEFQYLDLLSRVLENGAYRENRTGISTYSIFGQMMRFDMRESFPLLTTKKVAIRSIFEELIWFIKGDTNGNHLIEKKVYIWSGNGSKEYLERIGLGHREENDLGPIYGFQWRHYNGEYKTMHDDYTGVGVDQLAKLIETLKNNPKDRRHILTAWNPSALSQMALPPCHVLSQYYVTNDNCLSCNLYQRSCDLGLGSPFNIASYAILTMMLAQVCGYEPGELAIFIGDAHIYENHLTQLKEQLSRTPRPFPQLKFKRKVENIEDFKWEDIELIGYYPYPTIKMDMAV

SEQ ID NO: 17458 - DNA, 1758 bp, Plasmodium berghei
  CDS (1)..(1758)
atggaagacttatctgaaacattcgatatatatgcaatatgtgcatgttgtaaagttctgaacgatgatgaaaaggttagatgctttaataataaaacgtttaagggaattggaaatgcgggggtgttaccttggaaatgtaatttaatcgatatgaaatattttagttctgtaacatcatatataaatgaaaataattatataagattgaaatggaaaagagataaatatatggaaaaacataatttaaaaaataatgtagaactaaatactaatataatttcttcaactaataatttacaaaatattgtagtaatgggaaaaaaaagttgggaaagtattcccaaaaaatttaaacctttacaaaatcgaataaacattattttgtctagaactttgaaaaaagaagatattgtaaacgaaaataataatgaaaataataatgttattataattaaaagtgtagatgatttatttcctattttaaaatgcacaaaatattacaaatgttttattatagggggttcgtctgtttataaagaatttttagatcgtaatttaataaaaaaaatatattttacaagaataaataattcttataattgtgatgttttattcccagaaataaacgaaaatttgtttaaaataacttcaataagtgatgtatataatagtaacaacacaactttagattttataatttatagtaagacaaaagaaataaatccaaatgaggaagtacctaataatacatttttaggtgtatgtgatgaacaaaataaagcctttgatgatgaagacgattatacatatttcagtttcaataaaaataaagaaaatattaaaaaaaattctgaacatgctcataattttaaaatatataatagcataaaatataaaaatcatcatgaatatcaatatttaaatattatatatgatatgataatgcatggaaataaccaagatgatagaacaggtggtgtgttaagtaaatttggatatatgatgaaatttaatttaaatgaatattttccattattaacaacaaaaaaattatttataagaggtattatcgaagaattattgtggtttataagaggggaaacaaatggaaatactttgttagaaaaaaacgtaagaatatgggaagctaatggaacaagggaatttttagatagaaaattatttcatagagaagttaatgatctcggtccaatttatggatttcaatggaggcattttggtgctgaatatacagatatgcatgataattataaagacaaaggagttgatcaattaaaaaatattataaatttaattaaaaatgatcctacttgtagacgaattattttgtgtgcatggaatgtaaaagatttagatcaaatggcattacctccttgtcatattttatgtcaattttatgtttttgacggaaaattatcatgtattatgtatcaaagatcttgtgatttagggcttggggttccattcaatattgcttcctattctatatttacatatatgatagcacaagtatgtaacttacaggcagctgaatttatacatgtattgggtaatgctcatgtttataataatcatattgaaagcttaaagattcagttaaatagaactccttacccttttcctactcttaaattaaatcctgacattaaaaatatcgaggattttacaatttctgattttactgttcaaaattatgttcatcacgataaaataaatatggatatggcagcttaa

SEQ ID NO: 17459 - protein, 585 aa, Plasmodium berghei
MEDLSETFDIYAICACCKVLNDDEKVRCFNNKTFKGIGNAGVLPWKCNLIDMKYFSSVTSYINENNYIRLKWKRDKYMEKHNLKNNVELNTNIISSTNNLQNIVVMGKKSWESIPKKFKPLQNRINIILSRTLKKEDIVNENNNENNNVIIIKSVDDLFPILKCTKYYKCFIIGGSSVYKEFLDRNLIKKIYFTRINNSYNCDVLFPEINENLFKITSISDVYNSNNTTLDFIIYSKTKEINPNEEVPNNTFLGVCDEQNKAFDDEDDYTYFSFNKNKENIKKNSEHAHNFKIYNSIKYKNHHEYQYLNIIYDMIMHGNNQDDRTGGVLSKFGYMMKFNLNEYFPLLTTKKLFIRGIIEELLWFIRGETNGNTLLEKNVRIWEANGTREFLDRKLFHREVNDLGPIYGFQWRHFGAEYTDMHDNYKDKGVDQLKNIINLIKNDPTCRRIILCAWNVKDLDQMALPPCHILCQFYVFDGKLSCIMYQRSCDLGLGVPFNIASYSIFTYMIAQVCNLQAAEFIHVLGNAHVYNNHIESLKIQLNRTPYPFPTLKLNPDIKNIEDFTISDFTVQNYVHHDKINMDMAA

SEQ ID NO: 17460 - DNA, 840 bp, Enterobacteria phage T5
  CDS (1)..(840): transl_table=11
atgcaacaatacttaaaaattttgacagatgtaattttactaggtgaaccccgtaatgaccgtacaggaacgggcacagtttcaatttttgattcctatgctaagtttgacctacgtgaagggttcccggctgtaactactaaacgcctagcctggaaatcagtagtaggagaacttttatggttcttgtctggttccacaaatcttcatgatctacgtgtattcacatttggtcgtgacgaaggacagtggaccatctggactccaaattatgaagaccaagctataagtatggggtatgataagggtaatctaggaccagtatatggtaaacagtggcgtaactttggtgggcgagatcagattctagaacttattgaaggactcaagaataatcctcatggccgcagacatctagtttctgcatggaacgtagctgaacttgataaaatggcattacccccttgccactacggcttccagtgctatgtaagtaacgatggatacctagatcttaaatggacacaacgctctgtggattgtttcctcggtttacctttcaatattgctagctatgctttgctaacgcatatattagcaaaactgacaggattaaaacctcgttatcttatctttagtggcggtgatactcatatctataatgaccacatggaacaggtagaagaacaggtaaaacgcaagccacgccctctaccgactctagtaatgccagaatttgtagatctttacgacttactagaaaataatacggcagcttggtcattccatttagaggggtacgatcctcacccagctcttaaagctaagatgtcttcttaa

SEQ ID NO: 17461 - protein, 279 aa, Enterobacteria phage T5
MQQYLKILTDVILLGEPRNDRTGTGTVSIFDSYAKFDLREGFPAVTTKRLAWKSVVGELLWFLSGSTNLHDLRVFTFGRDEGQWTIWTPNYEDQAISMGYDKGNLGPVYGKQWRNFGGRDQILELIEGLKNNPHGRRHLVSAWNVAELDKMALPPCHYGFQCYVSNDGYLDLKWTQRSVDCFLGLPFNIASYALLTHILAKLTGLKPRYLIFSGGDTHIYNDHMEQVEEQVKRKPRPLPTLVMPEFVDLYDLLENNTAAWSFHLEGYDPHPALKAKMSS

SEQ ID NO: 17462 - DNA, 864 bp, Streptococcus pyogenes MGAS10394
  CDS (1)..(864): transl_table=11
atgcttacagaaaggttattagagatgacaaaagctgaccagatttttaaagctaatattcaaaaaattataaatgaaggatcattgagtgagcaagcacgtcctaaatataaagatggtcgaacagctcattctaagtatattactggggcgtttgctgaatatgatttagctaaaggagagtttcccatcacaactttacgacctattccaattaaatctgctataaaggaattattttggatatatcaagatcagtctaacagtttagatgtgctagaagctaaatataatgttcattattggaatgaatgggaagttgaccagacacgtactattgggcaacgttatggtgctgtagttaaaaaacatgatatcatctcaaaaatactaaagcaattagcagaaaatccttggaatcgtcgtaatgtcatttctctctgggactatgaagcatttgaggagacaaaagggttgttgccatgtgcctttcaaatcatgtttgatgttagacgtgtaggggaagatctttatttagatgctagtttgacgcaacgttctaatgacatattagttgctcatcacatcaatgccatgcaatacgttgccttgcagatgatgattgctaaacattttggatggaaaataggtaagttcttttattttgttaacaatttacatatttatgacaaccaatttgatcaggctcaagaattactaaaacgacagccagttgccagtcagcctaagcttgttttaaatgttccagatgggactaatttctttgatattaaaccagatgattttgaattacaaaattatgatccagtgaagcctcagttgcactttgaccttgctatttaa

SEQ ID NO: 17463 - protein, 287 aa, Streptococcus pyogenes MGAS10394
MLTERLLEMTKADQIFKANIQKIINEGSLSEQARPKYKDGRTAHSKYITGAFAEYDLAKGEFPITTLRPIPIKSAIKELFWIYQDQSNSLDVLEAKYNVHYWNEWEVDQTRTIGQRYGAVVKKHDIISKILKQLAENPWNRRNVISLWDYEAFEETKGLLPCAFQIMFDVRRVGEDLYLDASLTQRSNDILVAHHINAMQYVALQMMIAKHFGWKIGKFFYFVNNLHIYDNQFDQAQELLKRQPVASQPKLVLNVPDGTNFFDIKPDDFELQNYDPVKPQLHFDLAI

SEQ ID NO: 17464 - DNA, 861 bp, Lymphocystis disease virus - isolate China
  CDS (1)..(861)
atggctaatgaagaaggttatttaaatcaacttaagtatattttagcaaatggaagacttaaaattgatagaactggaacaggtactctttcagtatttggtttacagaatagatatgatttaagtacattccctttattcactacaaaaagaatgttttggcgtggaatagtagaagaacttttatggttccttaaaggatctacaaattctttaaatttatcaaaaaaatctgtacatatttgggatgcttatggatcaaaatctaatttaaatcgattaggatttaatcatcgtgaagaaggtgatttaggtcctatttatgggtttcaatggagacattttggagctaattatataaattgtcatactaattatgaaggtcagggtatagatcaattacaaataattataacaaaattaaaaacaaatccaaatgatagacgtattttaatgactgcttggaatccatctgatatagatcaggctgttttacctccatgtcatgtattgtgtcaattttatgctatagacaatattttatcttgtcaatgttatcaaagatcagcagatatgggattaggtgtaccttttaatgtagcttcttatgcattattaacatatttaattgctcaagctgttgatatgaaaccaggtgaatttattcatacgctaggagatgctcatatttatttagatcatataaaagctataaaagaacaattaactcgatcaataaaaccttcacctgttgtaatattaaaaaaaaagtctgataatttatgtgattttaaatttgaagattttgaattgttagattataatcctcatccagctatctcgttagatttatctatttaa

SEQ ID NO: 17465 - protein, 286 aa, Lymphocystis disease virus - isolate China
MANEEGYLNQLKYILANGRLKIDRTGTGTLSVFGLQNRYDLSTFPLFTTKRMFWRGIVEELLWFLKGSTNSLNLSKKSVHIWDAYGSKSNLNRLGFNHREEGDLGPIYGFQWRHFGANYINCHTNYEGQGIDQLQIIITKLKTNPNDRRILMTAWNPSDIDQAVLPPCHVLCQFYAIDNILSCQCYQRSADMGLGVPFNVASYALLTYLIAQAVDMKPGEFIHTLGDAHIYLDHIKAIKEQLTRSIKPSPVVILKKKSDNLCDFKFEDFELLDYNPHPAISLDLSI

SEQ ID NO: 17466 - DNA, 972 bp, Burkholderia mallei ATCC 23344
  CDS (1)..(972): transl_table=11
atgaaacagtatctcgatctcgttcgcaccattctcgataccggcacctggcagagcaaccgcacgggcattcgcacgatcggcatccccggcgcgatgctgcgcttcgatctgcagcagggctttcccgcagtgacgacgaaaaagctcgcgttcaagtccgcgatcggcgagctcgtcggctttctgcgcgcgacgcgcagcgcggccgatttccgcgcgctcggctgcaaggtatgggacgcgaatgcgaatgagaacgcgcagtggctcgcgaatccgtatcgccgcggcgtcgacgacctcggcgacgtgtacggcgtccaatggcggcgctggccgggctacaaggtgctcgacgcgcatgccgacgcgcagatcgccgatgcgacgtcgcgcggttttcgcgccgtcgcgcgcttcgacgaggacggcgcgcagaaggtgctgctacacaaggcgatcgaccagttgcgagactgcctcgacacgatcgtgcgcgacccgtcgagccggcgcatcctgttccacggctggaatcccgcggtgctcgacgagatcgcgctgcccgcgtgccatctgctgtatcaattcctgccgaatgtcgagcgtcgcgaaatctcgctgtgcctgtacatccgcagcaacgacgtcgggctcggcacgccgttcaatctcgccgaaggcgcggcgctcctcacgctcgttggccggctgacgggctatacgccgcgctggttcacgtacttcatcggcgatgcgcacatctacgagaatcagctcggcatgctcaagcagcagctcgaacgcgagccgttcgacagcccgcggctcgagatcgccgagcgcgtgcccgagtacgcgaaaacggggcagtacgagccacaatggcttgaacgcatcgagccgtcggatttcacgctcgtcggctatcgtcaccacgaaccgctgagcgcgccgatggccgtttga

SEQ ID NO: 17467 - protein, 323 aa, Burkholderia mallei ATCC 23344
MKQYLDLVRTILDTGTWQSNRTGIRTIGIPGAMLRFDLQQGFPAVTTKKLAFKSAIGELVGFLRATRSAADFRALGCKVWDANANENAQWLANPYRRGVDDLGDVYGVQWRRWPGYKVLDAHADAQIADATSRGFRAVARFDEDGAQKVLLHKAIDQLRDCLDTIVRDPSSRRILFHGWNPAVLDEIALPACHLLYQFLPNVERREISLCLYIRSNDVGLGTPFNLAEGAALLTLVGRLTGYTPRWFTYFIGDAHIYENQLGMLKQQLEREPFDSPRLEIAERVPEYAKTGQYEPQWLERIEPSDFTLVGYRHHEPLSAPMAV

SEQ ID NO: 17468 - DNA, 990 bp, Burkholderia pseudomallei K96243
  CDS (1)..(990): transl_table=11
atgctgcgctatccgggtctcagcgagctctacctcgcgacgctcagggacgtctgcggcgcgtacgaataccggagcgcgccgcgcgggcacgcggagcgcgaaatcatcggctacggcgcacggatcgacgatccgcgcgcgcgcttttgccggcatgcggcgcgcaagcagaacgtcgtcttcaactacgccgaggcgctatggtatctgtccgggcgcaacgatctcgaattcatcgcgcactacgcaccgtcgatggcgcgctacagtccggacggcaagcatctgcccggcaccggctacggcgcgcgcctgctgcattacggcgagcgcgggctcgaccagatcgagcgcgcgctcgacatcctgtcgcgcgacgacgccgagagcaagcgcgtcgtgctgcagatcttcagcgccgacgaggaactgtaccggcgcaacatcgacgtgtcgtgcacgctcggcctgcaactgctgctgcgcgaaggccggctgcacatggtcgcgttcatgcgcgcgaacgacgcgtacatcgggctgctgaacgacgtgttctcgttcacgttcctgcaggagtacctcgcgtcgcggctcggctgcgagctcggcacgtatgcgcatcaggtgggctcgatccacgtgtacgacgacaatctgccgcgcgtgcaggcgctgctcgacgacagcgatgcggcgatcgtcaccgccgccgcgccgccgcgcatgccggcgggcacgcgcgccgcgacgatcgcgcgcgtgctcgagcacgaaggccggattcgcgccgggcgcgtgtcgctcgccgcgcttcgcgacatcgatctcgatccgtactggcgcgacgtgctcggtctcttctggatctatcgcgagatcaaggcgggcaacccgccgcccgacgaggcgctcgcgttcgtcggcccgttccatcgcgcctatctgatgaaccggtgggacatggcgtccgcctcgctccaataa

SEQ ID NO: 17469 - protein, 329 aa, Burkholderia pseudomallei K96243
MLRYPGLSELYLATLRDVCGAYEYRSAPRGHAEREIIGYGARIDDPRARFCRHAARKQNVVFNYAEALWYLSGRNDLEFIAHYAPSMARYSPDGKHLPGTGYGARLLHYGERGLDQIERALDILSRDDAESKRVVLQIFSADEELYRRNIDVSCTLGLQLLLREGRLHMVAFMRANDAYIGLLNDVFSFTFLQEYLASRLGCELGTYAHQVGSIHVYDDNLPRVQALLDDSDAAIVTAAAPPRMPAGTRAATIARVLEHEGRIRAGRVSLAALRDIDLDPYWRDVLGLFWIYREIKAGNPPPDEALAFVGPFHRAYLMNRWDMASASLQ

SEQ ID NO: 17470 - DNA, 1692 bp, Acanthamoeba polyphaga mimivirus
  CDS (1)..(1692)
atgaaaaaattcaatattatagcggccataaataatgattctattattggagtcaaagagtatggaacattttcaatgccttggccttatctcaaagatgatatgaatcattttagaaaaattacaacagacactggatcaatcgaatctggtgtcaatgcgataatcgtgggatttaatacatggcaaaccttaccgtcttcttatagaaatattcgatcgagatttaacattgttatttctcgagatgacgaaactgatggtcaatttcataaatatgtaaagacatttgatgaagccattgaatttgcttcgtcactcactaatttaaatgaaatttttgtaataggaggaggtgttatatacgatttagccttaaaacataaactattggataaactttatttgacacatgttggatcaaattatccaattgatgacaatgttgaaaaagttgtgcattttccattgacatggtcaaaaatagaaaaaatgtgtgattcaaattttctagaattggattcagaaatttctaaacacgatattggaaaaaatatattgttgagatttcaagaatattctgtaaaaaaagaattatattgggccatcgaatatttgaaaaaaaataccagtctagataataaaggaattattggagataaaggggcaaccggaagtaaaggttatagtctagaacaacatgattattattcgaccgagtatttttggaacttttatgaattcattactaggaaagtttttgacttatttaattcgtccaatgaaatttcaattcccagtgaggaatgtccagaaaatcaatatattgaactggtaaaaacaattatggagaaaggtattgttaaacaaacaagaaactcaatcaccaaatctatttttggatatcaactcaaatacgacttatcaaagggatatccaattcaaacaataaaacgatcttatcccaaggccatattcgaggaattaatgtggatgattcgaggacaaactgatgtttcaattctccagaaaaaaggagtgcatgtttgggataaaaattcatcaaaagattttttgtcaaaatataatcttccatatgaagaaggagatattggtccaggatacggttttcaaatgagatattggggagctgagtacactgattgtaaaacatcttaccaaggacaaggtattgatcaattaaacaaatgtattgaatctattcaaaataatcctcacgacagaagaatcatgataaatctttggaattgttctgatttagataaaatggcacttgcaccatgtcatttttgctatatgtttggagtagatctttatgaggttccaactacatctggaaaaaagggtagattgaattgtcatttagttcaaaggagttgggatgttctacttggttggaatactacaacagctgctctattgacttatttaattgctaatcattgtgatcttgatcctggtattttggtacacagtatttctgatgctcacatatatcagtcacatattgattctggtgctattagtcaattgctccaaagaaagtgtagaaaatttcccaatttagtaattcgtaataaaaaagaaaaaatcgatgattatgaattcgatgacttaatcatagaaaattattatccttgtccttctatttctgcagaaatgattgcttaa

SEQ ID NO: 17471 - protein, 563 aa, Acanthamoeba polyphaga mimivirus
MKKFNIIAAINNDSIIGVKEYGTFSMPWPYLKDDMNHFRKITTDTGSIESGVNAIIVGFNTWQTLPSSYRNIRSRFNIVISRDDETDGQFHKYVKTFDEAIEFASSLTNLNEIFVIGGGVIYDLALKHKLLDKLYLTHVGSNYPIDDNVEKVVHFPLTWSKIEKMCDSNFLELDSEISKHDIGKNILLRFQEYSVKKELYWAIEYLKKNTSLDNKGIIGDKGATGSKGYSLEQHDYYSTEYFWNFYEFITRKVFDLFNSSNEISIPSEECPENQYIELVKTIMEKGIVKQTRNSITKSIFGYQLKYDLSKGYPIQTIKRSYPKAIFEELMWMIRGQTDVSILQKKGVHVWDKNSSKDFLSKYNLPYEEGDIGPGYGFQMRYWGAEYTDCKTSYQGQGIDQLNKCIESIQNNPHDRRIMINLWNCSDLDKMALAPCHFCYMFGVDLYEVPTTSGKKGRLNCHLVQRSWDVLLGWNTTTAALLTYLIANHCDLDPGILVHSISDAHIYQSHIDSGAISQLLQRKCRKFPNLVIRNKKEKIDDYEFDDLIIENYYPCPSISAEMIA

SEQ ID NO: 17472 - DNA, 858 bp, Vibrio fischeri ES114
  CDS (1)..(858): transl_table=11
atgaccgtgaagcagtatttagatttatgccaacgcattgtagatgaaggaacttggatcgaaaacgagcgcacaggaaagcgttgtttaacggtgattaatgcggatttaacttatgatgtagaaaatggtgttttccctcttgtgacaacgcgtaaaagcttttggaaagcggcagtagctgaaatgattggttatattcgtggttacgatagcgcagaagacttccgtaaaattggaacaaaaacatgggatgcgaatgctaaccttaacgatgcatggctaaacaaccctcatcgtaaaggtgatgatgacatgggccgagtatatggtgtgcaaggtcgttcatgggcaaaaccaaatggtgagtttgtcgatcaactgaaaaaaatcattgatgatttaagtcagggaattgatgatcgtggtgagattttaaatttttataacccaggtgagtttgatatgggatgtttgcgtccgtgtatgtactcacaccatttttcattacttggtgatacgttatatttaaacagtacgcaacgttcatgtgatgttccgctagggcttaatttcaatatggttcaagtgtatttcttattagcgatagtggcacaaattacagggcataaagcaggtaaggcgtaccataagattgtaaatgcacatatttatgaagaccaacttgaactaatgcaaagtgtgcagctaaagcgtgaaccgttacaagccccaatctttaaaataaaccctgaaattaagtcactagaagatttagaaacatgggtaactatggatgactttgaagtgattggctatgaaagccacgaagcaattaagtatcctttttctgtttaa

SEQ ID NO: 17473 - protein, 285 aa, Vibrio fischeri ES114
MTVKQYLDLCQRIVDEGTWIENERTGKRCLTVINADLTYDVENGVFPLVTTRKSFWKAAVAEMIGYIRGYDSAEDFRKIGTKTWDANANLNDAWLNNPHRKGDDDMGRVYGVQGRSWAKPNGEFVDQLKKIIDDLSQGIDDRGEILNFYNPGEFDMGCLRPCMYSHHFSLLGDTLYLNSTQRSCDVPLGLNFNMVQVYFLLAIVAQITGHKAGKAYHKIVNAHIYEDQLELMQSVQLKREPLQAPIFKINPEIKSLEDLETWVTMDDFEVIGYESHEAIKYPFSV

SEQ ID NO: 17474 - DNA, 795 bp, Neisseria gonorrhoeae FA 1090
  CDS (1)..(795): transl_table=11
atgaaggcctatttggacttgatgcgccacgtcctcgacaacggtacggacaaatcagaccgcaccggtacgggtacgcgctccgtattcggttatcagatgcgttttgacttgggcaaaggttttccgctgctgacgaccaaaaagctgcatttgcgctcgataatccacgagctgctttggttcctcaaaggcgataccaatatcaaatacctgaaggataacaatgtttccatttgggacgagtgggcggacgaaaacggcgacttgggcccggtttacggctaccaatggcgcagctggcccgcgcccgacggcaggcatatcgaccaaatcgccaatgtggtggaacaaattaagaaaaaccccgactcgcgccgcctgattgtgtcggcgtggaatccggctttggtcgatgagatggccttgccgccctgccacgcgctgtttcagttttacgttgccgacggcaaactgtcctgccagctttaccagcgtagtgcagatattttccttggtgtgccgtttaatattgccagctacgcgctgttgacgatgatgatggcgcaagtgtgcgggctggaggcgggcgagtttgtccatacgtttggcgacgcgcatttgtaccgtaaccatttcgaacaggccgcattgcagttggaacgcgaaccgcgcgccttgcctgtgatgaaaatcaatcctgaagtcaaggatttgtttgccttcaagtttgaagatttcgagttggaaggctacgatccgcatccgcacatcaaggcggtagtgtcggtttag

SEQ ID NO: 17475 - protein, 264 aa, Neisseria gonorrhoeae FA 1090
MKAYLDLMRHVLDNGTDKSDRTGTGTRSVFGYQMRFDLGKGFPLLTTKKLHLRSIIHELLWFLKGDTNIKYLKDNNVSIWDEWADENGDLGPVYGYQWRSWPAPDGRHIDQIANVVEQIKKNPDSRRLIVSAWNPALVDEMALPPCHALFQFYVADGKLSCQLYQRSADIFLGVPFNIASYALLTMMMAQVCGLEAGEFVHTFGDAHLYRNHFEQAALQLEREPRALPVMKINPEVKDLFAFKFEDFELEGYDPHPHIKAVVSV

SEQ ID NO: 17476 - DNA, 795 bp, Bacteroides fragilis NCTC 9343
  CDS (1)..(795): transl_table=11
atgaaacaatatttagacctgctcgaccgagtgttgacggagggaatagaaaaaggtgaccgtaccggaacgggaaccatcagtgtcttcggacaccagatgcgtttcaacctggacgagggattcccttgcctgactaccaagaaacttcatctgaaatcaatcatttacgaactactgtggttcctcaaaggagacacgaatgtgaaatatttgcaggaccacggcgtacgcatctggaacgaatgggcggacgaaacaggcgatctgggacatatatatggataccagtggcgttcgtggccaacctacgacggaggatttatcgaccagatcagcgaagctgtagatgccatcaagcacaatcccgattcacgccgcatcattgtcagtgcatggaatgtaggagacctggatcacatgaacctccctccttgccacgcattcttccagttttacgtagcaaacggacggctgagcctgcaactctatcaacgcagcgccgatatcttcctgggggtacctttcaatatagcatcttatgcattgctgctgcagatgatggcgcaagtcaccggtctgcaggcaggagactttatccacacactgggcgacgcacatatctacctgaaccacctggaacaggtgaaactccagctcagccgggaaccgcgcccactaccacaaatgaagatcaatccggacgtgaaaaacatcttcgacttccaattcgaggactttgaattagtaaattatgatccgcacccgcacatcgctggaaaagttgcggtataa

SEQ ID NO: 17477 - protein, 264 aa, Bacteroides fragilis NCTC 9343
MKQYLDLLDRVLTEGIEKGDRTGTGTISVFGHQMRFNLDEGFPCLTTKKLHLKSIIYELLWFLKGDTNVKYLQDHGVRIWNEWADETGDLGHIYGYQWRSWPTYDGGFIDQISEAVDAIKHNPDSRRIIVSAWNVGDLDHMNLPPCHAFFQFYVANGRLSLQLYQRSADIFLGVPFNIASYALLLQMMAQVTGLQAGDFIHTLGDAHIYLNHLEQVKLQLSREPRPLPQMKINPDVKNIFDFQFEDFELVNYDPHPHIAGKVAV

SEQ ID NO: 17478 - DNA, 972 bp, Pseudomonas syringae pv. syringae B728a
  CDS (1)..(972)
atgaagcaatatctggaactggtcgctcatgtgatcaagcacgggaccttgcaagccaaccgtaccggcgtgaacaccatcagctttccgggggcgatgctgcgttatgacttgcaggaaggttttccggcgatcaccacacggcgcatggccttcaaatcggccatcggcgagatggtcggctttctgcgtggcgtaaacaacgccgccgaattccgcgaactgggctgcaaggtctgggatcagaacgccaacgaaaacgctcagtggctgaacaacccgttccgcaagggcgaggacgatctgggcgaaatctacggcgtgcaatggcgcaagtggcctgcctacaagcgtatcgatgccggcaatgtcgcggccatcgaactggcgctgggccaggggtatcgtcagattgccgagtccgaagaagacggccagtcgttcgtggtcctgtacaaggccatcgaccagattcgccagtgcgtcgacaccatcatcaacgacccgggcagccggcggatcctgttccacggctggaactgcgcacagctcgatgaaatggccctgccgccgtgccacctgctgtaccagctgcacccgaacccgcagacccgcgaaatctcgctgacgctgtacatccgctccaacgatctgggcctcggtacgccgttcaacctgacagaaggcgccgcgctgctaagcctcatcggccgtctgaccggctacacgccgcgctggttcacctacttcatcggcgatgcccacgtgtacgaaaaccacctggacatgctcaacgaacagatgacccgcgagccgtacccgatgcccaaactggtgatctccgatcgtgtgcccgagtttgccaagaccggtgtgtaccagcctgaatggctggggctgatcgagccgtccgacttcaccctggaaggctaccagcaccacccggcaatgacggcaccgatggcggtttga

SEQ ID NO: 17479 - protein, 323 aa, Pseudomonas syringae pv. syringae B728a
MKQYLELVAHVIKHGTLQANRTGVNTISFPGAMLRYDLQEGFPAITTRRMAFKSAIGEMVGFLRGVNNAAEFRELGCKVWDQNANENAQWLNNPFRKGEDDLGEIYGVQWRKWPAYKRIDAGNVAAIELALGQGYRQIAESEEDGQSFVVLYKAIDQIRQCVDTIINDPGSRRILFHGWNCAQLDEMALPPCHLLYQLHPNPQTREISLTLYIRSNDLGLGTPFNLTEGAALLSLIGRLTGYTPRWFTYFIGDAHVYENHLDMLNEQMTREPYPMPKLVISDRVPEFAKTGVYQPEWLGLIEPSDFTLEGYQHHPAMTAPMAV

SEQ ID NO: 17480 - DNA, 1002 bp, Macaca fuscata rhadinovirus
  CDS (1)..(1002)
atgattgtcctggtgcatctcggtatctgctacgttaaaaaaattatacccgcttgcttgtctggaatagcggccgtgcgttgtcgcgtttctcgcggatccgaggttgccgcggcgcgtgccccggacggccgcggcgagcacggcgagctgcagtacctggcgcacctggatttaatcatcagacacggcgttcagagggatgacaggacgggcgtgggaaccaggtccgtgtttgggcttcaggcccgatataaccttagggacgagtttcccctgttgaccaccaaaagggtgttctggaggggcgtcgtggaggagttgttgtggtttatcagaggctccaccgactccaccgaactgtcgcgccgcggcgtaaaaatttgggacgcgcacgggtcccgcgccttcttggcggcgcagggctttggggaccgccgcgagggcgacctggggccggtgtacgggttccagtggaggcactttggggcggagtacaggggggccgatgcagactacgaaggtcaaggggtggaccagctgcgctacgtggtggacctgatcgtcagacggccccacgatcggcgaattgtcatgtgcgcgtggaaccccgcggaccttgcgaggatggccctcccgccgtgtcacgttttgtgtcagttttacgtggctcggggggagctgtcatgccagctgtaccagaggtccgccgacatgggcctcggggtcccgtttaacattgccagctacgccctcctgacgtatctaatagcgcacgtcacgggcctgaccccgggagactttgtacacaccctgggggatgcccacgtttacaacaaccacgttgggcccctgctgcttcagctggggaggaccccgcgtcctttcccgcggttgaagattctgagaaaggtgacgcgtctggaggactttacgcgtgcggacctgagtctcgagggttacgacccccacccccacatagagatggagatggccgtttga

SEQ ID NO: 17481 - protein, 333 aa, Macaca fuscata rhadinovirus
MIVLVHLGICYVKKIIPACLSGIAAVRCRVSRGSEVAAARAPDGRGEHGELQYLAHLDLIIRHGVQRDDRTGVGTRSVFGLQARYNLRDEFPLLTTKRVFWRGVVEELLWFIRGSTDSTELSRRGVKIWDAHGSRAFLAAQGFGDRREGDLGPVYGFQWRHFGAEYRGADADYEGQGVDQLRYVVDLIVRRPHDRRIVMCAWNPADLARMALPPCHVLCQFYVARGELSCQLYQRSADMGLGVPFNIASYALLTYLIAHVTGLTPGDFVHTLGDAHVYNNHVGPLLLQLGRTPRPFPRLKILRKVTRLEDFTRADLSLEGYDPHPHIEMEMAV

SEQ ID NO: 17482 - DNA, 858 bp, Enterobacteria phage RB43
  CDS (1)..(858): transl_table=11
atgaaacagtatcttgatattatcaggttggttctggcaaatggtgttgaatcaaccgaccgcactggtgtaggtactatccgtatctttggtgcgcaaacccgctggaacctcgcagaaggtttcccagcaacgaccagcaaacagctattcttcaaaccgtgtaagcatgaattgcaatggttcctgtccggttctactaacgttgatgaactacgtgaaatgacctggggaataggaagcgataaacgcactatttgggacgataactacgaaaatcaggctaaatcgctgggatactctcatggttatctggggccaatctacggtcatcaatggcgttcgttcggtggtgatttgtatggaaatcacagcgttgaccagattgctcggatcgtcaacgaactgaaaaccacaccagacgatcgcgggatcatcgtttccgcatggaaccctgttgatctggataaaatggcattgcgtccgtgtcactgtttcttccagttcgtcgtaatcaacggtaaactgtctctacagtggtatcagcgttcggttgatgtcttcttagggttgccgttcaatatcgcctcctacgctctcctgacgcatattatcgctgatatttgcgggtacgaagtaggtgatctggtttggacaggtggtgatgtccatatctacaaaaacgcaatcgagcaagcgaaagaactattgaagccggaacgtgaaccgttaccgcttccgaccctctacatgccgaaggtaaatagcttacttgatttggatcaagaattctttgactccatccatttgaaagattataatcatcacggctcgctaaaagcagctatggcagtataa

SEQ ID NO: 17483 - protein, 285 aa, Enterobacteria phage RB43
MKQYLDIIRLVLANGVESTDRTGVGTIRIFGAQTRWNLAEGFPATTSKQLFFKPCKHELQWFLSGSTNVDELREMTWGIGSDKRTIWDDNYENQAKSLGYSHGYLGPIYGHQWRSFGGDLYGNHSVDQIARIVNELKTTPDDRGIIVSAWNPVDLDKMALRPCHCFFQFVVINGKLSLQWYQRSVDVFLGLPFNIASYALLTHIIADICGYEVGDLVWTGGDVHIYKNAIEQAKELLKPEREPLPLPTLYMPKVNSLLDLDQEFFDSIHLKDYNHHGSLKAAMAV

SEQ ID NO: 17484 - DNA, 852 bp, Haemophilus influenzae 86-028NP
  CDS (1)..(852): transl_table=11
atgaagcaatatcttgatctttgtcgccgcattgttagtgaaggggagtgggttgctaatgaacgtacaggtaagcattgcctcacggtcattaatgcagatttagaatatgatgtggcgaataatcaatttccgctgattactacccgtaaaagttattggaaagcggccattgctgaatttctaggttatattcgtggatatgacaatgccgctgatttccgcgcacttggcacgaaaacttgggatgctaatgcgaatgtaaatgcagcttggcttgcaaatccgcatcgtagaggcgttgatgatatggggcgcgtatatggtgtgcaaggcagagcatggcgtaagcctaatggagaaaccatagatcagctacgtaaaattgttaataacttaacgaaaggtattgatgatagaggagagattttaactttttttaaccctggggaatttgatcttggttgtcttcgtccttgtatgcacacgcatactttttctcttgtgggcgatactttacatcttactagttatcaacgttcctgtgatgttccgcttggattgaatttcaatcaaattcaggtgtttaccttcttagcgcttatggctcagatcacgggcaaaaaagccggcaaggcatatcataaaattgtgaatgcgcatatttatgaagatcagcttgagttaatgcgtgacgtacaacttaaacgcgagcctttcccattgccaaaattagaaatcaatccagatataaaaacgcttgaagatttagaaacttgggtcacgatggatgattttaaagtcgttggctatcaatctcatgagccaattaaatatcctttttccgtctaa

SEQ ID NO: 17485 - protein, 283 aa, Haemophilus influenzae 86-028NP
MKQYLDLCRRIVSEGEWVANERTGKHCLTVINADLEYDVANNQFPLITTRKSYWKAAIAEFLGYIRGYDNAADFRALGTKTWDANANVNAAWLANPHRRGVDDMGRVYGVQGRAWRKPNGETIDQLRKIVNNLTKGIDDRGEILTFFNPGEFDLGCLRPCMHTHTFSLVGDTLHLTSYQRSCDVPLGLNFNQIQVFTFLALMAQITGKKAGKAYHKIVNAHIYEDQLELMRDVQLKREPFPLPKLEINPDIKTLEDLETWVTMDDFKVVGYQSHEPIKYPFSV

SEQ ID NO: 17486 - DNA, 822 bp, Corynebacterium jeikeium K411
  CDS (1)..(822): transl_table=11
gtggcaccccagcagcagccgagttccatccccaccccatacgaggatcttctgcgggagatcctcgagaccggcacccccaagggcgatcgcaccggcacgggtaccaccagcctgtttggccgccagatccgctacgacctctccgcaggtttcccgctgatcactaccaagtcggtacatgtgaagtccgtggtgggtgaactgctgtggttcctccgcggagattccaacgtgcgctggctacaggagaacggtattcgcatctggaacgagtgggctgacgagaacggtgatctaggcccggtatacggcgtgcagtggcgcagctggccgactccaaacggccagcacatcgaccagatcgccggcgcgttggaaactctgcaaactaacccggattcgcgtcgcaatatcgtcagcgcctggaacgtctcggagctggacaacatggcccttccaccatgccacctgctgttccagctgtacgtggccaacggcaagctgagttgccagctgtaccagcgcagcgcggacatgttcctgggcgtgccgttcaacatcgccagctactcgctgctgacccacatgttcgcccagcaggcgggcctggaggtcggcgagttcatctggaccggcggtgattgccacatctacgacaatcacgtggagcaggttaagctgcagctttcccgcgatgcccgcccgtatccgcagctgaagctgaacaaggctgcggacatgttttcttacgacttttccgatatcgagttcaccggctacgacccgcatccggtgattaaggcaaaggtggccgtgtaa

SEQ ID NO: 17487 - protein, 273 aa, Corynebacterium jeikeium K411
MAPQQQPSSIPTPYEDLLREILETGTPKGDRTGTGTTSLFGRQIRYDLSAGFPLITTKSVHVKSVVGELLWFLRGDSNVRWLQENGIRIWNEWADENGDLGPVYGVQWRSWPTPNGQHIDQIAGALETLQTNPDSRRNIVSAWNVSELDNMALPPCHLLFQLYVANGKLSCQLYQRSADMFLGVPFNIASYSLLTHMFAQQAGLEVGEFIWTGGDCHIYDNHVEQVKLQLSRDARPYPQLKLNKAADMFSYDFSDIEFTGYDPHPVIKAKVAV

SEQ ID NO: 17488 - DNA, 897 bp, Rhodobacter sphaeroides 2.4.1
  CDS (1)..(897)
atggcacatccggaacagcagtatctcgaccttctggcccagacgctggagcggggcgaccggcgggttgaccggaccggggtggggacgctctcgctgttcggggcgatgctgcggttcgacctgtccggtggacaggtgccgatcctgaccaccaaacgcgtctactggaagacggcggtgaaggagatgctctggttcctcaccgggggcaccaacatccggccgctcctgcaggagaatgtgcggatctggagcgactggccgctggccgcctaccggcgggagagcggcgaggagatctctcaggccgcgttcgagcagcgcgtcctcgaggatgaggctttcgccgcgcgctggggcgagctcgggcccgtctatggcaagcaatggcggcgctggctcgggcccgacgggcacgagcacgaccagatcgcggccctgatcgagacactgcggaccaatccgtcgagccggcggatgctgtttcatgcgtggaacgtggcggaggtggggcagatggcgctgccgccctgccacatggtctatcagtatcatgtgacttcggacgggcggctgaatgcgcttctctaccagcggtcggtcgaccttctgctcggggcgccgttcaatttcgtgggggccgcggctctgcaactcatgatcgcgcagcaggccgggctcgtgccgggcgatctggtctgggtggggggcgacacgcatctctacctcaaccatctcgatcaggcgcgcgagcagacgggccgggcgccgcgggactggccccggatgcgtctcctgcggcgggcggacagcatcgacgattaccgcatcgaggatttcgcggtggagggctacgacccccatccggcgatcgcggcggaggtggcggtctga

SEQ ID NO: 17489 - protein, 298 aa, Rhodobacter sphaeroides 2.4.1
MAHPEQQYLDLLAQTLERGDRRVDRTGVGTLSLFGAMLRFDLSGGQVPILTTKRVYWKTAVKEMLWFLTGGTNIRPLLQENVRIWSDWPLAAYRRESGEEISQAAFEQRVLEDEAFAARWGELGPVYGKQWRRWLGPDGHEHDQIAALIETLRTNPSSRRMLFHAWNVAEVGQMALPPCHMVYQYHVTSDGRLNALLYQRSVDLLLGAPFNFVGAAALQLMIAQQAGLVPGDLVWVGGDTHLYLNHLDQAREQTGRAPRDWPRMRLLRRADSIDDYRIEDFAVEGYDPHPAIAAEVAV

SEQ ID NO: 17490 - DNA, 957 bp, Lactobacillus gasseri
  CDS (1)..(957)
atggcaactttagagcaaccatacttggatttactaaataaaattatgattgaaggtcatgataaggaagatagaactggcacggggacaagaagtatatttggagctcaaatgcggtttaatctgagtgagggttttcctattttaactactaaacgagttccttttggtcttattaaaagtgaattgttgtggtttttaagaggagatactaatattcggtttctattagaacacaataatcatatttgggatgaatgggcgttcaaaaactgggttgaaagtgatgaatatcatggccctgatatgactaattttggactcagaagtcaagaagacgccaaatttaagcaagtctatcaagaagagatgaagaaatttgatgagcgaatcttagctgaccgggatttcgcagtcaaatttggtaatcttggagatgtttatggcgctcaatggcgtcactggcaaaagcgagagggtggttttattgatcaaattcaaaatgtgattgatcaaattaaaaagacgccatattcaagaagattgattgttagtgcctggaatccagaagatgtaccaaattcagcactcccaccttgtcatgttttatttcaattttatgttaatgatggtcgtttaagcgttcagctttatcagcgatcaggagatatgtttttaggagttccctttaatattgcgagctattctttactagttaatttaattgctcaagaaactggtcttaaaccaggtgaatttattcatactttaggggatgcgcatatttatcgaaaccattttgatcaagtaaaagaattattgactagaaaaccatatgactcgccaaagctttggctaaatcctgataagaaaaagattgaagactttgaaatgtcagatattaaactcgttgactataagcatcatggtactattaaagctcccgtagctgtttag

SEQ ID NO: 17491 - protein, 318 aa, Lactobacillus gasseri
MATLEQPYLDLLNKIMIEGHDKEDRTGTGTRSIFGAQMRFNLSEGFPILTTKRVPFGLIKSELLWFLRGDTNIRFLLEHNNHIWDEWAFKNWVESDEYHGPDMTNFGLRSQEDAKFKQVYQEEMKKFDERILADRDFAVKFGNLGDVYGAQWRHWQKREGGFIDQIQNVIDQIKKTPYSRRLIVSAWNPEDVPNSALPPCHVLFQFYVNDGRLSVQLYQRSGDMFLGVPFNIASYSLLVNLIAQETGLKPGEFIHTLGDAHIYRNHFDQVKELLTRKPYDSPKLWLNPDKKKIEDFEMSDIKLVDYKHHGTIKAPVAV

SEQ ID NO: 17492 - DNA, 795 bp, Magnetospirillum magnetotacticum MS-1
  CDS (1)..(795)
atgcagcaatatctcgacctgttgcgccgcatccgcgccgagggcgtgaccaagaccgaccgcaccggcaccggcaccaccagcgtgttcggccaccagatgcgcttcgacctgtcggcgggctttcccctggtgaccaccaagaagctccacacccgctccatcttcgtcgagcttttgtggttcctgcggggcgataccaatatccgttatctcaaggacaacaaggtctccatctgggacgaatgggccgatgccgacggcgatctggggccggtctacggcaagcagtggcggtcctgggcctgccccgacgggcgcaccgtcgatcagatcacccaggtggtggagatgatcaagaagagcccggattcgcgccgcctgatcgtctcggcctggaacccggccgatatcgagtccatggcgctcccgccctgccactgcctgtttcagttctatgtggccgagggccgcctgtcctgccagctttaccagcgctcggcagacgtcttcctgggcgtgcccttcaacatcgcctcctatgccctgctgacccatatgatggcccaggtgacggggctggaggtcggcgacttcgtccatacgttcggcgacgcccatctgtactccaaccacatggagcaggcggagctgcagttgtcgcgcgcgcccttggccctgccccggctggagctgaacccggatgtgaaggacctgttcgccttcaccatggacgacatcaaggtggtggactaccagtgccacgcccatatctccgccccggtggcggtatga

SEQ ID NO: 17493 - protein, 264 aa, Magnetospirillum magnetotacticum MS-1
MQQYLDLLRRIRAEGVTKTDRTGTGTTSVFGHQMRFDLSAGFPLVTTKKLHTRSIFVELLWFLRGDTNIRYLKDNKVSIWDEWADADGDLGPVYGKQWRSWACPDGRTVDQITQVVEMIKKSPDSRRLIVSAWNPADIESMALPPCHCLFQFYVAEGRLSCQLYQRSADVFLGVPFNIASYALLTHMMAQVTGLEVGDFVHTFGDAHLYSNHMEQAELQLSRAPLALPRLELNPDVKDLFAFTMDDIKVVDYQCHAHISAPVAV

SEQ ID NO: 17494 - DNA, 969 bp, Leuconostoc mesenteroides subsp. mesenteroides ATCC 8293
  CDS (1)..(969)
atgtctcaaaatgaacaacaatatctcgacctcgcacaaaagattcttgatgaaggatcacataaaggagaccgcactggtactggaacacgttcattgttcggtacacaaatgcgatttaacctggctgaaggattcccccttttaactaccaaaaaggttttctttggtttgattaaaagtgaacttttatggttcttaagaggagataataatatccgattcttacttgaacacaataatcatatctgggatgaatgggcgtttaaaaagtggattgaatctgataaatataccggtcccgatatgactaattttggtcttcgttcacaaactgatgaaaattttgccaaaatatacaaagaacaaaaagacattttcgttaacaacattctcaatgatgacgaattcaaggaagaatttggttatattggaaatgtttatggaaaattgtggcgcagctgggaaacaaatagtctgaccgccggtgatgaaaccgttgatcaggtcgccagacttattgatcaaattaaggaaacaccgaattcacgtcgcctcattttaacagcttggaatgctgagaccacaccgcaagcgcccttaccttcttgtcacgtacttagtcagttttatgttgcggacggtaaactcagtttgcaaatgtatcaacgctctggtgactttttccttggtgttccattcaatattgccagctattcactgttgctacacatggtggcagctcaaactggctacgaagttggtgaatttattcataccattggtgacacgcatatctacaataatcatgttgatcaaataactgaacaattgtcacggcctatgcacaaattaccaaaactatggctaaatccggaagttaaatcattgtttgattatacgatggatgacatcaaaatattagattacgatagtgaaccggccattaaagcgcccgtagctgtctaa

SEQ ID NO: 17495 - protein, 322 aa, Leuconostoc mesenteroides subsp. mesenteroides ATCC 8293
MSQNEQQYLDLAQKILDEGSHKGDRTGTGTRSLFGTQMRFNLAEGFPLLTTKKVFFGLIKSELLWFLRGDNNIRFLLEHNNHIWDEWAFKKWIESDKYTGPDMTNFGLRSQTDENFAKIYKEQKDIFVNNILNDDEFKEEFGYIGNVYGKLWRSWETNSLTAGDETVDQVARLIDQIKETPNSRRLILTAWNAETTPQAPLPSCHVLSQFYVADGKLSLQMYQRSGDFFLGVPFNIASYSLLLHMVAAQTGYEVGEFIHTIGDTHIYNNHVDQITEQLSRPMHKLPKLWLNPEVKSLFDYTMDDIKILDYDSEPAIKAPVAV

SEQ ID NO: 17496 - DNA, 852 bp, Haemophilus somnus 129PT
  CDS (1)..(852)
atgcgtcaatatttaaatttatgtcaacgtattattgatcaaggtcattgggtcgaaaacgaacgcacgggaaaacgttgcttaacggttattaacgccgatctcacctatgatgttgcaaacaaccaatttcctttaattacgactagaaaaagttactggaaagcggctatcgctgaatttttaggctatattcgaggctatgacaatgctgctgattttcgtaaattaggcactaaaacatgggacgcaaatgccaatgaaaatcaagcatggctcaataatccggtacgtaaaggtacagacgatatggggagagtatatggtgtacaaggtcgtcgttggcggaaaccgaacggagaaactgtcgatcagctacgtaaaatcgtcaataacctgagcaaaggaattgatgatcgaggagagattttaacctttttcaatcccggtgaaattgatctgggttgcttacgcccttgcatgcacactcacacattttctttactgggcgatacactttatttaaccagttatcaacgttcatgtgatgttccgctgggactcaatttcaatcaaattcaagtgtttacattcttagcattaatggcacaaattaccggcaaaaaagcgggacaagcctatcataaaattatcaatgcacatatttacgaagatcagtttgaattaatgcgtgatgtacagcttaaaagagagccgtttccgcttcctcgattagaaattaatcctgatattaaaaccttggaagatttagaaacttgggtaacaatggacgacttcaaagtgattggctatcaatgccatgaggcgattaaataccccttctcagtttaa

SEQ ID NO: 17497 - protein, 283 aa, Haemophilus somnus 129PT
MRQYLNLCQRIIDQGHWVENERTGKRCLTVINADLTYDVANNQFPLITTRKSYWKAAIAEFLGYIRGYDNAADFRKLGTKTWDANANENQAWLNNPVRKGTDDMGRVYGVQGRRWRKPNGETVDQLRKIVNNLSKGIDDRGEILTFFNPGEIDLGCLRPCMHTHTFSLLGDTLYLTSYQRSCDVPLGLNFNQIQVFTFLALMAQITGKKAGQAYHKIINAHIYEDQFELMRDVQLKREPFPLPRLEINPDIKTLEDLETWVTMDDFKVIGYQCHEAIKYPFSV

SEQ ID NO: 17498 - DNA, 828 bp, Fusobacterium nucleatum subsp. vincentii ATCC 49256
  CDS (1)..(828): transl_table=11
atgggagctaaatttgataaaatatataaaaatatagttgatacaatagcagaaaaaggaatttggagtgaagggaatgtcagaacaaagtatgcagatggtacagctgcacattataaaagttatataggttatcaatttagacttgacaactcagatgatgaagcacacctaataacttcaagatttgcaccaagtaaagcaccaataagagaactatattggatatggatattacaatcaaataatgtagatgttttagataaattaggttgtaaattttgggatgagtggaaaatgcaagatggaactattggaaaggcttatggttatcaaatagccaaagaaacttttggacaaaaatctcaacttcattatgttataaatgagcttaaaaataatcctaatagcagaaggattatgacagaaatttggatacctaatgaactttctgaaatggcattgacaccttgtgtacatttaactcaatggtcagtaattgggaataaattatatttagaagttagacaaagaagttgtgatgtggcattaggtttagttgctaatgtttttcaatattcagttttacataaattagtagcacttgaatgtggacttgaaccagcagaaataatctggaatattcataatatgcacatctatgatagacattatgataaattaatagagcaagtcaatagaaaaacatttgagcctgcaaaaataaaaataaataattttaaatcaatatttgattttaaacctgatgatatagaaataattgattataagtatggagaaaaagttagctatgaggtggctatttaa

SEQ ID NO: 17499 - protein, 275 aa, Fusobacterium nucleatum subsp. vincentii ATCC 49256
MGAKFDKIYKNIVDTIAEKGIWSEGNVRTKYADGTAAHYKSYIGYQFRLDNSDDEAHLITSRFAPSKAPIRELYWIWILQSNNVDVLDKLGCKFWDEWKMQDGTIGKAYGYQIAKETFGQKSQLHYVINELKNNPNSRRIMTEIWIPNELSEMALTPCVHLTQWSVIGNKLYLEVRQRSCDVALGLVANVFQYSVLHKLVALECGLEPAEIIWNIHNMHIYDRHYDKLIEQVNRKTFEPAKIKINNFKSIFDFKPDDIEIIDYKYGEKVSYEVAI

SEQ ID NO: 17500 - DNA, 795 bp, Dechloromonas aromatica RCB
  CDS (1)..(795)
atgcagccctacctcgacctgatgcgccacgtgctggacaacggcaatgacaaatccgaccgtaccggcactggcacgcgctccgtcttcggctggcagatgcgctttgacctgagccagggcttcccggtgatgacgaccaagaagctgcacctgaaatcgatcatccacgaactgctgtggttcatccagggcgacaccaacatcaagtacctgcaggaaaacggcgtcaagatctgggacgaatgggccgatgaaaacggcgatctcggcccggtctacggcaagcagtggcgccgctgggaaacgccggacggccgcgtcatcgaccagatcacgcaactggtcaacagcctgaagaacaatccggattcccgccgccacatcgtctccgcctggaaccccggcgatgtggacaacatggccctgccaccctgccactgccttttccagttttacgtcgcaaacggcaagctgtcctgccagctctaccagcgcagcgccgacattttcctcggcgtgccattcaacatcgcctcctatgccctgttcacgatgatgctggcgcaggtttgcggctaccagccaggcgaattcgtccatacctttggcgacgctcatctttactcgaaccacttcgagcaggcaaaactacagctttcccgcgacacccgccccctgccaaccatgtggatcaatccggaagtgaaggacctgttcgccttccgcttcgaggatttccgcctcgaaggctacgacccgcacccgcacatcccggccccggtggccgtttaa

SEQ ID NO: 17501 - protein, 264 aa, Dechloromonas aromatica RCB
MQPYLDLMRHVLDNGNDKSDRTGTGTRSVFGWQMRFDLSQGFPVMTTKKLHLKSIIHELLWFIQGDTNIKYLQENGVKIWDEWADENGDLGPVYGKQWRRWETPDGRVIDQITQLVNSLKNNPDSRRHIVSAWNPGDVDNMALPPCHCLFQFYVANGKLSCQLYQRSADIFLGVPFNIASYALFTMMLAQVCGYQPGEFVHTFGDAHLYSNHFEQAKLQLSRDTRPLPTMWINPEVKDLFAFRFEDFRLEGYDPHPHIPAPVAV

SEQ ID NO: 17502 - DNA, 795 bp, Ralstonia eutropha JMP134
  CDS (1)..(795)
atgaaacagtacctcgacttcatgcgccatgtgttcgagcatggcaccgaaaaggccgaccgcaccggcaccggcacgcgctcggtcttcggctaccagatgcgcttcgacctgagccagggcttcccggtggtcaccaccaagaagctgcacctgaagtcgatcatcctcgaactgctgtggttcctgcaaggctcgaccaatgtgcgctggctgcaggagaacggcgtcagcatctgggacgaatgggccgacgagaacggcgaactgggcccggtctacggctcccagtggcgttcgtggccgacgcccgacggccgccatgtcgaccagatcaccgacctgctgaaccagatccgcgagaaccccgattcgcgccgcctgattgtctcggcctggaacgtggccgacatcccgcgcatgaagctgccgccgtgccatgcgttcttccagttctacgtggccgatgggcgtctgtcgtgccaactctatcagcgcagcgccgacatcttcctcggcgtgccgttcaacatcgccagctacgcgctactcacgcacatgatcgcgcagcagaccgggctggacgtcggcgatttcgtctggaccggcggcgattgccatatctacagcaaccactacgagcaggtgcagacgcagctgtcgcgtgagccgctgccactgccgacgctgaagatcgtgcgcaagccggacagcatcttcgactaccgctacgaagatttcgagctggtcggctaccagtcgcatcccgccatcaaggcaccggtggccgtatga

SEQ ID NO: 17503 - protein, 264 aa, Ralstonia eutropha JMP134
MKQYLDFMRHVFEHGTEKADRTGTGTRSVFGYQMRFDLSQGFPVVTTKKLHLKSIILELLWFLQGSTNVRWLQENGVSIWDEWADENGELGPVYGSQWRSWPTPDGRHVDQITDLLNQIRENPDSRRLIVSAWNVADIPRMKLPPCHAFFQFYVADGRLSCQLYQRSADIFLGVPFNIASYALLTHMIAQQTGLDVGDFVWTGGDCHIYSNHYEQVQTQLSREPLPLPTLKIVRKPDSIFDYRYEDFELVGYQSHPAIKAPVAV

SEQ ID NO: 17504 - DNA, 852 bp, Haemophilus influenzae R2846
  CDS (1)..(852)
atgaaacaatatcttgagctttgtcgccgcattgttagtgaaggggaatgggttgccaatgagcgtacaggtaagcgctgtctcaccgttattaatgcagatttagaatatgatgtggcgaataatcaatttccgctgattactacccgtaaaagttattggaaagcggccattgctgaatttctaggttatattcgtggatatgacaatgccgctgatttccgcgcacttggcacgaaaacttgggatgctaatgcgaatgaaaatgcagcttggcttgcaaatccgcatcgtagaggcgttgatgatatggggcgcgtatatggtgtgcaaggcagagcatggcgtaagcctaatggagaaaccatcgatcagctacgtaaaattgttaataacttaacgaaaggtattgatgatagaggagaaattttaactttttttaaccctggggaatttgatcttggttgtcttcgtccttgtatgcacacgcatactttttctcttgtgggcgatactttacatcttactagttatcaacgttcctgtgatgttccgcttggattgaatttcaatcaaattcaggtgtttaccttcttagcacttatggctcagatcacgggcaaaaaagccggcaaggcataccataaaattgtgaatgcgcatatttatgaagatcagcttgagttaatgcgtgacgtacaacttaaacgtgagcctttcccattgccaaaattagaaataaatccagatataaaaacgcttgaagatttagaaacttgggtcacgatggatgattttaaagtcgttggctatcaatctcatgagccgattaaatatcctttttccgtctaa

SEQ ID NO: 17505 - protein, 283 aa, Haemophilus influenzae R2846
MKQYLELCRRIVSEGEWVANERTGKRCLTVINADLEYDVANNQFPLITTRKSYWKAAIAEFLGYIRGYDNAADFRALGTKTWDANANENAAWLANPHRRGVDDMGRVYGVQGRAWRKPNGETIDQLRKIVNNLTKGIDDRGEILTFFNPGEFDLGCLRPCMHTHTFSLVGDTLHLTSYQRSCDVPLGLNFNQIQVFTFLALMAQITGKKAGKAYHKIVNAHIYEDQLELMRDVQLKREPFPLPKLEINPDIKTLEDLETWVTMDDFKVVGYQSHEPIKYPFSV

SEQ ID NO: 17506 - DNA, 873 bp, Bifidobacterium longum DJO10A
  CDS (1)..(873)
atggctttgaccgaagaacaactcgcagatattcgctcccgtatccccgcacgtcccgaaacggacattccgatgccctatgaggacctggtgcgcaagatcctgaccgaaggcacgctgaagtccgatcgcaccggcaccggcacgatttccctgttcggccagcagatgcgctttgacctgtcgaagtacttcccgttgctgaccaccaagaccgtgttcttcaaaggcctggcctatgagctgctgtggtttttgaagggttcctccaacatcaactggctgctggagcacaacgtgcatatttgggatgagtgggcggacgagaacggcgatctgggcccggtctatggcgtgcagtggcgttcctggcccgcgccgacccccgaggacccgaatcgcaccatcgaccagatctccaatgtgctcgacctcatcaagcatcatccggattcgcgccgcatgatcgtctccgcgtggaatccggccgaggtggagaagatggcgttgccgccctgccacgcgctcttccagttctacgtggccgacgacaagctaagctgccagctgtaccagcgttcctgcgacatgttcctcggcgtgccgttcaatatcgcctcctactcgctgctcaccatgatgatggcgcagcaggccgggctcaagccgggcgaattcgtctggaccggcggcgactgccatgtttacgacaaccacgtcgaccagttccttgagcagctgggccgcaagccctacccgtacccgaccatcgagatccgtaaggccgattccctgttcgactaccagtatgaggacttcaaggtcgtcggctaccagcatcaccccactattaaggcacctgttgcggtctga

SEQ ID NO: 17507 - protein, 290 aa, Bifidobacterium longum DJO10A
MALTEEQLADIRSRIPARPETDIPMPYEDLVRKILTEGTLKSDRTGTGTISLFGQQMRFDLSKYFPLLTTKTVFFKGLAYELLWFLKGSSNINWLLEHNVHIWDEWADENGDLGPVYGVQWRSWPAPTPEDPNRTIDQISNVLDLIKHHPDSRRMIVSAWNPAEVEKMALPPCHALFQFYVADDKLSCQLYQRSCDMFLGVPFNIASYSLLTMMMAQQAGLKPGEFVWTGGDCHVYDNHVDQFLEQLGRKPYPYPTIEIRKADSLFDYQYEDFKVVGYQHHPTIKAPVAV

SEQ ID NO: 17508 - DNA, 972 bp, Burkholderia cepacia R18194
  CDS (1)..(972)
atgaaacagtatctcgacctcgttcgtaccattctcgataccggcacctggcaggagaaccgcacgggaatccgcaccatcagcatgccgggcgcgatgctgcgcttcgacctgcagcaaggcttcccggccgtgacgaccaagaagctcgcgttcaagtccgcgatcggtgaactggtcggcttcctgcgcgcgtcgcgcagcgcggccgatttccgcgctctcggctgcaaggtgtgggacgcgaacgcgaacgagaacgcgcaatggctcgcgaacccgtatcgccagggcgtcgacgatctcggtgacgtgtacggcgtgcaatggcgccagtggccgggctacaaggtgctcgacgcgggtgccgatgcgcagatcgacgatgcgacgcgccgcggcttccggatcgtcacgcgtttcgacgaagacggcgcgccgaaggtgctgctttacaaggcgatcgaccagttgcgccagtgcctggatacgatcatggagaacccggccgaccgtcgcatcctgtttcacgcgtggaatccggccgtgctcgaccagatcgcgctgcccgcatgccatctgctgtaccagttcctgccgaatgcgacgaagcgcgaaatctcgctgtgcctgtacatccgcagcaacgacgtcggcctcggcacgccgttcaacctgacggaaggggccgcgctgctggaactcgtcggccggctgacgggctatacgccgcgctggttcacgtacttcatcggcgacgcccatatctacgagaaccagctcgacatgctgcagcgccagctcacgcgcgagccttacgacagcccgcggctcgagattgccgagcgcgtgccggaatacgcgaagacgggcgtctacgcgcccgagtggctggagcagatcgagccgtccgatttctcgctcgtcggctaccgccaccatgagccgctgaccgcgccgatggcggtctga

SEQ ID NO: 17509 - protein, 323 aa, Burkholderia cepacia R18194
MKQYLDLVRTILDTGTWQENRTGIRTISMPGAMLRFDLQQGFPAVTTKKLAFKSAIGELVGFLRASRSAADFRALGCKVWDANANENAQWLANPYRQGVDDLGDVYGVQWRQWPGYKVLDAGADAQIDDATRRGFRIVTRFDEDGAPKVLLYKAIDQLRQCLDTIMENPADRRILFHAWNPAVLDQIALPACHLLYQFLPNATKREISLCLYIRSNDVGLGTPFNLTEGAALLELVGRLTGYTPRWFTYFIGDAHIYENQLDMLQRQLTREPYDSPRLEIAERVPEYAKTGVYAPEWLEQIEPSDFSLVGYRHHEPLTAPMAV

SEQ ID NO: 17510 - DNA, 945 bp, Listeria monocytogenes str. 1/2a F6854
  CDS (1)..(945): transl_table=11
atgaaacaatatttggatttagaaaagtacgttttagagaatggaacacaaaaaggagatcgcactgggactggaacaatcagcacatttggttatcaaatgcgttttgatttgcaggaaggctttccaattatgacaacaaaacgggtaccatttaaacttgtagtaagtgaactgctatggtttttacatggagatacgaatattcgctaccttttacagcataataataacatttggaatgaatgggcttttgagcgttttgtgaaaagcgatgattacaagggcgaagatatgacagactttggactaagagcggaacgtgatccggctttcaaagaagtatatcaagcggagatggagaagtttaaaacacgtattatagaagatgaagcgttcgcgaataaatatggtgagctaggtaatatttacggtaaacaatggcgtgaatggaaaacttcacaaggagaaacaattgatcagttagcggatttgattgaaatgattaaaacgaatccgaactcacgtcgtttgattgtgtctgcttggaatccagaagatattccgaatatggctttaccgccatgtcattcgctattccaattttatgtagcggacggaaaattatcatgtcagctgtatcaacgtagtgccgatatattcctaggtgtaccatttaatattgcgagttatgcacttctcacacatctgattgcacgtgaagtaggactggatgttggcgagtttatccatactatgggagacgcgcatctttataacaatcatattgaacaagtgaaagaacagttatctagaacaccgcacgcgcttccaaaattagtactttcagataaaccagcaacgatttttgattttgaagtagcagatatttcacttgatggctataatccagatccatcgattaaagcaccaatttcagtataa

SEQ ID NO: 17511 - protein, 314 aa, Listeria monocytogenes str. 1/2a F6854
MKQYLDLEKYVLENGTQKGDRTGTGTISTFGYQMRFDLQEGFPIMTTKRVPFKLVVSELLWFLHGDTNIRYLLQHNNNIWNEWAFERFVKSDDYKGEDMTDFGLRAERDPAFKEVYQAEMEKFKTRIIEDEAFANKYGELGNIYGKQWREWKTSQGETIDQLADLIEMIKTNPNSRRLIVSAWNPEDIPNMALPPCHSLFQFYVADGKLSCQLYQRSADIFLGVPFNIASYALLTHLIAREVGLDVGEFIHTMGDAHLYNNHIEQVKEQLSRTPHALPKLVLSDKPATIFDFEVADISLDGYNPDPSIKAPISV

SEQ ID NO: 17512 - DNA, 957 bp, Bacillus cereus G9241
  CDS (1)..(957): transl_table=11
atgaaacatgctgaaaatgaatacttaaatttatgccgtcatgtaatggaacatggtacgaagaaagaagatcgtacagggacaggaactgtatctgtatttggatatcaaatgcgttttgatttaagtaaaggttttcctttattaacgacaaagagagtaccgtttcgccttgtagcaagtgaattgctatggtttatgaaaggtgatacaaatattcgctatttattgcagcataataataacatttggaatgaatgggcatttaagagctgggtagaaagcgacgagtatactggtcctgacatgactgatttcggtcttcgttcacaacaagatgaggaatttaaagtgcagtacgatgagcaaatggaattatttaaaaagaacgttttagaagatgatgatttctcaaataaatatggttatttaggagacgtatacggtaagcagtggcgtgcttggaaaacgacagctggtgagacacttgatcaattaaaggatgtaattgaaatgattaagaagacgccagattcacgtcgcctaattgtttctgcttggaatcctgaagatgtaccaagtatggcattaccgccttgtcatacactattccaattttatgtagcggatggcaaactttcttgtcagctatatcaaagaagtggtgacatattccttggaattccatttaacattgcaagctactcactactaacacatttaattgcacatgaatgcggacttgaagtgggagaatttgttcatacgattggagatgcacacatttatacgaatcattttgagcaagtagaaaagcaattggcacgtgaaccacgtcagttcccggaacttacactaaatccagatgtgaaatctgtgtttgattttgaaatggaagacttaacgattgaaggatatgatccacacccagcaattaaagcaccggttgcagtataa

SEQ ID NO: 17513 - protein, 318 aa, Bacillus cereus G9241
MKHAENEYLNLCRHVMEHGTKKEDRTGTGTVSVFGYQMRFDLSKGFPLLTTKRVPFRLVASELLWFMKGDTNIRYLLQHNNNIWNEWAFKSWVESDEYTGPDMTDFGLRSQQDEEFKVQYDEQMELFKKNVLEDDDFSNKYGYLGDVYGKQWRAWKTTAGETLDQLKDVIEMIKKTPDSRRLIVSAWNPEDVPSMALPPCHTLFQFYVADGKLSCQLYQRSGDIFLGIPFNIASYSLLTHLIAHECGLEVGEFVHTIGDAHIYTNHFEQVEKQLAREPRQFPELTLNPDVKSVFDFEMEDLTIEGYDPHPAIKAPVAV

SEQ ID NO: 17514 - DNA, 951 bp, Rubrivivax gelatinosus PM1
  CDS (1)..(951)
atgcagcagttccacgacatgctgcagcacatcctcgatcacggctcgcgccagctcaacgcgcgcaccggcgaggaggtgctcttcgtgccgggctacaccctgcgcttcgacatggccgacggcttcccggctatcacgacgaagcagctgttcttcaagatggccaagggcgagctcttcggcttcttccgcggcttcaccagcgcggcgcagttccgcgagatcggctgcaccgtctggaacgacaacgccaacaagaccaaggcctggctggccaatccctaccggcagggcgaggacgacctcggtcgcttcggctacctgcagtggacggactggcgcgactggcgtgaggcgaccacgccggcgcagcgcgacgagatgctggcccagggctacgaggtgagagcgcacgacgccgagcgcggcgtgtggatcttgcgtcgcagcatcaaccagctcgagaccagcctgcacgccgtgatgaccaacccgagcgatcggggcatcatcctgagcggctggaacccggccgagatcgaccagggcgcgctgcgcagctgccacgtgagctacatgctccaggtcgacgtcgccaccggcacgctgcacctgacgctctggcagcgcagcttcgatgcgccgctcgcctacaacgtcgccatcggcgcgatgtacctggagatcatggcgcgcctggcgggcctgaaggctggcacgttcacgcacttcatctcggacgcgcacatctacgccaagcacatcccgggcgtgaaggagatgctcgcgcgcgagcacttcccgcaaccaaccctggacctgggcaacatcccgacgctgacctcggccgccgagatccccggcatcttcgcgacgctcgatcccaatcaggtgaagctggtcaactaccagcaccacccgaagatcgcattcgagatgacgccgtaa

SEQ ID NO: 17515 - protein, 316 aa, Rubrivivax gelatinosus PM1
MQQFHDMLQHILDHGSRQLNARTGEEVLFVPGYTLRFDMADGFPAITTKQLFFKMAKGELFGFFRGFTSAAQFREIGCTVWNDNANKTKAWLANPYRQGEDDLGRFGYLQWTDWRDWREATTPAQRDEMLAQGYEVRAHDAERGVWILRRSINQLETSLHAVMTNPSDRGIILSGWNPAEIDQGALRSCHVSYMLQVDVATGTLHLTLWQRSFDAPLAYNVAIGAMYLEIMARLAGLKAGTFTHFISDAHIYAKHIPGVKEMLAREHFPQPTLDLGNIPTLTSAAEIPGIFATLDPNQVKLVNYQHHPKIAFEMTP

SEQ ID NO: 17516 - DNA, 786 bp, Rubrivivax gelatinosus PM1
  CDS (1)..(786)
atgcgcgaccacggtgtggtcaaggccgaccgcaccggcaccggcaccaccagcgtgttcggccaccagatgcgcttcgacctgcgcgagggctttccgctggtcacgaccaagaaggtccatctcaagagcatcgtcctcgaactgctgtggttcctgcgcggcgacgggaacgccacctggctgcaggaacgcggcgtgacgatctgggacgagtgggccgcgcccgacggcgacctcggcccggtctatggtgtgcagtggcgcagttggcccacgccggacggcggccacgtcgaccagatcgccgaggtggtgaagcagctcaagaccaaccctgattcgcggcgcatcatcgtcagcgcgtggaacgtggccgacttgccgaagatggcactgatgccctgccacgccttcttccagttctatgtggcgcccggcgactcgccttcggctcggggtcggctgtcgtgccagctctaccagcgcagcgccgacatcttcctcggcgtgcccttcaacatcgccagctacgcgctgctgacgcacatgctggcgcagcagtgcgacctggaggtgggcgacttcgtctggaccggcggcgactgccacatctacagcaaccaccgcgagcaggtcgagctgcagctctcgcgcgcgccgcgcccctaccccacgctgcagatcaagcgccggccgccgtcgatcttcgactacgcctacgaggacttcgagatcatcggctacgacccgcacccggccatcaaggcgccggtcgcggtctga

SEQ ID NO: 17517 - protein, 261 aa, Rubrivivax gelatinosus PM1
MRDHGVVKADRTGTGTTSVFGHQMRFDLREGFPLVTTKKVHLKSIVLELLWFLRGDGNATWLQERGVTIWDEWAAPDGDLGPVYGVQWRSWPTPDGGHVDQIAEVVKQLKTNPDSRRIIVSAWNVADLPKMALMPCHAFFQFYVAPGDSPSARGRLSCQLYQRSADIFLGVPFNIASYALLTHMLAQQCDLEVGDFVWTGGDCHIYSNHREQVELQLSRAPRPYPTLQIKRRPPSIFDYAYEDFEIIGYDPHPAIKAPVAV

SEQ ID NO: 17518 - DNA, 972 bp, Pseudomonas fluorescens PfO-1
  CDS (1)..(972)
atgaagcaatatctcgatctggtgtcgcacgtcatcaacaacggcaccaaacaggccaaccgtaccggcgtgaacaccatcagctttccgggcgccatgttgcgcttcgacctgcaggaaggtttcccggcgatcaccacccgcaagatggccttcaaatcggccatcggcgagatgtgcggctttctgcgtggcgtgaacaacgccgccgaattccgtgcgctgggctgcaaggtctgggatcagaacgccaacgaaaacgcccagtggctggccaacccgttccgccagggcgaagacgacctcggcgaaatctacggcgtgcaatggcgcaaatggccggcgtacaagcagatcccgctgagcaacaccgcggccatcgaacaaaccttgagcaacggctacaagcagattgcccagggcgaagaagacggccaggcctacgtggtcttgtacaaagccatcgatcaagtgcgccagtgcgtcgatacgatcatcaaggacccgggcagccgccgcatcctgttccacggctggaactgcgcccagctcgatgaaatggccctgccgccgtgccatctgctgtaccagttccacccgaatgtcgagaccaaagagatctccctgaccctctacatccgttccaacgacctgggcctgggcacgccgttcaatctcaccgaaggcgccgcgctgctgagcctgatcggtcgcctgaccggctacacgccgcgctggttcacctatttcatcggtgacgcccacgtctacgaaaaccacctggacatgctcaacgaacagctcaagcgcgagccgttcgccatgccgaaactgaagatttcggatcgcgtgccggagtttgccaagaccggtgtttatcagccggaatggctggaactggtggagccgagtgacttctcgctggaaggctacgagcaccatgcgccgatgaccgcgccgatggcggtctga

SEQ ID NO: 17519 - protein, 323 aa, Pseudomonas fluorescens PfO-1
MKQYLDLVSHVINNGTKQANRTGVNTISFPGAMLRFDLQEGFPAITTRKMAFKSAIGEMCGFLRGVNNAAEFRALGCKVWDQNANENAQWLANPFRQGEDDLGEIYGVQWRKWPAYKQIPLSNTAAIEQTLSNGYKQIAQGEEDGQAYVVLYKAIDQVRQCVDTIIKDPGSRRILFHGWNCAQLDEMALPPCHLLYQFHPNVETKEISLTLYIRSNDLGLGTPFNLTEGAALLSLIGRLTGYTPRWFTYFIGDAHVYENHLDMLNEQLKREPFAMPKLKISDRVPEFAKTGVYQPEWLELVEPSDFSLEGYEHHAPMTAPMAV

SEQ ID NO: 17520 - DNA, 972 bp, Burkholderia fungorum LB400
  CDS (1)..(972)
atgaaacaatacctcgacctcgtccgcacgattctcgacaccggcacgtggcaggagaaccgcaccggcatccgcaccatcagcatgccgggcgccatgttgcgcttcgaccttcagcaaggctttcccgcggtcaccacgaaaaagctggcgttcagatcggcggtgggcgaactgatcgggtttctgcgcgcctcgcgcagcgccgcggatttccgcgacctcggctgcaaggtgtgggacgccaacgccaaccagaatccgcagtggctcgccaatccctatcgcgaggggccggacgatctcggcgacgtctacggcgtgcaatggcgccagtggcccgcctacaaggtgttgaacgcagacgcgagcgcgcagcttggcgacgcgactgcacgcggcttccgggtggtgacgggattcgaagaagacggcagccgcaaagtgctgctgtacaaggcgatcgaccagttgcgccagtgtctggacaccatcatgcagaacccggcggaccgccgcattctgtttcacgcgtggaaccccgccgtgctggatcagatcgcgctgcccgcttgccacctgctttatcagttcgtgccgaacgcggtgcgcaaggaaatttcgctgtgcctgtacatccgcagcaacgacgtcgggctcggcacgccgttcaatctgaccgagggcgcggcgttgctgcacctggtcggtcgtctgacgggttatacgccgcgctggttcacgtatttcatcggcgacgcgcacatctacgagaaccagctcgacatgctgcagcagcaactcaagcgcgagccctatgaaagtccggctttcgcgatttccgaccgcgtgccggagtatgcgaaaaccggcgtgtacgagccggaatggctcgaaaagatcgagccggcggatttctcgctggtcggctaccggcatcacgagccgctcacggcgccgatggccgtttga

SEQ ID NO: 17521 - protein, 323 aa, Burkholderia fungorum LB400
MKQYLDLVRTILDTGTWQENRTGIRTISMPGAMLRFDLQQGFPAVTTKKLAFRSAVGELIGFLRASRSAADFRDLGCKVWDANANQNPQWLANPYREGPDDLGDVYGVQWRQWPAYKVLNADASAQLGDATARGFRVVTGFEEDGSRKVLLYKAIDQLRQCLDTIMQNPADRRILFHAWNPAVLDQIALPACHLLYQFVPNAVRKEISLCLYIRSNDVGLGTPFNLTEGAALLHLVGRLTGYTPRWFTYFIGDAHIYENQLDMLQQQLKREPYESPAFAISDRVPEYAKTGVYEPEWLEKIEPADFSLVGYRHHEPLTAPMAV

SEQ ID NO: 17522 - DNA, 945 bp, Novosphingobium aromaticivorans DSM 12444
  CDS (1)..(945)
atgtccatcctgcgcgattccggccgccattacgaatggcaatatctcgatctcatgcgccgcatttgggaacatggcgacgagcgggtagatcggaccggcgtcggtacgcggtcggtcttcggtgctgagctcagattcgatctttccgatgggcggatgccgttgctcactaccaaacgcgtctactggaagacggcaacgcgtgagttcctatggttcctgaccggcaataccaatatccgccccctctgcgcgcagggtgtggagatctggaccgattggccgctcgaccgttaccgcaaggagaccggggacgacatttcgcggaaggacttttcggcacggatcgtcgcggacgaggcattcgcgttgcggtggggcgaccttggaccggtctatggcaagcaatgggtggactggccggtgttcgagcctgtgggcgacggcctgttccgccgacgcgaagccggcgtgaaccaggtggcggacgtggttgattcgctgcggcataatcccggcagcaggcgtcacatcatcgagggttggaacgtcgccgagatcgaccggatggcgctgcctccctgccacaagacataccagttccacgtcagcggcaatcggctgaacggcttgctctatcaacgcagttgcgacgtcgcgctggggcttcccttcaacctgtggggcgccgcactgctcgtacgtctgctggcccagcaatgtgaccttcaacccggcgaactggtttggatgggtggagatacgcatctctacctgaaccacgcggatctcgttgaagcgcaactttcgcgggaaccggagggtgatccgcgccttgccatcctgcggcgaccggatagtatcttcggttaccggatcgaggatttcgaggtgaccggatatgcaccgcaggggcacctttccgcgcctgttgccgtctga

SEQ ID NO: 17523 - protein, 314 aa, Novosphingobium aromaticivorans DSM 12444
MSILRDSGRHYEWQYLDLMRRIWEHGDERVDRTGVGTRSVFGAELRFDLSDGRMPLLTTKRVYWKTATREFLWFLTGNTNIRPLCAQGVEIWTDWPLDRYRKETGDDISRKDFSARIVADEAFALRWGDLGPVYGKQWVDWPVFEPVGDGLFRRREAGVNQVADVVDSLRHNPGSRRHIIEGWNVAEIDRMALPPCHKTYQFHVSGNRLNGLLYQRSCDVALGLPFNLWGAALLVRLLAQQCDLQPGELVWMGGDTHLYLNHADLVEAQLSREPEGDPRLAILRRPDSIFGYRIEDFEVTGYAPQGHLSAPVAV

SEQ ID NO: 17524 - DNA, 795 bp, Cytophaga hutchinsonii
  CDS (1)..(795)
atgaaacaatatcacgaccttatgcagcacatcctggatcagggtgtaaaaaaagaagaccgcaccggtaccggcaccgtcagtgtatttggataccagatgcgctttaatctgcaggaaggttttcctttattaacgacaaagaagctgcacatgcgttccattacgcatgagttgctgtggtttttacagggcgatacaaatatcaaatatctaaaggataacaatgtttctatctgggatgaatgggcggatgagaacggcaacttagggccggtttacggttatcagtggcgttcgtggcctacgccagacgggaagcatattgatcagatcactaacgtggtgaatatgataaaaaataatccggattcaagaaggctgattgttagcgcatggaacgtaggggagattgaaaaaatgaagctgccgccatgccacgcgttctttcagttttatgtagccgacggaaaattgtcgtgccagctctatcagcgcagtgcagatgtattcttaggtgtaccgtttaatattgcttcctatgctttgttaacgatgatggttgcacaggtatgcggtttacaggcgggcgattttgtacatacattaggagatgcgcatttatattccaatcaccttgaacaggcaaagctgcaattgagccgtgacttcagaccattgcctgcgatgaagattaatccggatgtgaagtcaatctttgattttaagtttgaagatttcaccttggaaggatacgatccgcatccgcatattaaggctgcagtagcggtgtag

SEQ ID NO: 17525 - protein, 264 aa, Cytophaga hutchinsonii
MKQYHDLMQHILDQGVKKEDRTGTGTVSVFGYQMRFNLQEGFPLLTTKKLHMRSITHELLWFLQGDTNIKYLKDNNVSIWDEWADENGNLGPVYGYQWRSWPTPDGKHIDQITNVVNMIKNNPDSRRLIVSAWNVGEIEKMKLPPCHAFFQFYVADGKLSCQLYQRSADVFLGVPFNIASYALLTMMVAQVCGLQAGDFVHTLGDAHLYSNHLEQAKLQLSRDFRPLPAMKINPDVKSIFDFKFEDFTLEGYDPHPHIKAAVAV

SEQ ID NO: 17526 - DNA, 834 bp, Microbulbifer degradans 2-40
  CDS (1)..(834)
atgaagcaatatttagatttaatgcgccatgtgcgcgataccggtaccaaaaaagaagatcgcaccggtactggcactgtgagtgtatttggctaccaaatgcgcttcgatttaagtgaaggtttcccgttggttaccaccaaaaagtgccatttaaagtcgattattcacgagctactttggtttttaaagggtgagactaacactcaataccttaccgataacggcgtgcgtatttggaatgagtgggcaacagaagagggcgatttgggcccagtttacggcgcacagtggcgctcttggcctacgccagatggcggctcgctcgatcagtttgcattgctagttgagcaaataaaaaataaacccgactcgcgtcgccatattatttctgcgtggaacccagcgttgctacccgacgagggcgtgtcgccacaggataacgtgcgcaatggcaaaatggccctgccgccttgtcacaccctgtttcagttttacgtggccgacaataaattaagctgccagctgtaccagcgcagtgccgatattttcttgggggtgccctttaatatcgcatcctacgccctgttaaccatgatggtggcgcaggtaacgggtttagagttgggggattttgtgcacacctttggtgatgcgcatctttacctgaatcacctagagcaagttgaaacgcagttggccagagagcccttgccactacccacgatgaaaattaaccctgaagtaaaagatatttttagcttcaaatttgaagactttgaactggtagattaccaggctcacccgcacattagtgcgcctatatcgatatag

SEQ ID NO: 17527 - protein, 277 aa, Microbulbifer degradans 2-40
MKQYLDLMRHVRDTGTKKEDRTGTGTVSVFGYQMRFDLSEGFPLVTTKKCHLKSIIHELLWFLKGETNTQYLTDNGVRIWNEWATEEGDLGPVYGAQWRSWPTPDGGSLDQFALLVEQIKNKPDSRRHIISAWNPALLPDEGVSPQDNVRNGKMALPPCHTLFQFYVADNKLSCQLYQRSADIFLGVPFNIASYALLTMMVAQVTGLELGDFVHTFGDAHLYLNHLEQVETQLAREPLPLPTMKINPEVKDIFSFKFEDFELVDYQAHPHISAPISI

SEQ ID NO: 17528 - DNA, 960 bp, Oenococcus oeni PSU-1
  CDS (1)..(960)
atgagccgaaatgaagaacaatacctaaaccttgcccgacgtattttggaaaccggggcctcgaaaatggatcggaccaagactggaacacactcgatttttggtgcgcaaatgcgttttgatctctctgaggggtttcctttgctgaccagtaaaaaagtcgcatttggacgaattaaatcggaattattgtggttcttgcgcggtgacaataatattcgttttctcctgcaacaccacaatcatatttgggacgaatggccctttaaaaaatgggtcgaaagcaatgagtataaaggccccgatatgactgattttggtttgcgcacgcaaaaagatccaattttcgccgaacagtataaagagcaaaagaaaatctttgttgatcgaattttaaacgatgacgaattcagcaaaaaattcggaacaatcggggatgtttacggaaagctttggcgtcattggccggatgccaacgacgatggcagcgtagaccaaataacccgtttaatcaatgaaattaaagttaatcccaactcccgtcgtttaattttaacagcttgggatcccgaaacaacgccgtttgccactctgccttcatgtcatgttatgagtcaattttatgtagtagacggaaaaattagcctacaaatgtaccaaagatcggccgattattttttgggagtaccctttaacatcgccagttactcgcttctgctttcaatggttgccgcacaaaccggattagaagtcggtgaatttattcatacgattggtgatgcccatatttacaacaaccacgttgaccaaattaaagagcagttgtcaaaaccaacacataaacttccgactctgaagcttaatccagacgtgaagtcaattttcgattatgaaatgagcgatattaaacttgagaattatattcacgaagatgtaattaaagctccgatcgctgtttga

SEQ ID NO: 17529 - protein, 319 aa, Oenococcus oeni PSU-1
MSRNEEQYLNLARRILETGASKMDRTKTGTHSIFGAQMRFDLSEGFPLLTSKKVAFGRIKSELLWFLRGDNNIRFLLQHHNHIWDEWPFKKWVESNEYKGPDMTDFGLRTQKDPIFAEQYKEQKKIFVDRILNDDEFSKKFGTIGDVYGKLWRHWPDANDDGSVDQITRLINEIKVNPNSRRLILTAWDPETTPFATLPSCHVMSQFYVVDGKISLQMYQRSADYFLGVPFNIASYSLLLSMVAAQTGLEVGEFIHTIGDAHIYNNHVDQIKEQLSKPTHKLPTLKLNPDVKSIFDYEMSDIKLENYIHEDVIKAPIAV

SEQ ID NO: 17530 - DNA, 951 bp, Pediococcus pentosaceus ATCC 25745
  CDS (1)..(951)
atgcttgaagaacaataccttaatttggaaagatatgttttggaaaatgggcatctcaaaggagaccgtacccaaactggtaccctaagtacttttggatatcaaatgcgttttgatttaagtgaaggttttccattactaacgaccaagagagtcccttttggtttgattaagagtgagttactctggtttttaaaaggcgataccaatattagatatttacttcaacataataatcatatttgggatgaatgggcttttaaaaagtgggttgaaagtgatgaatatcagggaccagacatgaccgattttggtcaccgctcactgactgatcctgaattcaatgaactctataaaattgaaaaacaacgttttacagaacaaattttggaagatgatacattttctgctaaatatggtgatcttggaaatgtttacggtagccaatggcgagcatggaagactagtactggtgagactatcgatcaaatttcaaatgttattgatatgattaagaataatcctaactcaagaagaatgatcgtttcggcttggaatcctgaagatgtgccaacctcagcattacctccgtgtcattcactatttcaattttatgtggctgatgggaaacttagctgtcaactgtatcaacgcagtggcgatattttcttaggaattcctttcaatattgctagctatgccttgcttacagaattaattgcgaaagcgactggtttagaagtgggagaatttatccataccatcggtgatgctcacatttattctaatcatctggatcaggttaaagaacaattagaacgtactccacgtccggctcctaaattgaaatttaaacaagtgcatgacagtatctttgactatgaaccaggagatattgtggttgaaggatatgatcctcatccaaccattaaagcaccggtagcagtttaa

SEQ ID NO: 17531 - protein, 316 aa, Pediococcus pentosaceus ATCC 25745
MLEEQYLNLERYVLENGHLKGDRTQTGTLSTFGYQMRFDLSEGFPLLTTKRVPFGLIKSELLWFLKGDTNIRYLLQHNNHIWDEWAFKKWVESDEYQGPDMTDFGHRSLTDPEFNELYKIEKQRFTEQILEDDTFSAKYGDLGNVYGSQWRAWKTSTGETIDQISNVIDMIKNNPNSRRMIVSAWNPEDVPTSALPPCHSLFQFYVADGKLSCQLYQRSGDIFLGIPFNIASYALLTELIAKATGLEVGEFIHTIGDAHIYSNHLDQVKEQLERTPRPAPKLKFKQVHDSIFDYEPGDIVVEGYDPHPTIKAPVAV

SEQ ID NO: 17532 - DNA, 840 bp, Streptococcus suis 89/1591
  CDS (1)..(840)
atgactaaagcagatattatttttaaagaaaacattcgtaagattatggaagagggcgttttttcagaaaatgctcgcccacgttacaaggatggaaatgtcgctaattccaagtacgttacaggcgcctttgctgagtatgacttgtctaagggggagtttcctattacaacacttagacctattccgattaaatcagccatcaaggaaattctctggatttaccaagaccagaccaatgatttgtcggttttacaggaaaaatacggtgtccagtattggaatgactgggaagttgaaggaacaggcacaatcggtgaacgctatggtgcaattgttaaaaagcatgacatcatttcaaaaatcctcaagcaattggaggaaaatccatggaaccgccgtaatgtgatttctttgtgggattatgaagcatttgaccaatccgcgggtcttttgccatgtgcctttcagaccatgtttgacgttcggcgagtggatggggagatttatttggatgcaactctaactcaacggtcaaatgatatgttggtagcccatcatatcaacgctatgcagtatgtagcccttcagatgatgattgctaaacattttggctggaaggttgggaagtttttctatttcatcaacaatcttcacatctatgataatcagtttgaacaggctgaagaattactccgtcgcacaccatctgaagttgagccacgtttggtcttaaatgttcctgacggcaccaatttctttgacattcgggcagaagattttgagttggtggactacaatccagttaaaccgcagttaaaattcgatttagcaatttaa

SEQ ID NO: 17533 - protein, 279 aa, Streptococcus suis 89/1591
MTKADIIFKENIRKIMEEGVFSENARPRYKDGNVANSKYVTGAFAEYDLSKGEFPITTLRPIPIKSAIKEILWIYQDQTNDLSVLQEKYGVQYWNDWEVEGTGTIGERYGAIVKKHDIISKILKQLEENPWNRRNVISLWDYEAFDQSAGLLPCAFQTMFDVRRVDGEIYLDATLTQRSNDMLVAHHINAMQYVALQMMIAKHFGWKVGKFFYFINNLHIYDNQFEQAEELLRRTPSEVEPRLVLNVPDGTNFFDIRAEDFELVDYNPVKPQLKFDLAI

SEQ ID NO: 17534 - DNA, 795 bp, Thiobacillus denitrificans ATCC 25259
  CDS (1)..(795)
atgaaaccctatctcgacctgatgcgccacgtgcttgagcacggcacacgcaaagacgaccgcaccggcaccggcaccctgtcggtcttcggctggcagacgcgctacgaccttgccgcgggctttccgctcgtcacgaccaagaaatgtcacctgcgctcgatcgttcacgaactgctatggtttctccagggcgacacgaacatccgctatctgaaggaaaacggcgtctcgatctgggacgagtgggccgacgagaacggcgatctcggcccggtctacggccatcagtggcgttcgtggcctaaagccgacggcggggtgatcgaccagatcgccgaggccgtgaagacgctcaggaccaaccccgattcgcgccgcatcatcgtctcggcgtggaacgttgccgacctcgacaggatggcgctggcgccctgccacgcgttcttccagttctacgttgccgaaggcaggttgagttgccagctctaccagcgcagcgccgacatcttcctcggcgtgccgttcaacatcgcctcctacgcgctgctgacactgatgatggcgcaggtgacgggcctgaagccgggtgacttcgtacatacgctcggtgacgcccacctctacgtgaaccacttggagcaggcgcgcgagcagctttcccgcgaaccgcgcccgctgcccacgatgacgctcaatcccgacgtgaccgacatcttcggctttcgcttcgaggatttcacgctcggcggctacgacccgcacccggcgatcaaggcgccggtcgcggtatga

SEQ ID NO: 17535 - protein, 264 aa, Thiobacillus denitrificans ATCC 25259
MKPYLDLMRHVLEHGTRKDDRTGTGTLSVFGWQTRYDLAAGFPLVTTKKCHLRSIVHELLWFLQGDTNIRYLKENGVSIWDEWADENGDLGPVYGHQWRSWPKADGGVIDQIAEAVKTLRTNPDSRRIIVSAWNVADLDRMALAPCHAFFQFYVAEGRLSCQLYQRSADIFLGVPFNIASYALLTLMMAQVTGLKPGDFVHTLGDAHLYVNHLEQAREQLSREPRPLPTMTLNPDVTDIFGFRFEDFTLGGYDPHPAIKAPVAV

SEQ ID NO: 17536 - DNA, 984 bp, Erythrobacter litoralis HTCC2594
  CDS (1)..(984): transl_table=11
atggcaagcgtctcgattccgtccgagctcatggggcccagcaactcggaacgccattccgaatggcaatatctcgacctgatgcggcgcatctgggcggagggcagcgagcgggtcgatcgcacgggtgtcggcacgcgttcggtgttcggggcacaattgcggttcgacctggccgatggggctatgccgctgctcacaacgaagcgggtctactggaaaaccgcgacgcgcgagatgctgtggttcctgaccggtgacacgaatatccgcccgctggtgctgcagggagtcaagatctggaatgagtggccgcatgcccgctatgttaacgaaacgggcgaggacattgcgctcgacgatttcatccagcgcatcgccgatgacgaggcctttgctgaacgctggggggatctcggcccggtctatggcaagcaatgggtcgattggccgacctatcgttatcgcaaggacgggctgtacgagaaaagcgaaggcatcaaccagatcgccgaggttgtcgaaagcctcaagaccaatcctggcagccgccgccacatcatcgaaggctggaatgtcgccgagcttgaccgcatggcgctgccgccctgccacaagacctatcaatttcacgtcgctaaggacgatcaagggcgcgatcgcctgaattgtctgctttaccagcgcagttgcgatgtcgcgctcggtctgcctttcaacctgtggtcggcagcgctgttgcagcgcatgatggcgcagcagaccgacctggaaccgggcgagctggtctggatgggcggagacacgcatctctacctcaatcacgagcacttgatcaccgagcagctgaatcgggaaccgcaaggccatcccacgcttgaaatagtaaggcggcccgacagcatattcgactaccggatcgaggatttcgtggtgcataattacgaaccgcaccctccgatcaaagcacctgttgcggtctga

SEQ ID NO: 17537 - protein, 327 aa, Erythrobacter litoralis HTCC2594
MASVSIPSELMGPSNSERHSEWQYLDLMRRIWAEGSERVDRTGVGTRSVFGAQLRFDLADGAMPLLTTKRVYWKTATREMLWFLTGDTNIRPLVLQGVKIWNEWPHARYVNETGEDIALDDFIQRIADDEAFAERWGDLGPVYGKQWVDWPTYRYRKDGLYEKSEGINQIAEVVESLKTNPGSRRHIIEGWNVAELDRMALPPCHKTYQFHVAKDDQGRDRLNCLLYQRSCDVALGLPFNLWSAALLQRMMAQQTDLEPGELVWMGGDTHLYLNHEHLITEQLNREPQGHPTLEIVRRPDSIFDYRIEDFVVHNYEPHPPIKAPVAV

SEQ ID NO: 17538 - DNA, 840 bp, Lactococcus lactis subsp. cremoris SK11
  CDS (1)..(840)
atgacttacgcagatcaagtttttaaacaaaatatccaaaatatcctagataatggtgttttttcagaaaatgcaagaccaaagtataaggatggtcaaatggcgaatagcaaatatgtcactggttcattcgttacttatgatttgcaaaagggggagtttccaattaccactttgcgtccaattccaatcaaatctgctattaaagaattgatgtggatataccaagaccaaacaagtgagctttctgttctcgaagagaagtatggagtcaaatactggggagaatggagaattggtgatggtacgattgggcaacgttatggtgcaacagtcaaaaaatataatatcattggtaaattattagaaggcttggccaaaaatccatggaatcgtcgtaatatcatcaacctttggcagtatgaagattttgaggaaacagaaggtcttttaccatgtgctttccaaacgatgtttgatgtccgtcgagaaaaagatggtcagatttatttggatgccacactgattcaacgttcaaacgatatgcttgtggcccaccatatcaatgcgatgcaatatgttgctttgcaaatgatgattgcaaaacatttttcttggaaagttgggaaattcttttattttgtaaataatttacatatttatgataatcagtttgagcaggcaaatgaattaatgaagcgaacagcttctgaaaaagaacctcgtttggtccttaatgttcctgatggtacaaactttttcgatattaaacctgaagattttgaacttgtggactatgagccagtaaaacctcaattgaaatttgatttagcaatttaa

SEQ ID NO: 17539 - protein, 279 aa, Lactococcus lactis subsp. cremoris SK11
MTYADQVFKQNIQNILDNGVFSENARPKYKDGQMANSKYVTGSFVTYDLQKGEFPITTLRPIPIKSAIKELMWIYQDQTSELSVLEEKYGVKYWGEWRIGDGTIGQRYGATVKKYNIIGKLLEGLAKNPWNRRNIINLWQYEDFEETEGLLPCAFQTMFDVRREKDGQIYLDATLIQRSNDMLVAHHINAMQYVALQMMIAKHFSWKVGKFFYFVNNLHIYDNQFEQANELMKRTASEKEPRLVLNVPDGTNFFDIKPEDFELVDYEPVKPQLKFDLAI

SEQ ID NO: 17540 - DNA, 912 bp, Lactobacillus delbrueckii subsp. bulgaricus ATCC BAA-365
  CDS (1)..(912)
atgacggaaggcaatgacaaaaatgaccggaccgggacggggaccagaagcctctttggggcccagatgcgctttgacttaagccagggcttcccgatcttgacgaccaagagggtgcctttcggcctgatcaagagcgaacttttgtggttcttgcggggggacaccaacatccgtttcttgcttgaacataaaaaccacatttgggacgaatgggcctttaaaaattgggtgaccagcccggaataccagggcccggacatgactgattttggccttaggagtcaaaaggacccagggtttaaggcagtctatgacgaagaaatgcaaaagttctgccagcggattttggatgatgaagcttttgcccaaaaatacggcaacctgggcgacgtctatggggcccagtggcggcactggggtaagcgggacggcggctttatcgaccagatcgcggacgtgattgagcagatcaagaccaatcccgactcccgccgcttgatcgtaacggcatggaacccggaagacgttccttccagcgccctgccgccgtgccatgtcctcttccagttttacgtggctgacggcaagctcagcttgcagctttaccagcgctcaggcgacatgttcttaggcgtgcccttcaacattgccagctactctttgctcttgtccttgattgcccgggagaccggcctggaagtgggcgagtttgtgcatactattggggatgcccacatttacaagaaccactttgcccaagtggaagagcagctgaaaagaaagccgtttgacgcgccaactttgtggctgaatccagggaagaaaaaagtagctgattttgaaatggctgatattaaattggtcaactaccagcacgggtctacaatcaaggccccggttgccgtttag

SEQ ID NO: 17541 - protein, 303 aa, Lactobacillus delbrueckii subsp. bulgaricus ATCC BAA-365
MTEGNDKNDRTGTGTRSLFGAQMRFDLSQGFPILTTKRVPFGLIKSELLWFLRGDTNIRFLLEHKNHIWDEWAFKNWVTSPEYQGPDMTDFGLRSQKDPGFKAVYDEEMQKFCQRILDDEAFAQKYGNLGDVYGAQWRHWGKRDGGFIDQIADVIEQIKTNPDSRRLIVTAWNPEDVPSSALPPCHVLFQFYVADGKLSLQLYQRSGDMFLGVPFNIASYSLLLSLIARETGLEVGEFVHTIGDAHIYKNHFAQVEEQLKRKPFDAPTLWLNPGKKKVADFEMADIKLVNYQHGSTIKAPVAV

SEQ ID NO: 17542 - DNA, 861 bp, Streptococcus thermophilus LMD-9
  CDS (1)..(861)
atgacgaaagcagacactatttttaaagaaaatatcactaaaatcatggaagagggagtttggtcagagcaagcacgtcctaaatacaaggatggcacaacagccaattccaaatacatcacagggtcttttgcagaatatgatttgagcaagggagagtttccaattacgactctgcgtcccattgctatcaaatctgccatcaaagaagtgttctggatctatcaagaccagacaaatagcctagatgtgcttgaagataagtataatgttcattattggaatgactgggaagttgaaggcgtccctgctaataatggggacaagcgttcaatcggtcagcgttatggggcagtcgttaagaagcacgatattattaatcgtttgttagcacagttagaagccaatccttggaatcgccgtaatgtcatttccctttgggattacgaggccttcgaggagacagctggacttcagccttgtgccttccagaccatgtttgatgttcgtcgtgtgggtgaggatgtttatttggatgccactttgacgcagcgctcaaacgatatgttggtggcccatcacattaatgctatgcagtatgtggcacttcagatgatgattgccaagcattttggttggaaagttggtaaattcttttatttcatcaacaacctccatatctatgacaatcaatttgaacaagctgaggaactcctcaagcgtcagccgtctgattgtcaaccacgcttggtcctcaatgttcctgatgaaactaatttctttgatatcaaaccagaagattttgaattggtggactatgatcctgttaaacctcaactcaaatttgacttagcaatttaa

SEQ ID NO: 17543 - protein, 286 aa, Streptococcus thermophilus LMD-9
MTKADTIFKENITKIMEEGVWSEQARPKYKDGTTANSKYITGSFAEYDLSKGEFPITTLRPIAIKSAIKEVFWIYQDQTNSLDVLEDKYNVHYWNDWEVEGVPANNGDKRSIGQRYGAVVKKHDIINRLLAQLEANPWNRRNVISLWDYEAFEETAGLQPCAFQTMFDVRRVGEDVYLDATLTQRSNDMLVAHHINAMQYVALQMMIAKHFGWKVGKFFYFINNLHIYDNQFEQAEELLKRQPSDCQPRLVLNVPDETNFFDIKPEDFELVDYDPVKPQLKFDLAI

SEQ ID NO: 17544 - DNA, 804 bp, Arthrobacter sp. FB24
  CDS (1)..(804): transl_table=11
gtgagcattccaacgccctatgaagacctcctgcgtgacgtccttgccaacggcacgcacaaatctgaccgcaccggcaccggcacgctcagcgtgttcgggcggcagatgcgctttgacctcagccaaagctttccgctgatcaccaccaagcgcgttcatttcaagtcggtggcagttgaacttctatggttcctgcgcggcgaaaccaacgtgaaatggatgcaggaccagggcgtcaccatctggaacgaatgggccgacgccgacggcgaactgggtcccgtttacggcgtgcagtggcgcagctggccgacgcccgacggcggccacatcgaccagatcgccgagctggtggagaacctcaaatccaacccggactcgcgccggcacatcgtctccgcctggaacgtggctgagcttcaggacatggccttgccgccgtgccacgcgttcttccagttctacgttgctgacggcaagctgtcctgccagctgtaccagcgctccgcggacaccttccttggcgtcccgtttaacatcgcttcctatgcgctgctgacctgcatgctggcccaacaggtgggcctggagcccggcgagttcgtctggaccggcggcgacgtgcacatctacgacaaccacatggaccaggtgctcaagcagctgaagcgggagccgtacgaatacccgcagctgaagatcctccgcaagccggactccatttttgactacacgctggacgacttcgaagtggtcggataccagcaccaccctacgattaaggcgccgatcgcagtatga

SEQ ID NO: 17545 - protein, 267 aa, Arthrobacter sp. FB24
MSIPTPYEDLLRDVLANGTHKSDRTGTGTLSVFGRQMRFDLSQSFPLITTKRVHFKSVAVELLWFLRGETNVKWMQDQGVTIWNEWADADGELGPVYGVQWRSWPTPDGGHIDQIAELVENLKSNPDSRRHIVSAWNVAELQDMALPPCHAFFQFYVADGKLSCQLYQRSADTFLGVPFNIASYALLTCMLAQQVGLEPGEFVWTGGDVHIYDNHMDQVLKQLKREPYEYPQLKILRKPDSIFDYTLDDFEVVGYQHHPTIKAPIAV

SEQ ID NO: 17546 - DNA, 795 bp, Azotobacter vinelandii AvOP
  CDS (1)..(795): transl_table=11
atgaaacagtacctcgacctgatgcgcctggtgcgcgagcacggcaccttcaagagcgaccgcaccggcaccggcacgttttccgtgttcggccaccagatgcgcttcgacctggccgagggcttcccgctggtcaccaccaagaagtgccacctcaaatccatcgtccacgagctgctgtggttcctgaagggcgacaccaacatccgctacctgaaggaaaacggcgtgtcgatctgggacgagtgggccgacgggaacggcgacctcggcccggtctacggctaccagtggcgcagttggccggcaccggacggccggcacatcgaccagatagccaatgtcgtgaacatgatccgcgacaacccggattcgcgccggctgatcgtctcggcctggaacccggcgctgatcgacgagatgaagctgccgccgtgccatgcgctgttccagttctacgtggccgatggccggctcagctgccagctctatcagcgctcggcggacatcttcctcggcgtgcccttcaacatcgccagctacgcgctgctgatcctgatgatggcgcaggtcacgggcctcgcgcccggcgagttcgtctggaccggcggcgactgccacctctacgccaaccacttggagcaggccgacctgcagctctcccgcgaaccgctgccgctgccgaccatgcagctcgaccccgacgtgaaggacctgttcgccttccgcttcgaggacttcgagctggtcggctaccagtcccatccgcacatcaaggcgccggtggcgatctga

SEQ ID NO: 17547 - protein, 264 aa, Azotobacter vinelandii AvOP
MKQYLDLMRLVREHGTFKSDRTGTGTFSVFGHQMRFDLAEGFPLVTTKKCHLKSIVHELLWFLKGDTNIRYLKENGVSIWDEWADGNGDLGPVYGYQWRSWPAPDGRHIDQIANVVNMIRDNPDSRRLIVSAWNPALIDEMKLPPCHALFQFYVADGRLSCQLYQRSADIFLGVPFNIASYALLILMMAQVTGLAPGEFVWTGGDCHLYANHLEQADLQLSREPLPLPTMQLDPDVKDLFAFRFEDFELVGYQSHPHIKAPVAI

SEQ ID NO: 17548 - DNA, 972 bp, Burkholderia vietnamiensis G4
  CDS (1)..(972): transl_table=11
atgaaacagtacctcgacctcgttcgcaccatcctcgacaccggcacctggcaggagaaccgcacgggaatccgtaccatcagcatgcccggcgcgatgctgcgcttcgacctgcagcaaggctttccggccgtgacgacgaagaagctcgcgttcaagtcggcgatcggcgagctggtcgggttcctgcgtgcatcgcgcagcgcggccgatttccgtgcgctcggctgcaaggtgtgggacgcgaacgcgaacgacaacgcgcagtggctcgcgaatccttaccgtcgcggcgtcgacgatctcggcgacgtgtacggcgtgcaatggcggcaatggcccggctacaaggtgctggacgcgagcgccgacgcgcagatcgccgacgcgacgcgccgcggcttccggatcgtcacgcagttcgacgaagacggtgcgccgaaggtgctgctctacaaggcgatcgaccagctgcgccagtgcctcgacacgatcatcgagaacccgtccgaccgtcgcatcctgtttcatgcgtggaacccggccgtgctcgaccagatcgcattgcccgcttgccatctgctgtatcagttcctgccgaacgccgcgaagcgcgagatttcgctgtgcctgtacatccgtagcaacgacgtcgggctcggcacgccgttcaacctgaccgaaggcgccgcgctgctgtcgctggtggggcggctgaccggctatacgccgcgctggttcacgtacttcatcggcgacgcgcacatctacgagaaccagctcgacatgctgcagcagcagctcacgcgcgagccgtacgacagcccgcggctcgagatcgccgagcgcgtgcccgactacgcgaagacgggcgtctatgcgccggagtggctcgagctgatcgagccgtcggacttctcgctcgtcggctatcggcatcatgagccgctgagcgcgccgatggcggtctga

SEQ ID NO: 17549 - protein, 323 aa, Burkholderia vietnamiensis G4
MKQYLDLVRTILDTGTWQENRTGIRTISMPGAMLRFDLQQGFPAVTTKKLAFKSAIGELVGFLRASRSAADFRALGCKVWDANANDNAQWLANPYRRGVDDLGDVYGVQWRQWPGYKVLDASADAQIADATRRGFRIVTQFDEDGAPKVLLYKAIDQLRQCLDTIIENPSDRRILFHAWNPAVLDQIALPACHLLYQFLPNAAKREISLCLYIRSNDVGLGTPFNLTEGAALLSLVGRLTGYTPRWFTYFIGDAHIYENQLDMLQQQLTREPYDSPRLEIAERVPDYAKTGVYAPEWLELIEPSDFSLVGYRHHEPLSAPMAV

SEQ ID NO: 17550 - DNA, 972 bp, Burkholderia cenocepacia AU 1054
  CDS (1)..(972): transl_table=11
atgaaacagtatctcgatctcgttcgtaccattctcgataccggcacctggcaggagaaccgcacgggaatccgcaccatcagcatgccgggcgcgatgctgcgcttcgacctgcagcaaggcttcccggccgtgacgaccaagaagctcgcgttcaagtccgcgatcggcgagctggtcggcttcctgcgcgcgtcgcgcagcgcggccgatttccgcgcgctcggctgcaaggtgtgggatgcgaacgcgaacgagaacgcgcagtggctcgcgaacccgtatcgccagggcgtcgacgatctgggcgacgtatatggcgtgcaatggcgccagtggccgggctacaaggtgctcgatgcgaacgccgacgcgcagatcgccgatgcgacgcgccgcggcttccggatcgtcacgcgtttcgacgaagatggcgcgccgaaggtgctgctgtacaaggcgatcgaccagctgcgccagtgcctggacacgatcatggagaacccgtccgatcgccgcatcctgtttcacgcgtggaatccggccgtgctcgaccagatcgcgctgcccgcgtgccatctgctgtaccagttcctgccgaacgcgacgaagcgcgagatctcgctgtgcctgtacatccgcagcaatgacgtcggcctcggcacgccgttcaacctgacggaaggggccgcgctgctgtcgctcgtcggtcggctgacgggctatacgccgcgctggttcacgtatttcatcggcgacgcgcacatctacgagaaccagctcgacatgctgcagcagcagctcacgcgcgagccgtacgaaagcccgcggctcgagattgccgagcgcgtgcccgagtacgcgaagacgggcgtctatgcgccggaatggctggagcaggtcgagccgtccgatttctcgctcgtcggctatcggcaccatgagccgttgactgcgccgatggcggtctga

SEQ ID NO: 17551 - protein, 323 aa, Burkholderia cenocepacia AU 1054
MKQYLDLVRTILDTGTWQENRTGIRTISMPGAMLRFDLQQGFPAVTTKKLAFKSAIGELVGFLRASRSAADFRALGCKVWDANANENAQWLANPYRQGVDDLGDVYGVQWRQWPGYKVLDANADAQIADATRRGFRIVTRFDEDGAPKVLLYKAIDQLRQCLDTIMENPSDRRILFHAWNPAVLDQIALPACHLLYQFLPNATKREISLCLYIRSNDVGLGTPFNLTEGAALLSLVGRLTGYTPRWFTYFIGDAHIYENQLDMLQQQLTREPYESPRLEIAERVPEYAKTGVYAPEWLEQVEPSDFSLVGYRHHEPLTAPMAV

SEQ ID NO: 17552 - DNA, 795 bp, Chromohalobacter salexigens DSM 3043
  CDS (1)..(795): transl_table=11
atgcaaccctatctcgacttaatgcgccacgtgctcgagaacggcgtggaaaaaagtgaccgcaccggcacggggacgctcagcgtcttcggccatcaaatgcgcttcgatctggccgcgggatttccgctggtgaccaccaagaagctgcatttgcgctcgatcatccacgaactgctgtggttcttgcgcggcgacaccaacatcgcctatctcaaggaaaatcgcgttcgcatctgggatgaatgggccgacgagaacggcgatctggggcccgtgtatggctaccaatggcgtagctggccgcgtccggatggcggccatgtcgatcagatcgccaatgtcgtcgagcagatcaagcgcaaccccgattcccgccgcctcatcgtctcggcctggaacccggcactggtcgacgagatggcgttgccgccgtgccacgccctgttccagttctatgtcgccgaggggcggctgtcctgccagctgtatcagcgcagcgccgacatcttcctcggcgtgccgttcaacatcgccagctacgcgttgttgacccacatggtggcgcaggcctgtgacctggcgccgggcgagttcgtgcacaccctgggggatgcccacctgtacctcaaccatctcgagcaggcacgcttgcaattgagccgcgagcctcgcgcgctgcctcgcctggtgctcaatccacgggtcaaggatgtgttcgccttcacgttcgatgacatcgccatcgaagactacgatccgcatccacacatcaaggcggaggtggccgtatga

SEQ ID NO: 17553 - protein, 264 aa, Chromohalobacter salexigens DSM 3043
MQPYLDLMRHVLENGVEKSDRTGTGTLSVFGHQMRFDLAAGFPLVTTKKLHLRSIIHELLWFLRGDTNIAYLKENRVRIWDEWADENGDLGPVYGYQWRSWPRPDGGHVDQIANVVEQIKRNPDSRRLIVSAWNPALVDEMALPPCHALFQFYVAEGRLSCQLYQRSADIFLGVPFNIASYALLTHMVAQACDLAPGEFVHTLGDAHLYLNHLEQARLQLSREPRALPRLVLNPRVKDVFAFTFDDIAIEDYDPHPHIKAEVAV

SEQ ID NO: 17554 - DNA, 972 bp, Burkholderia pseudomallei 668
  CDS (1)..(972)
atgaaacagtatctcgatctcgttcgcaccattctcgataccggcacctggcagagcaaccgcacgggcattcgcacgatcggcatccccggcgcgatgctgcgcttcgatctgcagcagggctttcccgcagtgacgacgaaaaagctcgcgttcaagtccgcgatcggcgagctcgtcggctttctgcgcgcgacgcgcagcgcggccgatttccgcgcgcttggctgcaaggtgtgggacgcgaatgcgaatgagaacgcgcagtggctcgcgaatccgtatcgccgcggcgtcgacgacctcggcgacgtgtacggcgtccaatggcggcgctggccgggctacaaggtgctcgacgcgcatgccgacgcgcagatcgccgatgcgacgtcgcgcggttttcgcgccgtcgcgcgcttcgacgaggacggcgtgcagaaggtgctgctgcacaaggcgatcgaccagttgcgagactgcctcgacacgatcgtgcgcgacccgtcgagccggcgcatcctgttccacggctggaatcccgcggtgctcgacgagatcgcgctgcccgcgtgccatctgctgtatcaattcctgccgaacgtcgagcgtcgcgaaatctcgctgtgcctgtacatccgcagcaacgacgtcgggctcggcacgccgttcaatctcgccgaaggcgcggcgctcctcacgctcgttggccggctgacgggctatacgccgcgctggttcacgtacttcatcggcgatgcgcacatctacgagaatcagctcggcatgctcaagcagcagctcgaacgcgagccgttcgacagcccgcggctcgagatcgccgagcgcgtgcccgagtacgcgaaaacggggcagtacgagccgcaatggcttgaacgcatcgagccgtcggatttcacgctcgtcggctatcgtcaccacgaaccgctgagcgcgccgatggccgtttga

SEQ ID NO: 17555 - protein, 323 aa, Burkholderia pseudomallei 668
MKQYLDLVRTILDTGTWQSNRTGIRTIGIPGAMLRFDLQQGFPAVTTKKLAFKSAIGELVGFLRATRSAADFRALGCKVWDANANENAQWLANPYRRGVDDLGDVYGVQWRRWPGYKVLDAHADAQIADATSRGFRAVARFDEDGVQKVLLHKAIDQLRDCLDTIVRDPSSRRILFHGWNPAVLDEIALPACHLLYQFLPNVERREISLCLYIRSNDVGLGTPFNLAEGAALLTLVGRLTGYTPRWFTYFIGDAHIYENQLGMLKQQLEREPFDSPRLEIAERVPEYAKTGQYEPQWLERIEPSDFTLVGYRHHEPLSAPMAV

SEQ ID NO: 17556 - DNA, 990 bp, Burkholderia pseudomallei S13
  CDS (1)..(990)
atgctgcgctatccgggtctcagcgagctctacctcgcgacgctcagggacgtctgcggcgcgtacgaataccggagcgcgccgcgcgggtacgcggagcgcgaaatcatcggctacggcgcacggatcgacgatccgcgcgcgcgcttttgccggcatgcggcgcgcaagcagaacgtcgtcttcaactacgccgaggcgctgtggtatctgtccgggcgcaacgatctcgaattcatcgcgcactacgcaccgtcgatggcgcgctacagtccggacggcaagcatctgcccggcaccggctacggcgcgcgcctgctgcattacggcgagcgcgggctcgaccagatcgagcgcgcgctcgacatcctgtcgcgcgacgacgccgagagcaagcgcgtcgtgctgcagatcttcagcgccgacgaggaactgtaccggcgcaacatcgacgtgtcgtgcacgctcggcctgcaactgctgctgcgcgaaggccggctgcacatggtcgcgttcatgcgcgcgaacgacgcgtacatcgggctgctgaacgacgtgttctcgttcacgttcctgcaggagtacctcgcgtcgcggctcggctgcgagctcggcacgtatgcgcatcaggtgggctcgatccacgtgtacgacgacaatctgccgcgcgtgcaggcgctgctcgacgacagcgatgcggcgatcgtcaccgccgccgcgccgccgcgcatgccggcgggcacgcgcgccgcgacgatcgcgcgcgtgctcgagcacgaaggccggattcgcgccgggcgcgtgtcgctcgccgcgcttcgcgacatcgatctcgatccgtactggcgcgacgtgctcggtctcttctggatctatcgcgagatcaaggcgggcaacccgccgcccgacgaggcgctcgcgttcgtcggctcgttccatcgcgcctatctgatgaaccggtgggacatggcgtccgcctcgctccaataa

SEQ ID NO: 17557 - protein, 329 aa, Burkholderia pseudomallei S13
MLRYPGLSELYLATLRDVCGAYEYRSAPRGYAEREIIGYGARIDDPRARFCRHAARKQNVVFNYAEALWYLSGRNDLEFIAHYAPSMARYSPDGKHLPGTGYGARLLHYGERGLDQIERALDILSRDDAESKRVVLQIFSADEELYRRNIDVSCTLGLQLLLREGRLHMVAFMRANDAYIGLLNDVFSFTFLQEYLASRLGCELGTYAHQVGSIHVYDDNLPRVQALLDDSDAAIVTAAAPPRMPAGTRAATIARVLEHEGRIRAGRVSLAALRDIDLDPYWRDVLGLFWIYREIKAGNPPPDEALAFVGSFHRAYLMNRWDMASASLQ

SEQ ID NO: 17558 - DNA, 831 bp, Clostridium thermocellum ATCC 27405
  CDS (1)..(831): transl_table=11
atgagtaaagctgatgagatttttatagccatgtgcaaagacattcttgaaaacggagtgtcttccgaaggagaaaaagtaagagcaagatgggctgacggaactcctgcccatacaatcaagaaatttggcgttgtgaacagatatgatttgtcggaggagtttccaatccttaccttaaggccgacaaatctgaaagctgcaattgatgagctgctttggatatggcaaaagaaatccaataatataaaagacctcaacagtcatatttgggacagctgggccgatgaaaacggttcgataggcaaggcgtacggttatcaattaagtattaagcataaatatcccgaaggagagtttgaccaggttgacaggattatctatgacttaaagcacaatccttacagcagaaggattattgccaacatgtacaatcatagtgaccttcatgaaatgaacctgtatccttgcgcatacagcataactttcaatgtcaccggaagaaaattgaacgcaatacttaatcagcgttcccaggatgttttggtggcgaacaactggaatgtggcccaatatgcaattttagtacatatgtttgcacaagtctgcgatttggaagttggagaacttgtgcatgttattgccgatgcccatatatatgacaggcatataccgttggtaaaagaacttatacaaaggactccttatccagcaccgaagctatggattaatcccgagaaaaaagatttttatgattttaaagttgaagattttgtgctggaggactatcaggccgggccccagataaaaaacatccctgttgccatctaa

SEQ ID NO: 17559 - protein, 276 aa, Clostridium thermocellum ATCC 27405
MSKADEIFIAMCKDILENGVSSEGEKVRARWADGTPAHTIKKFGVVNRYDLSEEFPILTLRPTNLKAAIDELLWIWQKKSNNIKDLNSHIWDSWADENGSIGKAYGYQLSIKHKYPEGEFDQVDRIIYDLKHNPYSRRIIANMYNHSDLHEMNLYPCAYSITFNVTGRKLNAILNQRSQDVLVANNWNVAQYAILVHMFAQVCDLEVGELVHVIADAHIYDRHIPLVKELIQRTPYPAPKLWINPEKKDFYDFKVEDFVLEDYQAGPQIKNIPVAI

SEQ ID NO: 17560 - DNA, 855 bp, Polaromonas sp. JS666
  CDS (1)..(855): transl_table=11
atgaacacccctcccgaaacccgccctgaccgccccattcgttcccagtacgaagacttcatgcgccatgtggacgcgcacggcgtcttcaaggccgatcgcaccggcaccggcaccaaaagcgtgtttggttaccagatgcgctttgatttgaacgaaggctttccgctggtgaccaccaaaaaggttcacctcaaatccatcgtgcaggaactgctgtggtttctgaccgggagcagcgacaacaactggctgaaagaacgcggcgtgacgatttgggatgagtgggcccgcgaagacggtgacctgggcccggtctatggcgtgcaatggcgcagttggccgacgcctgacggcgggcatattgaccagatcagcgaagtcatcaagacgctgaaaaccaaccctgactcgcgccgcatcatcgtgagcgcctggaacgtggctgacctgtccaaaatggcgctgatgccttgccacgcattttttcagttctacgtcgcgcctgccactgaagctggcggtaaaggcaagctcagctgccagctctaccagcgcagcgccgacattttcctcggcgtgcccttcaacattggcagctacgcgctgctcacgcacatggtggcgcagcagtgcgacctggacgtgggcgacttcatctggacgggcggcgactgccacatctacagcaaccacgccgagcaggtggccctgcaactgagccgggcccccttcccctatccgacactccacatcaagcgcaagcccgagtcgatcttcgactaccagttcgacgatttcgagttccttgactaccagcaccatgcggccatcaaggcgccggtagcggtgtag

SEQ ID NO: 17561 - protein, 284 aa, Polaromonas sp. JS666
MNTPPETRPDRPIRSQYEDFMRHVDAHGVFKADRTGTGTKSVFGYQMRFDLNEGFPLVTTKKVHLKSIVQELLWFLTGSSDNNWLKERGVTIWDEWAREDGDLGPVYGVQWRSWPTPDGGHIDQISEVIKTLKTNPDSRRIIVSAWNVADLSKMALMPCHAFFQFYVAPATEAGGKGKLSCQLYQRSADIFLGVPFNIGSYALLTHMVAQQCDLDVGDFIWTGGDCHIYSNHAEQVALQLSRAPFPYPTLHIKRKPESIFDYQFDDFEFLDYQHHAAIKAPVAV

SEQ ID NO: 17562 - DNA, 795 bp, Exiguobacterium sp. 255-15
  CDS (1)..(795): transl_table=11
atgaaacagtatcatcaactttgtcaggaaattttaacgaacggcgtaaaaaaagaagatcggacgggaaccggaaccatcagtatttttggtcatcaaatgcggttctcgttgcaggatggttttccgatggtgacgacaaaaaagttacatatgaagtcgatcattcatgaattgatctggtttatctccggtgaaacgaacatctcttatttacaagagaacggtgtccgcatttggaacgagtgggcggacgaaaacggtaatctcggaccggtttatggtgcccagtggcgttcttttccgaaaccggatggaacgaccgtcgatcaattagcggatgtgattgaacagatcaaagtcaatccggactcccgtcgtttgattgtcagtgcctggaatcccggacaactggaggagatggccttaccgccctgccatttgttgttccagttttacgtagcagacggaaaactgtcttgtcagctctatcagcggtcggcggacgtcttccttggagtcccgttcaatattgcttcctatgctttgttgacgcacatgattgctcatgtctgtaaacttgaagtcggcgattttgttcatactttaggagattcccatatttattcgaaccatctggatcaagtgaatctccagttgagccggaatccgaaacctttgccgacgattcgatttgcccgtgaagtcgagcgcattgaagactttacgtttgacgatatcatcatcgaaggctacgaccctgatccgcatattaaaggagtcgtcgccgtatga

SEQ ID NO: 17563 - protein, 264 aa, Exiguobacterium sp. 255-15
MKQYHQLCQEILTNGVKKEDRTGTGTISIFGHQMRFSLQDGFPMVTTKKLHMKSIIHELIWFISGETNISYLQENGVRIWNEWADENGNLGPVYGAQWRSFPKPDGTTVDQLADVIEQIKVNPDSRRLIVSAWNPGQLEEMALPPCHLLFQFYVADGKLSCQLYQRSADVFLGVPFNIASYALLTHMIAHVCKLEVGDFVHTLGDSHIYSNHLDQVNLQLSRNPKPLPTIRFAREVERIEDFTFDDIIIEGYDPDPHIKGVVAV

SEQ ID NO: 17564 - DNA, 795 bp, Methylobacillus flagellatus KT
  CDS (1)..(795): transl_table=11
atgaaggtctatcacgacttgatgcgccacgtactggagcagggccacaagaaggaagaccgcaccggcaccggtacgctgtccgtattcggctaccagatgcgcttcgacctgtccgagggctttccgctgctgaccaccaagaaggttcacctgaagtccattattcatgagctgctctggtttttgcagggcagtaccaacattgcctacctcaaggaaaacggcgtgaccatctgggacgagtgggcggatgccgagggcaacctggggccagtgtacggctaccagtggcgcaattggcccaaaccggatggaggccatatcgatcagatcagcgaagtgatagcggccatcaagcgtaatccggactctcgccgtctgattgtgtccgcatggaatgtcgccgatgttgacaagatgaaattgccgccttgccatgcgtttttccagttctatgtggcggatggcaagctttcgtgccagttgtaccagcgtagtgcggatatctttctcggcgtaccgttcaatatcgcctcctatgccttgctcaccatgatggtggcgcaggtatgtgatctcaagcttggcgattttgtacatacactgggtgatgcgcatatctatctcaatcatctcgagcaggtgaaggagcaattgtcgcgtgagccttatcctctgcctgtgatgcggatcaatcccgaggtcaaggatatctttgctttccgtttcgaggatttcacactggagaattaccagtcgcatcccgctatcaaggcccccgttgcagtgtag

SEQ ID NO: 17565 - protein, 264 aa, Methylobacillus flagellatus KT
MKVYHDLMRHVLEQGHKKEDRTGTGTLSVFGYQMRFDLSEGFPLLTTKKVHLKSIIHELLWFLQGSTNIAYLKENGVTIWDEWADAEGNLGPVYGYQWRNWPKPDGGHIDQISEVIAAIKRNPDSRRLIVSAWNVADVDKMKLPPCHAFFQFYVADGKLSCQLYQRSADIFLGVPFNIASYALLTMMVAQVCDLKLGDFVHTLGDAHIYLNHLEQVKEQLSREPYPLPVMRINPEVKDIFAFRFEDFTLENYQSHPAIKAPVAV

SEQ ID NO: 17566 - DNA, 963 bp, Sphingopyxis alaskensis RB2256
  CDS (1)..(963): transl_table=11
atgacagggaaagaaggggagcacgtcttggctgattccatccactatgaactgcaatatctcgacctgatgcgccgtatctgggtcgacggtgacgagcgcgtcgaccgcaccggcgtcggcacgcgctcgctgttcggtgagacgatgcgattctcgctgaaggacgacgccatccccctgctcacgacgaagcgcgtttattggaagactgcactgcgcgaactgctttggtttctcacgggcgacaccaatatccgtccgctcgttgcgcaaggcgtaaagatctggaccgactggccgctcgagaaatatcgcaaggcgaccggcgaggcgatcagcgccacggatttcgaagcgcggatcgtcgcagacgcggattttgcggccaaatggggcgaccttggtcccgtctacggtcatcaatgggtcaactggccgcgctacgagccggcgggcggcggtctgtttcgccgcgccgaccacgggtataaccagattgcggcgctgatcgactcgctcaagaacaatccggggtcacggcgccacatcttcaccggctggaatgtcgccgatctcgaccggatggcgttgccgccgtgccatatgacctatcagttccatgttcgcagcgacggcggattgtcgtgcctgctctttcagcgctcgtgcgatcttggtcttggcttcgcgttcaacattttcgaggcggcgttgctcacgcggatggtcgccgagcaatgcggcctttacgcgcatgaggtcgtgtggaccggtggcgacgtccatctctatctcaaccacgccgagctggtcgaacagcagttggcgcgcgtaccggagggaaagccccggctccgcatcctgcgccgaccgcccagcattttcgaatatcggttcgaggatttcgtggtcgaggattacgcgccgcaagcgcatatttccgcgccggtggcggtctga

SEQ ID NO: 17567 - protein, 320 aa, Sphingopyxis alaskensis RB2256
MTGKEGEHVLADSIHYELQYLDLMRRIWVDGDERVDRTGVGTRSLFGETMRFSLKDDAIPLLTTKRVYWKTALRELLWFLTGDTNIRPLVAQGVKIWTDWPLEKYRKATGEAISATDFEARIVADADFAAKWGDLGPVYGHQWVNWPRYEPAGGGLFRRADHGYNQIAALIDSLKNNPGSRRHIFTGWNVADLDRMALPPCHMTYQFHVRSDGGLSCLLFQRSCDLGLGFAFNIFEAALLTRMVAEQCGLYAHEVVWTGGDVHLYLNHAELVEQQLARVPEGKPRLRILRRPPSIFEYRFEDFVVEDYAPQAHISAPVAV

SEQ ID NO: 17568 - DNA, 795 bp, Shewanella amazonensis SB2B
  CDS (1)..(795): transl_table=11
atgaagcagtatctcgacttaatgaagcacatcctcgataaggggacagataaaagtgacagaaccggtacaggcacccgttcggttttcggttatcagatgcgctttgacctcaatgaggggtttccgctggttaccaccaagaagtgccacctgcgctccatcattcatgaactgctgtggttcctgaaaggtgaaaccaatgtggattatctgcacgaaaacaaggtgtcgatttgggacgagtgggccgatgaaaagggcaatctgggacctgtctatggcgcccaatggcgcagctggccaacccctgatggccgccatattgatcagatttctcaagttattgagcagattaaagccacgccggactctcgccggttaatcgtatcagcctggaacgtgggagagctggataaaatggcgctggcaccctgccatgcgtttttccaattttacgtggccgatggcaaactgagctgccagctctatcagcgttcctgtgatgtgttcctgggcctgccgtttaatattgccagttatgcgctgctgaccatgatggtggcgcagcagtgtaatcttggcttgggcgatttcgtttggaccggtggggatacccacctctacagcaaccacatggagcagactcaattgcagctctcacgggagcctcgtcctctgcccaccatgaagatcctccgccatccagagtcgatttttgattaccgtttcgaagactttgaactcagtggttacgacccccatccccacatcaaggcgcccgttgctatctaa

SEQ ID NO: 17569 - protein, 264 aa, Shewanella amazonensis SB2B
MKQYLDLMKHILDKGTDKSDRTGTGTRSVFGYQMRFDLNEGFPLVTTKKCHLRSIIHELLWFLKGETNVDYLHENKVSIWDEWADEKGNLGPVYGAQWRSWPTPDGRHIDQISQVIEQIKATPDSRRLIVSAWNVGELDKMALAPCHAFFQFYVADGKLSCQLYQRSCDVFLGLPFNIASYALLTMMVAQQCNLGLGDFVWTGGDTHLYSNHMEQTQLQLSREPRPLPTMKILRHPESIFDYRFEDFELSGYDPHPHIKAPVAI

SEQ ID NO: 17570 - DNA, 795 bp, Ralstonia metallidurans CH34
  CDS (1)..(795): transl_table=11
atgaaacagtacctcgacttcatgcgccatgtgtacgagcatggcaccgaaaagtccgaccgcaccggcaccggtacgcgctcggtcttcggctaccagatgcgcttcgacctgaacgagggctttcccgtcgtcaccacgaaaaagctgcacctgaagtcgatcatccatgaactgctgtggttcctgcagggctcgaccaacatcaagtacctgaaggacaacggcgtcaccatctgggacgaatgggccgatgccaacggcgaactgggcccgatctacggctaccagtggcgcgcatggccgacaccggacggtcgccatatcgaccagatcaccgaggtcgtgcagcagatccgcgacaaccccgattcgcgccggctgattgtgtcggcctggaacgtgggcgagatcccgcagatgaagctgccgccctgccacgcgttcttccagttctacgtggccgatggcaagctgtcctgccagctctaccagcgcagcgccgacattttcctcggcgtgccgttcaacatcgccagctacgcgctgctgacgcacatgatcgcgcagcaatgcgacctgggcgtgggcgatttcgtgtggaccggtggcgactgccacatctacagcaaccacttcgagcaggtggagacgcagctttcgcgcgagccgatgaagctgccaacgctgcgaatcaagcatcgtcccgacagcatcttcgactacaagtacgacgatttcgagctggtcggctatgagtcgcaccccgcgatcaaggcgccggtggccgtatga

SEQ ID NO: 17571 - protein, 264 aa, Ralstonia metallidurans CH34
MKQYLDFMRHVYEHGTEKSDRTGTGTRSVFGYQMRFDLNEGFPVVTTKKLHLKSIIHELLWFLQGSTNIKYLKDNGVTIWDEWADANGELGPIYGYQWRAWPTPDGRHIDQITEVVQQIRDNPDSRRLIVSAWNVGEIPQMKLPPCHAFFQFYVADGKLSCQLYQRSADIFLGVPFNIASYALLTHMIAQQCDLGVGDFVWTGGDCHIYSNHFEQVETQLSREPMKLPTLRIKHRPDSIFDYKYDDFELVGYESHPAIKAPVAV

SEQ ID NO: 17572 - DNA, 975 bp, Enterococcus faecium DO
  CDS (1)..(975): transl_table=11
atgggtagaagattaggaggaaaaaggatggaacaagcgtatcttgacttaggaagaaaattgttggaagaagggcatcgtaaagaagacagaacaggcacaggcacattaagcttattcggataccaaatgcggtttgatctgcaaaaagggtttcctttgttaacaacgaaacgagtaccttttggattgatcaaaagcgaattgctttggtttttaaaaggagatacgaatatccgctatctattacaaaataaaaaccatatttgggatgaatgggcatttgaacgctacatcaaaagtccagactataatggaccagatatgactgattttggccatagatgtttgacagatcctgaattcaatgaagaatataaaaagcagagcaagcttttttgcgagaagatcctaaccgatgattcctttgctgaaacatacggcgatcttggacacatctacggctatcaatggcgtcactgggaaacaaaagacggtggctttatcgatcaaatcaaacaagtgatcgaagcaatcaaaaagactcctgattctagaagattgatcgtttctgcatggaatccggaagatgttcctagcatggctttgcctccttgtcatacgatgtttcaattttatgttcaagagggacggctaagctgccaattgtatcaacgcagtggggatgtgtttctaggcgttccgttcaacattgcaagttatgcgttgctgactcacctaattgcacatgaaacaggtttagcggttggcgaatttgttcacacattaggagatgctcatctttatatcaatcatatcgaacaaatgaaagaacaattgagccgagaaatacgcgcatttccgactttagttttgaatcaggaaaagcagtcagtatttgattttgagatggaagatatccaattagaaggatatgacccacatccggcgatcaaagctcctatcgctgtttag

SEQ ID NO: 17573 - protein, 324 aa, Enterococcus faecium DO
MGRRLGGKRMEQAYLDLGRKLLEEGHRKEDRTGTGTLSLFGYQMRFDLQKGFPLLTTKRVPFGLIKSELLWFLKGDTNIRYLLQNKNHIWDEWAFERYIKSPDYNGPDMTDFGHRCLTDPEFNEEYKKQSKLFCEKILTDDSFAETYGDLGHIYGYQWRHWETKDGGFIDQIKQVIEAIKKTPDSRRLIVSAWNPEDVPSMALPPCHTMFQFYVQEGRLSCQLYQRSGDVFLGVPFNIASYALLTHLIAHETGLAVGEFVHTLGDAHLYINHIEQMKEQLSREIRAFPTLVLNQEKQSVFDFEMEDIQLEGYDPHPAIKAPIAV

SEQ ID NO: 17574 - DNA, 795 bp, Mesorhizobium sp. BNC1
  CDS (1)..(795): transl_table=11
atgcgccaatatctcgatctgcttgcccatgtgctcgaaaacggcatcgaccgcgaagaccggactggcaccggcacgcgcggcgtcttcgggtatcagatgcgcttcgacctttcggacgggtttccggtgctgaccacgaaaaagctgcatctccggtcgatcatctatgagcttttatggttcctgaagggcgataccaatatccgctaccttcaggagaacggtgtgacgatatgggacgagtgggccgatgagaacggcgacctcgggccagtttatggcgcgcagtggcgatcctggcccgcgccggacgggcggcatatcgaccagattgcgaatcttctcaatggattgagggaaaatccttattcgcggcgtcacatcgtgacggcctggaacccggctgagatcgacgggatggccttgccgccctgccattgccttttccaattccatgtggccgaggggcgtctctcatgccagctctaccagcgctcggcggacatcttccttggcgtgcccttcaacatcgcctcctatgcgctgcttaccatgatgatcgcgcaggttaccggcctgaagccgggcgacttcgttcacacgcttggcgatgcgcatctttacaagaaccacttcgaccaggcgcgcgagcagctgacgcgcacgccgaagccgctgccgacgatgtggatcaacccggaggtggatgatctcttcgcctttggctacgaggattttcgtttggagggctatgtggccgatccgacgatccgcgcgcccatcgccgtatag

SEQ ID NO: 17575 - protein, 264 aa, Mesorhizobium sp. BNC1
MRQYLDLLAHVLENGIDREDRTGTGTRGVFGYQMRFDLSDGFPVLTTKKLHLRSIIYELLWFLKGDTNIRYLQENGVTIWDEWADENGDLGPVYGAQWRSWPAPDGRHIDQIANLLNGLRENPYSRRHIVTAWNPAEIDGMALPPCHCLFQFHVAEGRLSCQLYQRSADIFLGVPFNIASYALLTMMIAQVTGLKPGDFVHTLGDAHLYKNHFDQAREQLTRTPKPLPTMWINPEVDDLFAFGYEDFRLEGYVADPTIRAPIAV

SEQ ID NO: 17576 - DNA, 807 bp, Kineococcus radiotolerans SRS30216
  CDS (1)..(807): transl_table=11
gtggctgagcagcggatcgacacccagtacgaggacctgctgcggcacgtcctcgccaccggcacccccaagtccgaccgcaccggcacgggcacccgcagcgtcttcggccaccagctgcgctacgacctgtccgcggggttcccgctggtcacgaccaagcgcgtgcacttcaagtcgatcgcgctggagctgctgtggttcctgcgcggggacggcaacgtccgctggctgcaggaacgcggggtcaccatctgggacgagtgggccgacgagaacggcgacctcggtcccgtctacggcgtgcagtggcgttcctggccgacgcccgacggccgccacgtggaccagatcgcccaggtcctgcacaccctgcgcacggacccggactcccggcggatggtcgtctcggcgtggaacgtcgccgagctggacaggatggcgctggccccctgccacgcgttcttccagttccacgtggccgacgggaagctgtcctgccagctctaccagcgctccgcggacctcttcctcggggtgccgttcaacatcgccagctacgcgctgctgacgcacctggtggcggccgaggtcggtctcgaggtcggcgacttcgtctggaccggcggcgacgtccacgtctacgacaaccacgtcgagcaggtgaccgagcagctcacccgcaccccgtacccgttcccgcgcctcgcggtccgcccggcggggctgttcgagcacgagtacgaggacttcgaggtcctcgactaccgccaccaccccgcgatcaaggcgcccgtggcggtctga

SEQ ID NO: 17577 - protein, 268 aa, Kineococcus radiotolerans SRS30216
MAEQRIDTQYEDLLRHVLATGTPKSDRTGTGTRSVFGHQLRYDLSAGFPLVTTKRVHFKSIALELLWFLRGDGNVRWLQERGVTIWDEWADENGDLGPVYGVQWRSWPTPDGRHVDQIAQVLHTLRTDPDSRRMVVSAWNVAELDRMALAPCHAFFQFHVADGKLSCQLYQRSADLFLGVPFNIASYALLTHLVAAEVGLEVGDFVWTGGDVHVYDNHVEQVTEQLTRTPYPFPRLAVRPAGLFEHEYEDFEVLDYRHHPAIKAPVAV

SEQ ID NO: 17578 - DNA, 834 bp, Silicibacter sp. TM1040
  CDS (1)..(834): transl_table=11
atgcagcagtatcatgacgctttgcagcatattcttgatcacggggtcgagacgacggatcgtaccggcaccggcactctgtcgtgttttggaatgcagcaacgttatgatctggccgaagggttccctttggtgacgaccaaaaagctgcatctgcgctcgatcatacatgagctgttgtggttcctgtccggggatacaaacataagatatctcaaagagaacggtgtttcgatctgggacgaatgggcggatgaaaacggcgatcttggtccggtctatggctaccagtggcgcaagtttccacgactagagctcgccgagggcacgcttggagatgagccactctatcgggcaggcacggtggatcagatcagcgagctgctggatatgatccgcaagagccccgacagccgccgtctgatcgtcaccgcatggaaccccggcgatgtgccggatatggcgctgccgccctgtcacagcctgtggcaactgcgcatcctgggcggcaagatgcacctgcagctctaccagcgctctgcggatatgttcctcggtgtgccgttcaatatcgcttcatatgctttgttgttgcacatgctcgcccatgtgaccggctatgaggtgggcagttttgtgcatacgatgggggacgcgcatatctattccaaccacatggaacaggtgaaactgcagctctcgcgcagccccaagtccctgccgcagctgcgcattgcgcgcgatgtgtcttctatttttgatttcaaatacgaggattttgaaatcctcggctatgatcccgaccccgtcatcaaggccccggtcgcggtctaa

SEQ ID NO: 17579 - protein, 277 aa, Silicibacter sp. TM1040
MQQYHDALQHILDHGVETTDRTGTGTLSCFGMQQRYDLAEGFPLVTTKKLHLRSIIHELLWFLSGDTNIRYLKENGVSIWDEWADENGDLGPVYGYQWRKFPRLELAEGTLGDEPLYRAGTVDQISELLDMIRKSPDSRRLIVTAWNPGDVPDMALPPCHSLWQLRILGGKMHLQLYQRSADMFLGVPFNIASYALLLHMLAHVTGYEVGSFVHTMGDAHIYSNHMEQVKLQLSRSPKSLPQLRIARDVSSIFDFKYEDFEILGYDPDPVIKAPVAV

SEQ ID NO: 17580 - DNA, 795 bp, Nitrobacter hamburgensis X14
  CDS (1)..(795): transl_table=11
atgaaccagtaccacgatctgctcgaacgtattctcagcgacggcgcggagaagcatgaccgtaccggcaccggaacattgtccatcttcgggcatcagatgcgtttcaatctcgcatcgggatttccgatgctgaccaccaagaagcttccgctcaagtcgatcgtgcatgaactgctctggttcctgaagggcgagaccaacgtcaggtatctgagggagcacggcgtctcgatctgggacgagtgggccgacgccaacggcgatctcggcccggtctacggttcgcagtggcgctcatggcccgcgccggacggacgcagcatcgaccagatcgccaacgtagtcgacatgatcgggcgcagtccggattcgcggcggctgatcgtcagcgcgtggaatccggccgatgtcgacaagatggcgctgccgccgtgccactgcctgtttcagttctatgttgccgacggaaaactgtcgtgccagctttatcagcgctcggcggatgtgtttctgggggtgcccttcaacatcgcgtcctatgcgttgctgacgatgatggtcgcgcaggtcacggggctcaagcccggggacttcgtgcacagcctcggcgacgcgcacctctatttgaatcacctcgatcaggcacggcttcaactcacgcggccgacacgatcgctgccgacgatgacgatcaatcccgaggtgaagagtatcttcgcgttccgctacgaggatttcaaactcgagaactacgatccccatccgcatatcaaggcagaggtcgcggtgtga

SEQ ID NO: 17581 - protein, 264 aa, Nitrobacter hamburgensis X14
MNQYHDLLERILSDGAEKHDRTGTGTLSIFGHQMRFNLASGFPMLTTKKLPLKSIVHELLWFLKGETNVRYLREHGVSIWDEWADANGDLGPVYGSQWRSWPAPDGRSIDQIANVVDMIGRSPDSRRLIVSAWNPADVDKMALPPCHCLFQFYVADGKLSCQLYQRSADVFLGVPFNIASYALLTMMVAQVTGLKPGDFVHSLGDAHLYLNHLDQARLQLTRPTRSLPTMTINPEVKSIFAFRYEDFKLENYDPHPHIKAEVAV

SEQ ID NO: 17582 - DNA, 795 bp, Shewanella denitrificans OS-217
  CDS (1)..(795): transl_table=11
atgaagcaatatctagcattaatggagcacatactggcccatggcgcggtgaaaacagatagaaccggaacgggcactcgttcagtctttggctatcagatgcgcttcgatttaaatcaagggttccccttagttaccactaaaaagtgtcacctacgttctatcatacatgagctgctatggtttctgcagggcgacaccaatgtggcgtatctacatgagcataatgtgagtatttgggatgaatgggccgatgataaaggcaatttgggcccagtgtatggcgctcagtggcgcagctggccgacccaatccggtaaggcggtggatcaaatcagccagatcatagaacaaatcaagactcagccagattcgagacgcctaatcgtctcggcatggaatgtgggcgaactggataaaatggcattagcgccttgtcatgccttgttccagttttatgtcgccgatggcaagttgtcttgccagctgtatcaacgaagctgtgatgtcttcttaggactgccctttaatattgccagttatgccttgttgaccatgatggtcgctcaacagtgcgatctcgccttgggtgattttgtctggactggcggtgatacccacttgtattccaatcatatggaacagactaagctgcagctaagtcgcgagcctcatgccctgccacaaatgaatatattacgtaagccagaatcgatttttgattatcaattcgatgattttgagttggttaattatcagcctcacccacacattaaagcgcctgtggccatctag

SEQ ID NO: 17583 - protein, 264 aa, Shewanella denitrificans OS-217
MKQYLALMEHILAHGAVKTDRTGTGTRSVFGYQMRFDLNQGFPLVTTKKCHLRSIIHELLWFLQGDTNVAYLHEHNVSIWDEWADDKGNLGPVYGAQWRSWPTQSGKAVDQISQIIEQIKTQPDSRRLIVSAWNVGELDKMALAPCHALFQFYVADGKLSCQLYQRSCDVFLGLPFNIASYALLTMMVAQQCDLALGDFVWTGGDTHLYSNHMEQTKLQLSREPHALPQMNILRKPESIFDYQFDDFELVNYQPHPHIKAPVAI

SEQ ID NO: 17584 - DNA, 852 bp, Shewanella frigidimarina NCIMB 400
  CDS (1)..(852): transl_table=11
atgaaacagtatttagacctgtgtaaacgcattgtcgatgaaggcgagtgggttaataacgcacgaacaaacaaaaagtgcctaactgtcattaatgccgacttagtttatgatgttggtaacaatcaatttcctttagtgaccacacgtaaaagcttctggaagtctgccatagccgagatcttaggatatttacgtggctaccaaaatgcggccgattttagagctttaggcactaaaacatgggacgccaatgccaatgaaaaccaagcatggctagataacccaaatcgtaaaggtcctgatgatatggggctgatatacggggcgttagggcgtgcatttccaaagcctgatggtggtcatgtcgatttactgcaacaaatcgtcgacgacctcagtaatggtatagataaccgcggtgagattttaaccttctatcatccaggagcatttgacttaggttgcttgcgaccatgtatgtacgaacaccatttttcattactcggtgatactttgtacctcaacagcacacagcgcagttgtgatgttccactagggttaaacttcaacatggtacaagtatatgtattacttgcgttaatggcccagattactggccataaacctggtaaggcataccataagatagtcaacgctcatatttacgaagaccaacttgaacccatgcgggatgtccagctcgcgcgcgaaccgtttgcatcgcctaagctaatcatcaatccaaaaattaaaaccctaaaagacatcgaaacttgggtaaccttggatgactttagcgttgaagattatcaacatcacgatgcgattaaataccctttcgcagtgtaa

SEQ ID NO: 17585 - protein, 283 aa, Shewanella frigidimarina NCIMB 400
MKQYLDLCKRIVDEGEWVNNARTNKKCLTVINADLVYDVGNNQFPLVTTRKSFWKSAIAEILGYLRGYQNAADFRALGTKTWDANANENQAWLDNPNRKGPDDMGLIYGALGRAFPKPDGGHVDLLQQIVDDLSNGIDNRGEILTFYHPGAFDLGCLRPCMYEHHFSLLGDTLYLNSTQRSCDVPLGLNFNMVQVYVLLALMAQITGHKPGKAYHKIVNAHIYEDQLEPMRDVQLAREPFASPKLIINPKIKTLKDIETWVTLDDFSVEDYQHHDAIKYPFAV

SEQ ID NO: 17586 - DNA, 1500 bp, Cryptosporidium parvum
  CDS (1)..(1500)
atgagtaaaaagaacgtttcaattgttgtggcagcttctgttttgagtagaggaataggaattaacggacaattaccttggtctatatctgaggatttgaaatttttttcaaagataactagtaataattgtgactcgaataagaagaatgcactaattatgggaagaaaaacatgggattcaattggaagaagacctcttaaaaatagaaaaatagtcgttatttcctctagcttaccacaagatgaagccgatcctaatgttattgtatttagaaaccttgaagattcaataaagaatcttatgaatgatgacacaattgagaatatttttgtctgtggtggtgaatccatatacagggatgctttaaaggataactttgtagatagaatatacttaacaagggtggcactagaagatatagaatttgacacttatttcccagaaatacctgagacattcttaccagtatatatgtctcagacattctgtactaagaatatctcttatgattttatggtttttgaaaaacaagaaaaaaaaactttgcaaaattgtgaccctgtaagaggtcaattaaagtccatagatgatactgttgatcttcttggtgaaatatttgggattagaaaaatgggaaatagacacaagtttccaaaagaagaaatctacaacactccaagtattcgattcggaagagaacattatgagtttcagtacctagaccttctttctagggtcttagagaatggagcttatagagaaaataggacaggcattagtacatattcaatatttgggcagatgatgagatttgatatgagagaatcttttccacttttgactacaaaaaaagttgcaatcaggtccatttttgaggaattaatatggtttattaagggagatactaatggaaatcatttgattgagaaaaaggtttatatttggtcaggaaatggctcgaaagaatatttggaaagaattggtttagggcatagagaggagaatgatttgggcccgatctatggttttcagtggagacattacaatggagagtacaaaacgatgcatgatgattatactggagttggagttgatcagcttgcaaaacttattgagaccttaaagaataacccaaaggatagaagacatatactaacagcctggaatccatctgctctatctcaaatggctcttccgccttgccatgtgctttctcagtactatgttaccaatgataattgtcttagttgtaacctttatcaaaggagttgtgacttgggattaggatctccatttaacattgcatcctatgccatacttaccatgatgcttgctcaagtttgtggttatgaaccaggtgagcttgctatttttattggagatgcccatatctatgaaaatcacctaacacaattaaaagaacaattaagccgcactccacgtccatttccgcaactcaaattcaagagaaaagttgaaaatattgaagatttttag

SEQ ID NO: 17587 - protein, 499 aa, Cryptosporidium parvum
MSKKNVSIVVAASVLSRGIGINGQLPWSISEDLKFFSKITSNNCDSNKKNALIMGRKTWDSIGRRPLKNRKIVVISSSLPQDEADPNVIVFRNLEDSIKNLMNDDTIENIFVCGGESIYRDALKDNFVDRIYLTRVALEDIEFDTYFPEIPETFLPVYMSQTFCTKNISYDFMVFEKQEKKTLQNCDPVRGQLKSIDDTVDLLGEIFGIRKMGNRHKFPKEEIYNTPSIRFGREHYEFQYLDLLSRVLENGAYRENRTGISTYSIFGQMMRFDMRESFPLLTTKKVAIRSIFEELIWFIKGDTNGNHLIEKKVYIWSGNGSKEYLERIGLGHREENDLGPIYGFQWRHYNGEYKTMHDDYTGVGVDQLAKLIETLKNNPKDRRHILTAWNPSALSQMALPPCHVLSQYYVTNDNCLSCNLYQRSCDLGLGSPFNIASYAILTMMLAQVCGYEPGELAIFIGDAHIYENHLTQLKEQLSRTPRPFPQLKFKRKVENIEDF

SEQ ID NO: 17588 - DNA, 879 bp, Bacteriophage beta
  CDS (1)..(879): transl_table=11
ttggcttatgcagatttagtatattcaaatgttgtaaaagaaattttggatcatggtatatgggataaagatcaagatgttagaactaaatgggcagatggtacgccagcttatacaaagagtgttatttctactcagatgaagtttgataataaggaagtaccgatcctaacacaaaaaagagtagcttggaaaaccgcaattaaagagattcttgctttttggaaagacaaagaatatcgcttcgattattttcacaaacacaatattcacatttgggatgaatgggaaataaaagatggaaaatggaagggaacaattggcccaagttatggatatcaaatgggaaaactagttcgaaaaggagaactattagacattgtccatggtgaacctacttataaaatgttagatcaagtagactacttacttgatcaacttaacacaaatccatcaagtcgaagacatattacatctttatggaacattcatgaccttgatgaaatggcactaaatccttgtgtttggaatactcaatggcttgtaaaagaaggaagtcttcatttgattgttggagtcccgagtaatgatatgggacttggcaatccattcaatgttttccagtactatgttcttcaaagaatgattgctcaagtaacaggatatgaaatcggtacattgactttcaatatcaatgatgctcatatttacgagagacatattgaacctttagaaaaacaaatcagtttgccttcatacccagctccaattttacgtatcaatccagaaattaaaaacttttatgatttcacaattgatgattttgatctcgttggttatgaacatggccctactatttctatggaagtggcaatctaa

SEQ ID NO: 17589 - protein, 292 aa, Bacteriophage beta
MAYADLVYSNVVKEILDHGIWDKDQDVRTKWADGTPAYTKSVISTQMKFDNKEVPILTQKRVAWKTAIKEILAFWKDKEYRFDYFHKHNIHIWDEWEIKDGKWKGTIGPSYGYQMGKLVRKGELLDIVHGEPTYKMLDQVDYLLDQLNTNPSSRRHITSLWNIHDLDEMALNPCVWNTQWLVKEGSLHLIVGVPSNDMGLGNPFNVFQYYVLQRMIAQVTGYEIGTLTFNINDAHIYERHIEPLEKQISLPSYPAPILRINPEIKNFYDFTIDDFDLVGYEHGPTISMEVAI

SEQ ID NO: 17590 - DNA, 1734 bp, Daucus carota
  CDS (1)..(1734)
atgtataaagccctaatttcatccacatttcctcttctaaactcactttcacaaactttggctctccgatcggcttctttgtacttgcttaccaattgcaacttatcatcatcaaacttctctcattgccatcggtttactacatatatggctagcgaacgtctcgcaaatcctactaatggaagtggcattacacgccctgatccacaaagaacttatcaggttgtggttgctgcaacccaaaatatgggtatcggtaaggatggtaaattgccctggaggttaccttctgacatgaaatttttcaaggatgtcaccatgactacatcagatcctttgaaaaggaatgcagtcataatgggtaggaaaacttgggaaagtattcccattcaacatcgccctctgccaggacgtcttaatgttgttttgactcgttctgggagttttgatattgcaactgtcgaaaatgtcgtaatatgtggtagcatgatttctgctttggaattattagcaggatctccttattgtgtttcagttgagaaggtttttgtcattgggggtggccagatatatagggaagctctcaatgctcctggatgtgatgcagtccacatcactgaaattgaagaacacatagaatgtgataccttcattcctcttctcgatgaatcagtttttcagccatggtactcatcattcccattggtggagaacaaaattcgttattgtttcacgacttatgttcgtgtgaggaattctgttgcggagctcacaagtcagaccaacggctgttcatctgatagtaaatcagattctggtaattttgaaattcagaatttctcttttcttcccaagacagtttttgagaaacatgaggagtatttgtatctgggattggttgagaatatcatttctaatggtgtgacaaagaatgataggacacgtactggtactgtctctatatttggttgccagatgcggtttaatttgcgcaaatcttttccactcctcacaactaagaaagtgttttggaggggagttgttgaggaactactgtggttcattagtggctcaactaatgctaagattctaaaagagaagggcgttaatatttgggaaggcaatggatcaagggagtatcttgacagtattggtttgacggatagagaagaaggtgacttggggcctatatatggttttcagtggagacactttggtgcaaggtatactgatatgcatgctgactactcaggccagggatttgatcagttgctagatgttatttcaaagataaaaaataatcctgatgataggaggatcattcaatcagcttggaatccatctgatctcaggctaatggcacttccaccctgtcacatgtttgcacagttctatgtagccaatggcgagttatcttgtcaaatgtatcagcgctctgctgatatgggtctcggtgttccattcaacattgcagcatatgcacttttgacatgcatgattgctcatgtttgtgacctggttcctggagactttgttcattctattggtgatgctcatgtctactcgaaccacctgtcagacctcttcgagaccagcttcagaatgttgcctaagacctttccggttttgaagatcaattctggagaaaaggacattgactcatttgaggctgctgatttcaaactcattggttatgatccgcaccagaaaatcgaaatgaaaatggcagtataa

SEQ ID NO: 17591 - protein, 577 aa, Daucus carota
MYKALISSTFPLLNSLSQTLALRSASLYLLTNCNLSSSNFSHCHRFTTYMASERLANPTNGSGITRPDPQRTYQVVVAATQNMGIGKDGKLPWRLPSDMKFFKDVTMTTSDPLKRNAVIMGRKTWESIPIQHRPLPGRLNVVLTRSGSFDIATVENVVICGSMISALELLAGSPYCVSVEKVFVIGGGQIYREALNAPGCDAVHITEIEEHIECDTFIPLLDESVFQPWYSSFPLVENKIRYCFTTYVRVRNSVAELTSQTNGCSSDSKSDSGNFEIQNFSFLPKTVFEKHEEYLYLGLVENIISNGVTKNDRTRTGTVSIFGCQMRFNLRKSFPLLTTKKVFWRGVVEELLWFISGSTNAKILKEKGVNIWEGNGSREYLDSIGLTDREEGDLGPIYGFQWRHFGARYTDMHADYSGQGFDQLLDVISKIKNNPDDRRIIQSAWNPSDLRLMALPPCHMFAQFYVANGELSCQMYQRSADMGLGVPFNIAAYALLTCMIAHVCDLVPGDFVHSIGDAHVYSNHLSDLFETSFRMLPKTFPVLKINSGEKDIDSFEAADFKLIGYDPHQKIEMKMAV

SEQ ID NO: 17592 - DNA, 972 bp, Pseudomonas fluorescens
  CDS (1)..(972): transl_table=11
atgaagcaatatcttgatctggtggcccacgtcatcaacaacggcaccaagcaggccaaccgcaccggtgtgaacaccatcagcttccccggggccatgctgcgctacgacctcaaggaaggtttcccggccatcaccacccgcaagatggccttcaagtcggccatcggcgagatggtcggcttcctgcgcggggtgaacaacgccgccgagtttcgtgcgctgggctgcaaggtctgggaccagaacgccaacgaaaacgcccagtggctggccaacccgttccgccagggcgacgacgacctgggcgagatctacggcgtgcagtggcgcaagtggccggcctacaaacagatcaagaccagcaaccaggcggccatcgacctggcgctgagccagggctaccggcagatcgccgcgggcgaggaagacggccagggctacgtggtgctgtacaaggccatcgaccaggtgcgccagtgcgtcgacaccatcatcaacgacccgggcagccggcggatcctgttccacggctggaactgcgcccagctggatgaaatggccttgccgccgtgccacctgctgtaccagttccaccccaatgtccagacccgggaaatctccctgaccctctacatccgctccaacgacctgggcctgggcacgccgttcaacctcaccgagggtgctgcgctgctgagcctgatcggccgcctgaccggctacacgccgcgctggttcacctatttcatcggtgatgcccacgtctatgaaaaccatctggacatgctcaacgaacagctcaagcgcgagccgttcccgatgcccaagctggtgatttccgagcgtgtgccggagttcgccaagaccggcgtctaccagccggagtggctggagctgatcgaaccgagcgacttctccctggaaggctatgagcaccacgcgcccatgacggcgccgatggcggtctga

SEQ ID NO: 17593 - protein, 323 aa, Pseudomonas fluorescens
MKQYLDLVAHVINNGTKQANRTGVNTISFPGAMLRYDLKEGFPAITTRKMAFKSAIGEMVGFLRGVNNAAEFRALGCKVWDQNANENAQWLANPFRQGDDDLGEIYGVQWRKWPAYKQIKTSNQAAIDLALSQGYRQIAAGEEDGQGYVVLYKAIDQVRQCVDTIINDPGSRRILFHGWNCAQLDEMALPPCHLLYQFHPNVQTREISLTLYIRSNDLGLGTPFNLTEGAALLSLIGRLTGYTPRWFTYFIGDAHVYENHLDMLNEQLKREPFPMPKLVISERVPEFAKTGVYQPEWLELIEPSDFSLEGYEHHAPMTAPMAV

SEQ ID NO: 17594 - DNA, 1569 bp, Theileria parva
  CDS (1)..(1569)
atggcggaagattactctggattacctttcgttaaattgttagtagcgataacgccagaaaatggaattggaatcagtaatggactaccatggccacacatcaaaagggactttctttttatgttcagggcaacgacttatgttgatccagaattcaaagaaaagcacccaggagctcaaaatgtaataatcattggtagaaagacatacgatagccttccagaaggaacttttccactgaagaacagaatcaacgttgttatatcaagaaatcttactgaggttccaggtggattagtatttccttcaatgccagctgcgattcgtcacgttactgaacatctcaactactataagatcttcataatgggtatttttcatctaaatataaaacatttaggaggaagctacgtctatagggatgctcttgatgcaagaattgttgataaaatgtacgttacaagggtaaacaagaattacaagtgtgaagtgttcttcccaaagatccctgatgacttcgttataactggaattagtaaaacgttctcaagtgaagacacaacatatgactttgtgacgtacgaaagaaaagatttaattgttgatgatcgcgttaaaaaaacatttgaagagatgttgttgactggagagaaatttgcaactaaggatcaattggtgaaagcttgcccatcactgaaggttagatacagccaggaacttcagtatcttgaaattctagctgacatcttaaacactggatatcacaaaaagaatagaacaggcgtggattgtattgcaaaattcggttaccaaatgaggtttgacctttcagaatcatttccgttattaacaacaaagaaagtcttcttaagaggaatcattgaggagcttatttggtttattaaaggtagcacaaacggcaatgaattgctgaaaaagaatgtaagaatctgggagctgaatggagcaagaagttttctggataacctgggattttttgatcgcgaagaacatgacctaggacctgtttacggattccaatggcgtcatttcggtgccaaatacgtagatatgcacacagactacagtaaccaaggaattgaccagctatcactggtcattgataggatcaagaataacccagataacagaagattgattgtgtgttcgtggaacgtagcagacctgtcaaagatggcattgcctccatgtcatctgctattccaattttttgtagcagatggaacattgtcgtgtatgatgcaccaaaggtcatgtgatatgggactaggagtaccatttaacattgcatcatactcattactgacctacatgatagcccaaatatgtggactaaaaccgggagaatttgtacacaaccttggagatgcccacatatacaataaccatattgacgcaatcaaggaacagattagtagagttccttatccattcccaaccctaagactaaacaaagatataacaaggattgaagacttcacaatcgatgacattaaggtggaaaattaccgttcacacccggtaatcaagatggagatggctgcataa

SEQ ID NO: 17595 - protein, 522 aa, Theileria parva
MAEDYSGLPFVKLLVAITPENGIGISNGLPWPHIKRDFLFMFRATTYVDPEFKEKHPGAQNVIIIGRKTYDSLPEGTFPLKNRINVVISRNLTEVPGGLVFPSMPAAIRHVTEHLNYYKIFIMGIFHLNIKHLGGSYVYRDALDARIVDKMYVTRVNKNYKCEVFFPKIPDDFVITGISKTFSSEDTTYDFVTYERKDLIVDDRVKKTFEEMLLTGEKFATKDQLVKACPSLKVRYSQELQYLEILADILNTGYHKKNRTGVDCIAKFGYQMRFDLSESFPLLTTKKVFLRGIIEELIWFIKGSTNGNELLKKNVRIWELNGARSFLDNLGFFDREEHDLGPVYGFQWRHFGAKYVDMHTDYSNQGIDQLSLVIDRIKNNPDNRRLIVCSWNVADLSKMALPPCHLLFQFFVADGTLSCMMHQRSCDMGLGVPFNIASYSLLTYMIAQICGLKPGEFVHNLGDAHIYNNHIDAIKEQISRVPYPFPTLRLNKDITRIEDFTIDDIKVENYRSHPVIKMEMAA

SEQ ID NO: 17596 - DNA, 1572 bp, Theileria annulata
  CDS (1)..(1572)
atgtcagaagattatagcggattaccttttgttaaaatattagtggctattactccagaaaatggaattggtatcaaaaatggattaccgtggccacacatcaagcgagactttctgtttatgttcagagcaacaacttatgttgaccctgaatttaaagaaaaacaccctggagctgaaaatgtaataatcattggtagaaatacatatgatagccttccagaatcagtatttcctcttaaaaacagaatcaacatcgttatctcgagaaatcttacagaggttcctggtggattggtattctcatcaattccatctgctattaggcatgtaacagaaaatctaaactactataaaatattcatcatgggtattttcaatgtagttgttttaaaatatttaggaggaagccatgtatatagagaagttctaaatgctaaaattgtagataaaatgtacgtcacaagagtaaataagaactatgagtgtgaagtgttctttccaaaaatacctgatgactttgtaataacaggaattagtaaaacattttctagcgaggatacaagttatgactttgtgctatacgagaggaaggatctaattgaggaaatgaaagagaaaaaaacatttgaacagatgttgttgacaggggagaaatttgcagttaaggaaccattggttaaagcatgccctagattgaaggttagatacagccaagagctccagtatcttgaaattctagcagatatcttaaataacggatatcataaaaagaatagaacaggagttgattgcattgccaaattcggataccaaatgaggttcgacctgtcacaatcatttccattattaacaacaaagaaagtcttcttaagaggaatcattgaggaacttatttggttcatcagaggcagtacaaatggtaacgagttattaaaaaagaacgtaagaatatgggagttaaatggagcgagaagttttctagataacctgggattctatgatcgtgaagaacaagatttaggacctgtttacggattccaatggcgtcattttggagccaaatacatcgatatgcacgcagattacactgatcaaggaatagaccagttatcattggtaattgaaaggatcaagaataacccagataacagaagattaattgtatgttcatggaatgtggcagacttgtcaaagatggcattaccgccatgtcatctattattccaattttttgtagctgatgggactttgtcatgtatgatgcatcagaggtcatgtgatatgggacttggagttccatttaacatagcatcatactcattattaacatacatgatcgcccacatttgcggactaaaaccgggagaatttgttcataaccttggtgatgctcacatatataataaccatattgacgcaataaaagaacaaatcagtagagtaccatatccattcccaacacttaaactaaataaagaaattacaagaattgaagactttacaattgatgacattaaggtggaaaactataggtgtcacccgttaatcaagatggagatggctgcataa

SEQ ID NO: 17597 - protein, 523 aa, Theileria annulata
MSEDYSGLPFVKILVAITPENGIGIKNGLPWPHIKRDFLFMFRATTYVDPEFKEKHPGAENVIIIGRNTYDSLPESVFPLKNRINIVISRNLTEVPGGLVFSSIPSAIRHVTENLNYYKIFIMGIFNVVVLKYLGGSHVYREVLNAKIVDKMYVTRVNKNYECEVFFPKIPDDFVITGISKTFSSEDTSYDFVLYERKDLIEEMKEKKTFEQMLLTGEKFAVKEPLVKACPRLKVRYSQELQYLEILADILNNGYHKKNRTGVDCIAKFGYQMRFDLSQSFPLLTTKKVFLRGIIEELIWFIRGSTNGNELLKKNVRIWELNGARSFLDNLGFYDREEQDLGPVYGFQWRHFGAKYIDMHADYTDQGIDQLSLVIERIKNNPDNRRLIVCSWNVADLSKMALPPCHLLFQFFVADGTLSCMMHQRSCDMGLGVPFNIASYSLLTYMIAHICGLKPGEFVHNLGDAHIYNNHIDAIKEQISRVPYPFPTLKLNKEITRIEDFTIDDIKVENYRCHPLIKMEMAA

SEQ ID NO: 17598 - DNA, 1500 bp, Plasmodium chabaudi
  CDS (1)..(1500)
atgaatactgatggaataccctccgttgataagttacaaaatattgtagtaatgggaaaagcaagttgggaaagcatcccctcaaaatttaagccattacaaaatcgaataaatattatattgtctagaacattgaaaaaagaagatcttgcaaaagaatataataatgttattataattaatagtgtggatgatttatttcctattttaaaatccataaaatattataaatgttttgttataggaggtgcatctgtttataaagaatttttagatcgtaatttaataaaaaaaatatattttacaagaataaataatgcttatacgtgtgatgttttatttccagatatcaatgaagatttatttaaaataacatcaattagtgatgtatatagtagtaataacacgactttagattttgtaatttatagtaagacaaaagaaatacctgaagaaattaatcccaacgatgaaatatttaataacgcatttttaggtgtgtgtgatgaaaaaaatacaaattttgatgatgaagatgattatacatatttcagttttaataaacataaagataatattaaaaaaaattcagagcatgctcatcattttaaaatatataatagtataaaatataaacatcatcctgaatatcaatatttaaatattatatatgatataataatgcatggaaataaacaagatgatagaacaggtgttggtgtattaagtaaatttggatatatgatgaaatttaatttaagtgaatattttccattattaacaacaaaaaaattatttgtaagaggtatcattgaagagttgctatggtttataaggggagaaacaaatggaaatacattattagaaaaaaacgtaagaatatgggaagctaatgggacaagagagtttttagataataggaaattatttcatagagaagttaatgacttaggtccaatttacggatttcaatggaggcactttggtgctgaatatacagatatgcatgctgattataaagataaaggtgttgatcagttaaaaaatattataaatttaattaaaaacgatccgacatgtagacgaattattttatgtgcatggaatgtaaaagatttagatcaaatggcattacctccttgtcatattttatgtcaattttatgtttttgatggaaaattatcatgtattatgtatcaaagatcttgtgatttaggtcttggtgttccattcaatattgcttcctattctatatttacatatatgatagcacaagtatgtaatttacaaccagctgaatttatacatgtattgggaaatgctcatgtttataataatcatgttgaaagcttaaaagtccagttaaatagaacaccctatcctttccctactcttaaattaaatccggaaattaaaaatatcgaggattttacaatttcagattttactgtacaaaattatgtccatcacgataaaatcagtatggatatggcagcttaa

SEQ ID NO: 17599 - protein, 499 aa, Plasmodium chabaudi
MNTDGIPSVDKLQNIVVMGKASWESIPSKFKPLQNRINIILSRTLKKEDLAKEYNNVIIINSVDDLFPILKSIKYYKCFVIGGASVYKEFLDRNLIKKIYFTRINNAYTCDVLFPDINEDLFKITSISDVYSSNNTTLDFVIYSKTKEIPEEINPNDEIFNNAFLGVCDEKNTNFDDEDDYTYFSFNKHKDNIKKNSEHAHHFKIYNSIKYKHHPEYQYLNIIYDIIMHGNKQDDRTGVGVLSKFGYMMKFNLSEYFPLLTTKKLFVRGIIEELLWFIRGETNGNTLLEKNVRIWEANGTREFLDNRKLFHREVNDLGPIYGFQWRHFGAEYTDMHADYKDKGVDQLKNIINLIKNDPTCRRIILCAWNVKDLDQMALPPCHILCQFYVFDGKLSCIMYQRSCDLGLGVPFNIASYSIFTYMIAQVCNLQPAEFIHVLGNAHVYNNHVESLKVQLNRTPYPFPTLKLNPEIKNIEDFTISDFTVQNYVHHDKISMDMAA

SEQ ID NO: 17600 - DNA, 942 bp, Homo sapiens
  CDS (1)..(942)
atgcctgtggccggctcggagctgccgcgccggcccttgccccccgccgcacaggagcgggacgccgagccgcgtccgccgcacggggagctgcagtacctggggcagatccaacacatcctccgctgcggcgtcaggaaggacgaccgcacgggcaccggcaccctgtcggtattcggcatgcaggcgcgctacagcctgagagatgaattccctctgctgacaaccaaacgtgtgttctggaagggtgttttggaggagttgctgtggtttatcaagggatccacaaatgctaaagagctgtcttccaagggagtgaaaatctgggatgccaatggatcccgagactttttggacagcctgggattctccaccagagaagaaggggacttgggcccagtttatggcttccagtggaggcattttggggcagaatacagagatatggaatcagattattcaggacagggagttgaccaactgcaaagagtgattgacaccatcaaaaccaaccctgacgacagaagaatcatcatgtgcgcttggaatccaagagatcttcctctgatggcgctgcctccatgccatgccctctgccagttctatgtggtgaacagtgagctgtcctgccagctgtaccagagatcgggagacatgggcctcggtgtgcctttcgacatcgccagctacgccctgctcacgtacatgattgcgcacatcacgggcctgaagccaggtgactttatacacactttgggagatgcacatatttacctgaatcacatcgagccactgaaaattcagcttcagcgagaacccagacctttcccaaagctcaggattcttcgaaaagttgagaaaattgatgacttcaaagctgaagactttcagattgaagggtacaatccgcatccaactattaaaatggaaatggctgtttag

SEQ ID NO: 17601 - protein, 313 aa, Homo sapiens
MPVAGSELPRRPLPPAAQERDAEPRPPHGELQYLGQIQHILRCGVRKDDRTGTGTLSVFGMQARYSLRDEFPLLTTKRVFWKGVLEELLWFIKGSTNAKELSSKGVKIWDANGSRDFLDSLGFSTREEGDLGPVYGFQWRHFGAEYRDMESDYSGQGVDQLQRVIDTIKTNPDDRRIIMCAWNPRDLPLMALPPCHALCQFYVVNSELSCQLYQRSGDMGLGVPFDIASYALLTYMIAHITGLKPGDFIHTLGDAHIYLNHIEPLKIQLQREPRPFPKLRILRKVEKIDDFKAEDFQIEGYNPHPTIKMEMAV

SEQ ID NO: 17602 - DNA, 1584 bp, Trypanosoma brucei
  CDS (1)..(1584)
atgctcagtcttacgcgtatcctccgcaagaaaattcctgttcatgagttggcggggaaaatttcccgccctcccctgcgacccttctctgttgttgtagcgtcggacgagaagggtgggattggggacggtggtacgatcccctgggaaatacctgaggatatgcaatacttcagaagggtaacgacaaaccttcgggggaaaaatgtaaagccatcgccaagtaaacggaatgctgttgtgatggggcggaaaacatgggacagtcttccaccaaagttccgtccactgtctaaccgccttaatgttgtgctgtcacgaagtgcgacaaaggaacagttgttggctggtatccctgatcccatcaaacgagcggaggctgcgaatgatgtggttgctgtgaacggtgggcttgaagacgcacttcggatgttggtaagtaaggagcacacatcttctatcgaaacggtgttttgcattggtggcgggactatatataaacaagccctttgtgccccatgcgttaatgtgttgcaagctatccaccggacggtggtccgaccagcctcaaattcgtgtagcgttttctttgacatcccagccgcagggacaaagaccctggaaggacttgagttggtgcgggaaagcataacggacgaacgggtatcaaccggagctggcggaaagaaatatcagtttgagaagcttgtcccccgaaacagcgaagaggagcagtatttaaatctcgttggccgcataattgatgagggatgtacgaaatgtgaccgcacgggtgttggtacccgctccctctttggggcccagatgcgtttctctctccgcaacaatcgcctgccattactaaccacgaagcgtgtcttttggcgtggagtatgtgaagagctgttgtggtttcttcggggagaaacaaatgcaaagttgctgagcgacaaggggattcacatatgggatgggaatggctcacgagcattccttgacagtcgtggcttgactgattatgatgagatggacctcggacctgtttatggcttccagtggaggcattttggtgccgactatatttcttgcaaggaggattccgaggggaaaggtgttgatcagattgcaaacattgtgaagtcattgatagagaacccggatgaccgtcgcatgatttgtacagcttggaatccggccgccttgccacgcatggcgctcccaccatgccacatgatggcgcaattctacgtgagcaatggggaactctcatgcatgttgtaccagcggtcatgtgatatgggtcttggcgtccccttcaatattgcttcgtatgcactgcttacattcctcatggcaaaagcttctggacttcggccgggcgaattggtgcacacccttggcgatgcacatgtttacagtaaccatgtggagccgtgtcggaagcaattgaaacgcgtgccccgcccgttccctttcatcgtgttcaaacaagacaaagagttcctggaagactttcaggaaagcgatatagaggtcatcgattattctccgtaccccgtaatttctatggagatggcggtgtag

SEQ ID NO: 17603 - protein, 527 aa, Trypanosoma brucei
MLSLTRILRKKIPVHELAGKISRPPLRPFSVVVASDEKGGIGDGGTIPWEIPEDMQYFRRVTTNLRGKNVKPSPSKRNAVVMGRKTWDSLPPKFRPLSNRLNVVLSRSATKEQLLAGIPDPIKRAEAANDVVAVNGGLEDALRMLVSKEHTSSIETVFCIGGGTIYKQALCAPCVNVLQAIHRTVVRPASNSCSVFFDIPAAGTKTLEGLELVRESITDERVSTGAGGKKYQFEKLVPRNSEEEQYLNLVGRIIDEGCTKCDRTGVGTRSLFGAQMRFSLRNNRLPLLTTKRVFWRGVCEELLWFLRGETNAKLLSDKGIHIWDGNGSRAFLDSRGLTDYDEMDLGPVYGFQWRHFGADYISCKEDSEGKGVDQIANIVKSLIENPDDRRMICTAWNPAALPRMALPPCHMMAQFYVSNGELSCMLYQRSCDMGLGVPFNIASYALLTFLMAKASGLRPGELVHTLGDAHVYSNHVEPCRKQLKRVPRPFPFIVFKQDKEFLEDFQESDIEVIDYSPYPVISMEMAV

SEQ ID NO: 17604 - DNA, 852 bp, Haemophilus parasuis
  CDS (1)..(852): transl_table=11
atgaaacaatatcttgatctctgccaacgtattgtcgaacaaggaaagtgggttgaaaatgaacgtacgggtaagcgttgtttaaccgtgattaacgctgatttaatctacgacgtggcaaagggggaatttccccttgtgactacacgcaaaagtttttggaaagctgcgattgcggaattactcggttatatccgtggttatgataatgccgcagatttccgtcagcttggcacaaaatcgtgggacgcaaatgccaatgaaaatgcagcttggctggcaaacccacatcgcaaaggcgaagatgatatggggctggtttatggtgcggtcggacgaaacttcccgaaagttggcggtggtagcgtcgatttattgcgtcaaattgtcgatgatctgaaacgtggcgtagataatcgtggtgagatttatacgttctatcaccctggggctttccatttaggttgcctacgtccgtgtttacacagccaccatttttcactgttagatggcacgctttatttgaacagtatccaacgctctgccgatgtgccacttggtttaaactggaatatgatccaatgttacacttttcttgcgttaatggcacaaattacaggacaccaagcaggacaagcattccataaaattgtgaatgcgcatatttatgaagatcagctggaattaatgcgagatgtacaactaaagcgcacgccatttaaagctccaacactcaaaatcaaccccgatattaaatccctagaagatttagaaatttgggtaaccttggcggattttgaagttgagggctacgaatatcatccgagtattcagtatccgttttctgtgtag

SEQ ID NO: 17605 - protein, 283 aa, Haemophilus parasuis
MKQYLDLCQRIVEQGKWVENERTGKRCLTVINADLIYDVAKGEFPLVTTRKSFWKAAIAELLGYIRGYDNAADFRQLGTKSWDANANENAAWLANPHRKGEDDMGLVYGAVGRNFPKVGGGSVDLLRQIVDDLKRGVDNRGEIYTFYHPGAFHLGCLRPCLHSHHFSLLDGTLYLNSIQRSADVPLGLNWNMIQCYTFLALMAQITGHQAGQAFHKIVNAHIYEDQLELMRDVQLKRTPFKAPTLKINPDIKSLEDLEIWVTLADFEVEGYEYHPSIQYPFSV

SEQ ID NO: 17606 - DNA, 948 bp, Caenorhabditis briggsae
  CDS (1)..(948)
atgaataaagaaaatattgttcctgaaaccatcgaacttcctagccaggaaaaatctggaaaggaaatcgcgcaacatgtgaatcaagacgaattcaaatacttgaagcaagttgagcaaattttgcaagaaggctctcgtcgagacgatcgtaccggaacgggaaccatctcgatttttggaatgcaatcgaagtatagtttgagaaatgacacaatcccactgctgacaacgaaacgagtctactggaaaggtgttcttgaagagcttctctggttcatttctgggtccaccgatggaaaattattgatggcgaaaaatgtcaagatttgggagaagaacggtgatcgtgcgttccttgacaatttgggattcacgtctcgcgaagaaggagatctcggaccggtttacggattccaatggagacatttcggagctaaatacgtggattgtcatacggattacactggacaaggtattgatcagctagctgaagtcattcgacaaatcaaggaagaaccggacagcagaagaatcattttgtcggcgtggaatccatcggaactcgggcagatggttctaccaccatgtcatacaatgtgccagttctacgtggataacggagagttgtcttgtcagctatatcagcgaagtggagacatgggcctcggagtgccgttcaaccttgccagctatggtcttctgacccatatgattgctaaggtgtgtggattgaaagctggaactcttgtgcacactctcggcgacgcccatgtctactcgaatcatgtggatgcattgaagactcaaatggaacgagaaccgtatgcattcccgaaaattcgattcacacgagacgtcagctcgatcgacgatttcacttctgacatgattgttctcgaggactacaagtgccacggaaagattgtcatggatatggctgtttaa

SEQ ID NO: 17607 - protein, 315 aa, Caenorhabditis briggsae
MNKENIVPETIELPSQEKSGKEIAQHVNQDEFKYLKQVEQILQEGSRRDDRTGTGTISIFGMQSKYSLRNDTIPLLTTKRVYWKGVLEELLWFISGSTDGKLLMAKNVKIWEKNGDRAFLDNLGFTSREEGDLGPVYGFQWRHFGAKYVDCHTDYTGQGIDQLAEVIRQIKEEPDSRRIILSAWNPSELGQMVLPPCHTMCQFYVDNGELSCQLYQRSGDMGLGVPFNLASYGLLTHMIAKVCGLKAGTLVHTLGDAHVYSNHVDALKTQMEREPYAFPKIRFTRDVSSIDDFTSDMIVLEDYKCHGKIVMDMAV

SEQ ID NO: 17608 - DNA, 957 bp, Brachydanio rerio
  CDS (1)..(957)
atgcccgacacggcagtggaagtgacaaatggacattgcgttaacggagaaagcaagaaagaaacaaacggagggaaaaaggagttttctctgttttgcgacgagcgcgggtatttgagtctggtggagtttattttgcagaatggagcaaagaaaggcgacaggacaggcacaggagtgatctctgtgttcgggacacaagccagatacagtctcagagatcagtttccgttgctgacgaccaaaagagttttctggaaaggcatattggaggagctgctgtggttcatcaagggttcaacaaacgccaaagatctgtcggagaagggtgtgaggatttgggatgctaacggctccagagagtttctggataagaacggattcaccgatcgggaggaaggagatctgggtccagtttatggatttcagtggaggcattttggagccgaatacaaagatatgcatactgattattctggagaaggagtcgatcagttacagaaagttattgacaccatcaagtcaaacccagaggaccgaaggatcatcatgtgtgcctggaatcctaaagatctccctctgatggcgctgccgccctgtcatgcgttgtgtcagttttacgtgtcgaacggtgagttgtcatgtcagctgtaccagcgatcgggagacatcggtctcggtgtcccattcaacatcgccagctacgccctgctgacctacatgatcgcccacatcactggactcaagcctggggatttcgttcatacattaggtgacgcccacatctacaccaatcacatcgagcctttaaaagagcagattcagcgagagccgcgtccgttccccaaactccggattaaacgcaaagttgaacaaattaatgatttctgtgctgaagattttgagatctatgattataacccacatcctacaatcaaaatgcaaatggctgtttag

SEQ ID NO: 17609 - protein, 318 aa, Brachydanio rerio
MPDTAVEVTNGHCVNGESKKETNGGKKEFSLFCDERGYLSLVEFILQNGAKKGDRTGTGVISVFGTQARYSLRDQFPLLTTKRVFWKGILEELLWFIKGSTNAKDLSEKGVRIWDANGSREFLDKNGFTDREEGDLGPVYGFQWRHFGAEYKDMHTDYSGEGVDQLQKVIDTIKSNPEDRRIIMCAWNPKDLPLMALPPCHALCQFYVSNGELSCQLYQRSGDIGLGVPFNIASYALLTYMIAHITGLKPGDFVHTLGDAHIYTNHIEPLKEQIQREPRPFPKLRIKRKVEQINDFCAEDFEIYDYNPHPTIKMQMAV

SEQ ID NO: 17610 - DNA, 861 bp, Bacteriophage T6
  CDS (1)..(861): transl_table=11
atgaaacaataccaagatttaattaaagacatttttgaaaatggctacgaaaccgatgaccgaacaggcacaggaacaattgctttgttcggtactaaattacgttgggatttaactaaaggttttcctgcggtaacaactaagaagctcgcctggaaagcttgcattgctgagctaatatggtttttatcaggaagcacaaatgtcaatgatttacgattaattcagcatgattcgttaatccaaggcaaaacagtctgggatgaaaattacgaaaatcaagcaaaagatttaggataccatagcggtgaacttggtccaatttatggaaaacaatggcgcgattttggcggtgtagaccaaattatagaagttgttgatcgtattaaaaaattgccaaatgataggcgtcaaattgtttctgcatggaatccagctgaacttaaatatatggcattaccgccttgtcatatgttctatcagtttaatgtgcgtaacggctatttggatttgcagtggtatcaacgatcagtagatgttttcttgggtctaccatttaatattgcatcatacgctgcgttagttcatattgcagctaagatgtgtaatcttattccaggagatttgatattttctggtggtaatactcatatctatatgaatcacgtagaacaatgtaaagaaattttacgtcgtgaacctatggatttatgcgaattacaattaaaatttccagatgaatttgatgaatggaacacagaatcgcaggtattttggttgagtcaattcgcaaagccgcataattttgttcttaacaactatgtatctcacccgccaattaaaggaaagatggcggtgtaa

SEQ ID NO: 17611 - protein, 286 aa, Bacteriophage T6
MKQYQDLIKDIFENGYETDDRTGTGTIALFGTKLRWDLTKGFPAVTTKKLAWKACIAELIWFLSGSTNVNDLRLIQHDSLIQGKTVWDENYENQAKDLGYHSGELGPIYGKQWRDFGGVDQIIEVVDRIKKLPNDRRQIVSAWNPAELKYMALPPCHMFYQFNVRNGYLDLQWYQRSVDVFLGLPFNIASYAALVHIAAKMCNLIPGDLIFSGGNTHIYMNHVEQCKEILRREPMDLCELQLKFPDEFDEWNTESQVFWLSQFAKPHNFVLNNYVSHPPIKGKMAV

SEQ ID NO: 17612 - DNA, 861 bp, Bacteriophage U5
  CDS (1)..(861): transl_table=11
atgaaacaataccaagatttaattaaagacatttttgaaaatggctacgaaaccgatgaccgaacaggcacaggaacaattgctttgttcggtactaaattgcgttgggatttaaccaaaggttttcctgcagtaacaactaaaaagctcgcctggaatgcatgcattgctgagcttctatggtttatttccggttctaccaatgttaatgatttacgtcttcgcactcatggtagtcttattcaaggtaaaactatttgggacgataactatgaaaaccaggctaaagacctaggatatcatagtggtgaacttggtcctatatacggtaaacaatggcgtgatttcggtggtgtggatcaattagttgaaactattgatcgtattaaaaaattaccaactgatcgacgtcaaatcgtttcagcatggaatccagctgaaatcaatcaaatggcattaccgccctgtcatatgttctatcagtttaatgtgcgtaatggttatcttgatttacaatggtatcaacgctcagtagatgttttcttgggtcttccattcaacattgcctcgtacgctgccttgacacatattgtggctaagatgtgtaatcttatcccaggagatttgatattttctggtggtaatactcacatctatatgaatcatactgcgcaatgtaaagaaattttacgtcgtgagcctaaagaactgtgtgaacttaaaattgattggcctatagagtttggaaattgtgacaccgaaacacagctttactggttaactgaatacatgaaaccgaaagattttatccttgaaaattatgaatcgcatccagcaattaaagggaaaatggcaatatga

SEQ ID NO: 17613 - protein, 286 aa, Bacteriophage U5
MKQYQDLIKDIFENGYETDDRTGTGTIALFGTKLRWDLTKGFPAVTTKKLAWNACIAELLWFISGSTNVNDLRLRTHGSLIQGKTIWDDNYENQAKDLGYHSGELGPIYGKQWRDFGGVDQLVETIDRIKKLPTDRRQIVSAWNPAEINQMALPPCHMFYQFNVRNGYLDLQWYQRSVDVFLGLPFNIASYAALTHIVAKMCNLIPGDLIFSGGNTHIYMNHTAQCKEILRREPKELCELKIDWPIEFGNCDTETQLYWLTEYMKPKDFILENYESHPAIKGKMAI

SEQ ID NO: 17614 - DNA, 861 bp, Bacteriophage RB3
  CDS (1)..(861): transl_table=11
atgaaacaataccaagatttaattaaagacatttttgaaaatggctatgaaaccgatgaccgaacgggcacaggaacaattgctttgttcggtactaaattacgctgggatttaagtaaaggttttcctgcagtaacaactaaaaagctcgcttggaaagcttgcattgctgagctactttggttcttatcaggaagtactaacgtaaatgatttacgattaattcagcatgattcgttaatccaaggcaaaacagtctgggatgaaaattacgaaaatcaagcaaaagatttaggataccatagcggtgaacttggtccaatttatggaaaacaatggcgtgattttggcggtgtagaccaaattgtagaagttattgatcgtattaaaaaactgccgaatgataggcgacaaattgtttctgcgtggaatccagctgaacttaaatatatggcattaccgccttgtcatatgttctatcagtttaatgtgcgtaatggctatttggatttgcagtggtatcaacgatcagtagatgttttcttgggtctaccatttaatattgcatcatatgctacgttagttcatattgtagctaagatgtgtaatcttattcctggagatttgatattttctggcggtaatactcatatctatatgaatcacgtagaacaatgtaaagaaattttgcgtcgtgaacctaaagagctttgtgaactggtaataggcggattgccttataaattccgctatctttctactaaagaacaattggaatacattcttaaactcaggcctaaagatttcgttctcaaagattatcagtcccacggtgtcttgaaaggaaaaatggcggtataa

SEQ ID NO: 17615 - protein, 286 aa, Bacteriophage RB3
MKQYQDLIKDIFENGYETDDRTGTGTIALFGTKLRWDLSKGFPAVTTKKLAWKACIAELLWFLSGSTNVNDLRLIQHDSLIQGKTVWDENYENQAKDLGYHSGELGPIYGKQWRDFGGVDQIVEVIDRIKKLPNDRRQIVSAWNPAELKYMALPPCHMFYQFNVRNGYLDLQWYQRSVDVFLGLPFNIASYATLVHIVAKMCNLIPGDLIFSGGNTHIYMNHVEQCKEILRREPKELCELVIGGLPYKFRYLSTKEQLEYILKLRPKDFVLKDYQSHGVLKGKMAV

SEQ ID NO: 17616 - DNA, 861 bp, Bacteriophage RB27
  CDS (1)..(861): transl_table=11
atgaaacaataccaagatttaattaaagacatttttgaaaatggctatgaaaccgatgaccgaacaggcacaggaacaattgctttgttcggtactaaattgcgctgggatttaactaaaggttttcctgcggtaacaactaagaagctcgcctggaaagcttgcattgctgagctgctttggtttttatcaggaagcacaaatgtcaatgatttacgattaattcaacatgattcattaattcaaggcaaaacagtctgggatgaaaattacgaaaatcaagcaaaagatttaggataccatagcggtgaacttggtccaatttatggaaaacagtggcgtgattttggcggtgtagaccaaattatagaagttgttgatcgtattaaaaaactgccaaatgataggcgtcaaattgtttctgcgtggaatccagctgaacttaaatatatggcattaccgccttgtcatgtgttctatcagtttaatgtgcgtaatggctatttagatttgcagtggtatcaacgatcagtagatgtttttctcggccttccatttaatattgcatcatatgctgcgttagttcatattgtagctaagatgtgtaatcttattcctggagatttgatattttctggcggtaatactcatatctatatgaatcacgtagaacaatgtaaagaaattttacgtcgtgaacctaaagagctttgtgaactggtaataggcggattgccttataaattccgctatctttctactaaagaacaattggaatacattcttaaactcaggcctaaagatttcgttctcaaagattatcagtcccacggtgtcttgaaaggaaaaatggcggtataa

SEQ ID NO: 17617 - protein, 286 aa, Bacteriophage RB27
MKQYQDLIKDIFENGYETDDRTGTGTIALFGTKLRWDLTKGFPAVTTKKLAWKACIAELLWFLSGSTNVNDLRLIQHDSLIQGKTVWDENYENQAKDLGYHSGELGPIYGKQWRDFGGVDQIIEVVDRIKKLPNDRRQIVSAWNPAELKYMALPPCHVFYQFNVRNGYLDLQWYQRSVDVFLGLPFNIASYAALVHIVAKMCNLIPGDLIFSGGNTHIYMNHVEQCKEILRREPKELCELVIGGLPYKFRYLSTKEQLEYILKLRPKDFVLKDYQSHGVLKGKMAV

SEQ ID NO: 17618 - DNA, 861 bp, Bacteriophage RB23
  CDS (1)..(861): transl_table=11
atgaaacaataccaatttttaattaaagatatcctggaaaatggctacgaaaccgatgaccgaacaggcacaggaacaattgctttgttcggtactaaattacgctgggatttaactaaaggttttcctgcagtaacaactaagaagctcgcctggaaagcttgcattgctgagctaatatggtttttatcgggaagcacaaatgtcaatgatttgcgattaattcaacatgattcgttaatccaaggcaaaacagtttgggatgaaaattacgaaaatcaagcaaaagatttaggataccatagcggtgaacttggtccaatttatggaaaacagtggcgtgattttggtggtgtagaccaaattatagaagttattgatcgtattaaaaaactgccaaatgataggcgtcaaattgtttcagcatggaatccagctgaactcaagcagatggcattaccaccttgtcatatgttctatcaatttaatgttcgtaatggataccttgaccttcagtggtatcaacgatcagtagatgttttcctcggtcttccatttaatattgcatcatatgctgcgttagttcatattgtagctaagatatgtaatcttattccgggagatttgatattttctggcggtaatactcatatctatatgaatcacgtagaacaatgtaaagaaattttgcgtcgtgaacctatggatttatgcgaattacaattaaaattcccagatgaatttgatgaatgggacacagaatcacaggtattttggttgagtcaattcgcaaagccgcataattttgttcttaacgactatgtatctcacccgccaattaaaggaaagatggcggtataa

SEQ ID NO: 17619 - protein, 286 aa, Bacteriophage RB23
MKQYQFLIKDILENGYETDDRTGTGTIALFGTKLRWDLTKGFPAVTTKKLAWKACIAELIWFLSGSTNVNDLRLIQHDSLIQGKTVWDENYENQAKDLGYHSGELGPIYGKQWRDFGGVDQIIEVIDRIKKLPNDRRQIVSAWNPAELKQMALPPCHMFYQFNVRNGYLDLQWYQRSVDVFLGLPFNIASYAALVHIVAKICNLIPGDLIFSGGNTHIYMNHVEQCKEILRREPMDLCELQLKFPDEFDEWDTESQVFWLSQFAKPHNFVLNDYVSHPPIKGKMAV

SEQ ID NO: 17620 - DNA, 861 bp, Bacteriophage RB61
  CDS (1)..(861): transl_table=11
atgaaacaataccaagatttaattaaagacatttttgaaaatggctatgaaaccgatgaccgaacgggcacaggaacaattgctttgttcggtactaaattgcgttgggatttaaccaaaggttttcctgcagtaacaactaaaaagctcgcctggaatgcatgcattgctgagctaatatggtttttatcaggaagcacaaatgtcaatgatttgcgattaattcaacatgattcattaattcaaggcaaaacagtctgggatgaaaattacgaaaatcaagcaaaagatttaggataccatagcggtgaacttggtccaatttatggaaaacagtggcgtgattttggcggtgtagatcaaattatagaagttattgatcgtattaaaaaactgccaaatgataggcgtcaaattgtttctgcgtggaatccagctgaacttaaatatatggcattaccgccttgtcatatgttctatcagtttaatgtgcgtaatggataccttgaccttcagtggtatcaacgttcggtagatgttttcctcggtcttccatttaatattgcatcatatgctacgttagttcatattgtagctaagatgtgtaatcttattccgggagatttgatattttctggtggtaatactcatatctatatgaatcacgtagaacaatgtaaagaaattttatgtcgtgaacctatggatttatgcgaattacaattaaaatttccagatgaatttgatgaatgggacacagaatcgcaggtattttggttgagtcaatttgcaaagcctcataattttgttcttaacaactatgaatcacatcctcctattaaaggaaagatggcggtgtaa

SEQ ID NO: 17621 - protein, 286 aa, Bacteriophage RB61
MKQYQDLIKDIFENGYETDDRTGTGTIALFGTKLRWDLTKGFPAVTTKKLAWNACIAELIWFLSGSTNVNDLRLIQHDSLIQGKTVWDENYENQAKDLGYHSGELGPIYGKQWRDFGGVDQIIEVIDRIKKLPNDRRQIVSAWNPAELKYMALPPCHMFYQFNVRNGYLDLQWYQRSVDVFLGLPFNIASYATLVHIVAKMCNLIPGDLIFSGGNTHIYMNHVEQCKEILCREPMDLCELQLKFPDEFDEWDTESQVFWLSQFAKPHNFVLNNYESHPPIKGKMAV

SEQ ID NO: 17622 - DNA, 861 bp, Bacteriophage LZ2
  CDS (1)..(861): transl_table=11
atgaaacaataccaagatttaattaaagacatttttgaaaatggctatgaaaccgatgaccgaacgggcacaggaacaattgctttgttcggtactaaattgcgttgggatttaaccaaaggttttcctgcagtaacaactaaaaagctcgcttggaaagcttgcattgctgagctactttggttcttatcaggaagtactaacgtaaatgatttacgattaattcagcatgattcgttaatccaaggcaaaacagtctgggatgaaaattacgaaaatcaagcaaaagatttaggataccatagcggtgaacttggtccaatttatggaaaacaatggcgtgattttggcggtgtagaccaaattatagaagttattgatcgtattaaaaaattgccaaatgataggcgtcaaattgtttctgcatggaatccagctgaacttaaatatatggcattaccgccttgtcatatgttttatcagtttaatgtgcgtaatggataccttgaccttcagtggtatcaacgatcagtagatgttttcttgggtctaccatttaatattgcatcatatgctgcgttagttcatattgtagctaagatgtgtaatcttattcctggagatttgatattttctggcggtaatactcacatctatatgaatcacgtagaacaatgtaaagaaattttacgtcgtgaacctaaagagctttgtgaactggtaataggcggattgccttataaattccgttatctttctactaaagaacaattggaatacattcttaaactcaggcctaaagatttcgttctcaaagattatcagtcccacggtgtcttgaaaggaaaaatggcggtataa

SEQ ID NO: 17623 - protein, 286 aa, Bacteriophage LZ2
MKQYQDLIKDIFENGYETDDRTGTGTIALFGTKLRWDLTKGFPAVTTKKLAWKACIAELLWFLSGSTNVNDLRLIQHDSLIQGKTVWDENYENQAKDLGYHSGELGPIYGKQWRDFGGVDQIIEVIDRIKKLPNDRRQIVSAWNPAELKYMALPPCHMFYQFNVRNGYLDLQWYQRSVDVFLGLPFNIASYAALVHIVAKMCNLIPGDLIFSGGNTHIYMNHVEQCKEILRREPKELCELVIGGLPYKFRYLSTKEQLEYILKLRPKDFVLKDYQSHGVLKGKMAV

SEQ ID NO: 17624 - DNA, 861 bp, Bacteriophage RB14
  CDS (1)..(861): transl_table=11
atgaaacaataccaagatttaattaaagacatttttgaaaatggctatgaaaccgatgaccgaacaggcacaggaacaattgctttgttcggtactaaattacgttgggatttaactaaaggttttcctgcagtaacaactaagaagctcgcctggaatgcatgcattgctgagcttctatggtttatttccggttctaccaatgttaatgatttacgtcttcgcacacatggtagtcttattcaaggtaaaactatttgggacgataactatgaaaaccaggctaaagacctaggatatcatagtggtgaacttggtcctatatacggtaaacaatggcgtgatttcggcggtgtggatcaattagttgaaactattgatcgtattaaaaaattaccaactgatcgacgtcaaatcgtttcagcatggaatccagctgaaatcaatcaaatggcattaccgccctgtcatatgttctatcagtttaatgtgcgtaatggttatcttgatttacaatggtaccaaagaagtgtagatgttttcttgggattgccattcaacattgcctcgtacgctgccttgacgcatattgtggctaagatgtgtaatcttatcccaggagatttgatattttctggtggtaatactcacatctatatgaatcatactgagcaatgtaaagaaattttacgtcgtgagcctaaagaactatgtgaacttaaaattgattggcctatagagtttggaaattgtgacaccgaaacacagctttactggttaactgaatacatgaaaccgaaagattttatccttgaaaattatgaatcgcatccagcaattaaagggaaaatggcaatatga

SEQ ID NO: 17625 - protein, 286 aa, Bacteriophage RB14
MKQYQDLIKDIFENGYETDDRTGTGTIALFGTKLRWDLTKGFPAVTTKKLAWNACIAELLWFISGSTNVNDLRLRTHGSLIQGKTIWDDNYENQAKDLGYHSGELGPIYGKQWRDFGGVDQLVETIDRIKKLPTDRRQIVSAWNPAEINQMALPPCHMFYQFNVRNGYLDLQWYQRSVDVFLGLPFNIASYAALTHIVAKMCNLIPGDLIFSGGNTHIYMNHTEQCKEILRREPKELCELKIDWPIEFGNCDTETQLYWLTEYMKPKDFILENYESHPAIKGKMAI

SEQ ID NO: 17626 - DNA, 861 bp, Bacteriophage RB32
  CDS (1)..(861): transl_table=11
atgaaacaataccaagatttaattaaagacatttttgaaaatggctacgaaactgatgaccgaacaggcacaggaacaattgctttgttcggtactaaattgcgttgggatttaaccaaaggttttcctgcagtaacaactaaaaagctcgcctggaaagcttgcattgctgagttaatatggtttttatcaggaagcacaaatgtcaatgatttacgattaattcagcatgattcattaattcaaggcaaaacagtctgggatgaaaattacgaaaatcaagcaaaagatttaggataccatagcggtgaacttggtccaatttatggaaaacaatggcgtgattttggcggtgtagaccaaattgtagaagttattgatcgtattaaaaaactgccgaatgataggcgacaaattgtttctgcgtggaatccagctgaacttaaatatatggcattaccgccttgtcatatgttctatcaatttaatgtgcgtaatggctatttggatttacagtggtatcaaagaagtgttgacgtgttcttgggcttgccattcaacattgcatcatatgctacgttagttcatattgtagctaagatgtgtaatcttattccgggagatttgatattttccggtggtaatactcatatctatatgaatcacgtagaacaatgtaaagaaattttacgtcgtgaacctatggatttatgcgaattgcaattaaaatttccagatgaatttgatgaatgggacacagaatcgcaggtattttggttgagtcaattcgtaaagccgcataattttgttcttaacaactatgaatcacacccttctattaaaggaaagatggcggtgtaa

SEQ ID NO: 17627 - protein, 286 aa, Bacteriophage RB32
MKQYQDLIKDIFENGYETDDRTGTGTIALFGTKLRWDLTKGFPAVTTKKLAWKACIAELIWFLSGSTNVNDLRLIQHDSLIQGKTVWDENYENQAKDLGYHSGELGPIYGKQWRDFGGVDQIVEVIDRIKKLPNDRRQIVSAWNPAELKYMALPPCHMFYQFNVRNGYLDLQWYQRSVDVFLGLPFNIASYATLVHIVAKMCNLIPGDLIFSGGNTHIYMNHVEQCKEILRREPMDLCELQLKFPDEFDEWDTESQVFWLSQFVKPHNFVLNNYESHPSIKGKMAV

SEQ ID NO: 17628 - DNA, 840 bp, Lactococcus lactis
  CDS (1)..(840): transl_table=11
atgacttacgcagatcaagtttttaaacaaaatatccaaaatatcctagataatggtgttttttcagaaaatgcaagaccaaagtataaggatggtcaaatggcgaatagcaaatatgtcactggttcattcgttacttatgatttgcaaaagggggagtttccaattaccactttgcgtccaattccaatcaaatctgctattaaagaattgatgtggatataccaagaccaaacaagtgaactttctgttctcgaagagaagtatggagtcaaatactggggagaatggggaattggtgatggtacgattgggcaacgttatggtgcaacagtcaaaaaatataatatcattggtaaattattagaaggcttggccaaaaatccatggaatcgtcgtaatatcatcaacctttggcagtatgaagattttgaggaaacagaaggtcttttaccatgtgctttccaaacgatgtttgatgtccgtcgagaaaaagatggtcagatttatttggatgccacactgattcaacgttcaaacgatatgcttgtagcccaccatatcaatgcgatgcaatatgttgctttgcaaatgatgattgcaaaacatttttcttggaaagttgggaaattcttttattttgtaaataatttacatatttatgataatcagtttgagcaggcaaatgaattaatgaagcgaacagcttctgaaaaagaacctcgtttggtccttaatgttcctgatggtacaaactttttcgatattaaacctgaagattttgaacttgtggactatgagccagtaaaacctcaattgaaatttgatttagcaatttaa

SEQ ID NO: 17629 - protein, 279 aa, Lactococcus lactis
MTYADQVFKQNIQNILDNGVFSENARPKYKDGQMANSKYVTGSFVTYDLQKGEFPITTLRPIPIKSAIKELMWIYQDQTSELSVLEEKYGVKYWGEWGIGDGTIGQRYGATVKKYNIIGKLLEGLAKNPWNRRNIINLWQYEDFEETEGLLPCAFQTMFDVRREKDGQIYLDATLIQRSNDMLVAHHINAMQYVALQMMIAKHFSWKVGKFFYFVNNLHIYDNQFEQANELMKRTASEKEPRLVLNVPDGTNFFDIKPEDFELVDYEPVKPQLKFDLAI

SEQ ID NO: 17630 - DNA, 1767 bp, Plasmodium yoelii yoelii
  CDS (1)..(1767)
atggaagatttatcggaaatattcgatatatatgcaatttgtgcatgttgtaaagttataaacaataatgaaaagagtggaagctttaacaataaaacatttaatggacttggaaatgcagggatgttgccttggaaatataatttagttgatatgaattattttagttctgtaacatcgtatgtaaatgaaaataactatataagattgcaatggaagagagataaatatatggggaaaaataatttaaaaaataatgcagaactgaataatggcgagctgaataataatctgcaaaatgttgtagtgatgggaaaaagaagttgggatagtatcccccccaaatttaaacccttacaaaatcgaataaacataattttgtctagaactttgaaaaaagaagatattgcaaatgaggataacaaaaataatgagaacggcaccgttatgataattaaaagcgtagacgatttgtttcctatcttaaaagctataaaatattacaaatgttttattataggggggtcatatgtttataaagaatttttagatcgtaatttaataaaaaaaatatattttacaagaataaataattcatataattgtgatgttttattcccagaaataaacgaaaatttatttaagatatcatcaataagtgatgtatataatagtaataacacaactttagattttataatttatagtaaaaagacagaaaaaataaattcaaataaggaaatatctaatgatatatttttaggtttatgtgatgaacaaaataaaaattttgatgatgaagatgattatacatacttcagtttcaataaaaataaagaaaatataaaaaaaaattctgaacatgttcataattttaaaatatataatagcataaaatataaaaatcatcctgaatatcaatatttaaatattatatatgatataataatgcatggaaataaacaagatgatagaacaggtgttggtgtgttaagtaaatttggatatatgatgaaatttaatttaaatcaatattttccattattaacaacaaaaaaattatttgtgcgaggtattattgaagaattattatggtttataagaggagaaacaaatggaaatacattgttagaaaaaaatgtaagaatatgggaagctaatggaacaagagaatttttagataatagaaaattatttcatagagaagttaatgatcttggtcctatttatggattccaatggagacattttggtgctgaatatacagatatgcatgataattataaagataaaggtgttgatcaactaaaaaatattataaatttaattaaaaatgatcctacatgtagacgaattattttatgtgcatggaatgtaaaagatttagataaaatggcattacctccatgtcatattttatgtcaattttatgtttttgatggaaaattatcatgtattatgtatcaaagatcttgtgatttaggactaggagttccatttaacattgcttcttattctatatttacatatatgatagcacaagtatgtaacttacaaccagctgaatttatacatgtattgggtaatgctcatgtttataataatcatattgaaagcttaaaaattcagttaaatagaactccttatcctttccctactcttaaattaaatcctgatattaaaaatatcgaagattttacaatttctgattttactgtgcaaaattatgttcatcatgataaaataagtatggatatggcagcttaa

SEQ ID NO: 17631 - protein, 588 aa, Plasmodium yoelii yoelii
MEDLSEIFDIYAICACCKVINNNEKSGSFNNKTFNGLGNAGMLPWKYNLVDMNYFSSVTSYVNENNYIRLQWKRDKYMGKNNLKNNAELNNGELNNNLQNVVVMGKRSWDSIPPKFKPLQNRINIILSRTLKKEDIANEDNKNNENGTVMIIKSVDDLFPILKAIKYYKCFIIGGSYVYKEFLDRNLIKKIYFTRINNSYNCDVLFPEINENLFKISSISDVYNSNNTTLDFIIYSKKTEKINSNKEISNDIFLGLCDEQNKNFDDEDDYTYFSFNKNKENIKKNSEHVHNFKIYNSIKYKNHPEYQYLNIIYDIIMHGNKQDDRTGVGVLSKFGYMMKFNLNQYFPLLTTKKLFVRGIIEELLWFIRGETNGNTLLEKNVRIWEANGTREFLDNRKLFHREVNDLGPIYGFQWRHFGAEYTDMHDNYKDKGVDQLKNIINLIKNDPTCRRIILCAWNVKDLDKMALPPCHILCQFYVFDGKLSCIMYQRSCDLGLGVPFNIASYSIFTYMIAQVCNLQPAEFIHVLGNAHVYNNHIESLKIQLNRTPYPFPTLKLNPDIKNIEDFTISDFTVQNYVHHDKISMDMAA

SEQ ID NO: 17632 - DNA, 861 bp, Bacteriophage T2
  CDS (1)..(861): transl_table=11
atgaaacaataccaagatttaattaaagacatttttgaaaatggctatgaaaccgatgatcgaacaggcacaggaacaattgctttgttcggtactaaattacgctgggatttaagtaaaggttttcctgcagtaacaactaaaaagctcgcctggaaagcttgcattgctgagctactttggtttttatcaggaagcacaaatgtcaatgatttacgattaattcagcatgattcattaattcaaggcaaaacagtctgggatgaaaattacgaaaatcaagcaaaagatttaggataccatagcggtgaacttggtccaatttatggaaaacagtggcgtgattttggcggtgtagaccaaattgtagaagttattgatcgtattaaaaaactgccgaatgataggcgacaaattgtttctgcgtggaatccagctgaacttaaatatatggcattaccgccttgtcatatgttctatcagtttaatgtgcgtaatggctatttggatttgcagtggtatcaacgatcagtagatgtttttcttggtcttccatttaatattgcatcatatgctgcgttagttcatattgtagctaagatgtgtaatcttattcctggagatttgatattttctggcggtaatactcatatctatatgaatcacgtagaacaatgtaaagaaattttgcgtcgtgaacctaaagagctttgtgagctggtaataagtggtctaccttataaattccgatatctttctactaaagaacaattaaaatatgttcttaaacttaggcctaaagatttcgttcttaacaactatgtatctcacccgccaattaaaggaaagatggcggtataa

SEQ ID NO: 17633 - protein, 286 aa, Bacteriophage T2
MKQYQDLIKDIFENGYETDDRTGTGTIALFGTKLRWDLSKGFPAVTTKKLAWKACIAELLWFLSGSTNVNDLRLIQHDSLIQGKTVWDENYENQAKDLGYHSGELGPIYGKQWRDFGGVDQIVEVIDRIKKLPNDRRQIVSAWNPAELKYMALPPCHMFYQFNVRNGYLDLQWYQRSVDVFLGLPFNIASYAALVHIVAKMCNLIPGDLIFSGGNTHIYMNHVEQCKEILRREPKELCELVISGLPYKFRYLSTKEQLKYVLKLRPKDFVLNNYVSHPPIKGKMAV

SEQ ID NO: 17634 - DNA, 1536 bp, Babesia bovis
  CDS (1)..(1536)
atgtctactgtctacgaagggtgtggtggtcttacgatttacgtagccattgccctgaatagggtgattggtcatcagaaccaaattccctggccgcatattattcatgattttcgttttttgcgcaatggcacaacttacattccacctgaggtcttatccaagaatcccaatatacagaatgttgtgattttcggtaggaagacttacgaaagtatccctaaagcttcgctccctcttaaaaaccgtataaacgtgatcatctctcgtactgtcaaggaagttcccggttgtttggtgtatgaggacctttctactgccattcgtgatttgcgtgcaaatgtccctcataacaagatttttatcttaggtggttcttatctttacaaggaggtgcttgacaatggtttgtgtgataagatatatttgactcgcattaacaaggagtaccctggtgacacatttttccctgacattccggatacttttgagataactgccattagtcctacgttttccactgactttgttagttatgattttgtgatttacgagcgtaaggattgcaagactgttttccccgatcctccttttgatcaattattgttgaagggtgttgacattattgttcccaaaccaaagtacgttgcttgtcctggtgtcaggatacgcaatcatgaagagttccaataccttgacatattggcagatgtgctaagtcacggtgtcttgaagcccaaccgtactggtactgatgcctattctaagtttggctatcagatgcgttttgatctttcgcgttcattcccgttactgactaccaagaaggtagcgttgcgctccataattgaggaactgctttggtttatcaagggtagcaccaacggcaacgacctactggctaagaatgtgcgcatttgggagcttaacggccgtcgtgaattccttgacaagaatggctttacagagcgtgaagagcatgatttaggtcctatatatggtttccaatggcgtcactttggtgctgagtacttggatatgcacgctgattacactggtaagggtattgaccagcttgctgagatcatcaaccgcattaaaacgaatccaaacgaccgtaggatgattgtctgttcttggaatgtttcagacctaaagaagatggctttgcctccttgtcattgtttcttccaattttatgtcagtgacaacaagctttcttgcatgatgcatcagcgttcttgtgaccttggtttgggtgtacctttcaacattgcttcttatagtattcttactgctatggtagctcaggtttgcggcttgggtttaggggagtttgtccacaatttggcggatgctcacatttatgttgaccatgtggacgctgttactactcagattgctcgcattccttatccatttcctcgtttgcgtttgaaccctgatattaagaacattgaggactttactattgacgacattgtagttgaggattacgtgtcgcatcctgccatacccatggccatgtccgcatga

SEQ ID NO: 17635 - protein, 511 aa, Babesia bovis
MSTVYEGCGGLTIYVAIALNRVIGHQNQIPWPHIIHDFRFLRNGTTYIPPEVLSKNPNIQNVVIFGRKTYESIPKASLPLKNRINVIISRTVKEVPGCLVYEDLSTAIRDLRANVPHNKIFILGGSYLYKEVLDNGLCDKIYLTRINKEYPGDTFFPDIPDTFEITAISPTFSTDFVSYDFVIYERKDCKTVFPDPPFDQLLLKGVDIIVPKPKYVACPGVRIRNHEEFQYLDILADVLSHGVLKPNRTGTDAYSKFGYQMRFDLSRSFPLLTTKKVALRSIIEELLWFIKGSTNGNDLLAKNVRIWELNGRREFLDKNGFTEREEHDLGPIYGFQWRHFGAEYLDMHADYTGKGIDQLAEIINRIKTNPNDRRMIVCSWNVSDLKKMALPPCHCFFQFYVSDNKLSCMMHQRSCDLGLGVPFNIASYSILTAMVAQVCGLGLGEFVHNLADAHIYVDHVDAVTTQIARIPYPFPRLRLNPDIKNIEDFTIDDIVVEDYVSHPAIPMAMSA

SEQ ID NO: 17636 - DNA, 960 bp, Brachydanio rerio
  CDS (1)..(960)
atgcccgacacggcagtggaagtgacaaatggacattgcgttaacggagaaagcaagaaagaagatacaaacggagggaaaaaggagttttctctgttttgcgacgagcgcgggtatttgagtctggtggagtttattttgcagaatggagcgaagaaaggcgacaggacaggcacaggagtgatctctgtgttcgggacacaagccagatacagtctcagagatcagtttccgttgctgacgaccaaaagagttttctggaaaggcatattggaggagctgctgtggttcatcaagggttcaacaaacgccaaagacctgtcggagaagggtgtgaggatttgggatgctaacggctccagagagtttctggataagaacggattcactgatcgggaggaaggagatctgggtccagtttatggatttcagtggaggcattttggagccgaatacaaagatatgcatactgattattctggagaaggagtcgatcagttacagaaagttattgacaccatcaagtcaaacccagaggaccgaaggatcatcatgtgtgcctggaatcccaaagatctccctctgatggcgctgccgccctgtcatgcgttgtgtcagttttacgtgtcgaacggtgagttgtcatgtcagctgtaccagcgatcgggagacatcggtctcggtgtcccattcaacatcgccagctacgccctgctgacctacatgatcgcccacatcactggactcaagcctggggatttcgttcatacattaggtgacgcccacatctacaccaatcacatcgagcctttaaaagagcagattcagcgagagccgcgtccgttccccaaactccggattaaacgcaaagttgaacaaattaatgatttctgtgctgaagattttgagatctatgattatgacccacatcctacaatcaaaatgcaaatggctgtttag

SEQ ID NO: 17637 - protein, 319 aa, Brachydanio rerio
MPDTAVEVTNGHCVNGESKKEDTNGGKKEFSLFCDERGYLSLVEFILQNGAKKGDRTGTGVISVFGTQARYSLRDQFPLLTTKRVFWKGILEELLWFIKGSTNAKDLSEKGVRIWDANGSREFLDKNGFTDREEGDLGPVYGFQWRHFGAEYKDMHTDYSGEGVDQLQKVIDTIKSNPEDRRIIMCAWNPKDLPLMALPPCHALCQFYVSNGELSCQLYQRSGDIGLGVPFNIASYALLTYMIAHITGLKPGDFVHTLGDAHIYTNHIEPLKEQIQREPRPFPKLRIKRKVEQINDFCAEDFEIYDYDPHPTIKMQMAV

SEQ ID NO: 17638 - DNA, 1593 bp, Pisum sativum
  CDS (1)..(1593)
atggctgctgattcctctgtaatgttcaatggaaatggaaatgggagcatcaacccaatgcctaacctacagagaacttaccaagtggttgtggcggccaccaaagatatgggcattggtaaggatggaaagttgccatggagattacctactgatctcaagtttttcaaggagttaactacgacgactttcgagactgggaagaagaatgccattgttatgggaagaaaaacatgggagagtatccctcttcagttcaggcctcttcccggtcgtcttaatgttgttttgactcgttcgggtagttttgatgctaaagcagcggagaatgttgtaatatgtggaagtatgtcttctgcattggaacttttagctgcttctccttattgtacatcgattgagaaaatatttgttattgggggtggtgagatatttagagatgctctcaatgtacccgaatgtgaagctatccacatcacagaaattcacacaagctttgaatgtgacacttttatgcctccaattgatttcactacatttcggccatggtactcatcctttcctaaggtggaaaacaacatccgatattctttcaccacttatgtgcgtgtaagaagttctgtagcagagtccttgaatcagagtactgtttcacctcttgataataaaccggcttctaaaaagtttgaggttcagaacttttcttttcttccgaaaatgatctttgagagacatgaggagtacatgtatcttaatctggttcaagaaatcatatctcaaggtacctccaagggtgataggacagggactgggaccttgtcaaaatttggttgccagatgaggttcaatctgcgtagaggctttcctcttctaacaactaagagagtattttggcgtggggttgttgaagagcttctttggtttatcagtggctcaacaaatgccaaggtgttacaggaaaaaggcattcatatatgggatgataatgcatccagggaattccttgatagcattggtttgtcagagagggaggagggtgacttaggacctgtttatgggtttcagtggagacactttggtgccaggtatactaacatgcataatgactatgccggccaaggagttgatcagcttttagatgttatcaacaaggtaaagcataatcctgatgatagacggatcattctctctgcatggaatccagcagatcttaaattgatggcacttccaccctgccacatgtctgcacagttctatgtagcaaatggggagttatcatgtcaaatgaatcagcgatctgctgacatgggcctgggcgtgccattcaacattgcatcttatgccctcctgacatgcatgattgctcatatttgtgaacttgttccaggtgattttatccatgttcttggggatgcacatgtttaccaaactcatgtgaggcctttgcaggagcagcttcataacctgccaaaaccttttccaactttgaaaatcaattcaaagaagaaagatatagattcttttgtggctactgatttcaagctcattgactatgatcctcaccaaaagattgagatgaagatggctgtttaa

SEQ ID NO: 17639 - protein, 530 aa, Pisum sativum
MAADSSVMFNGNGNGSINPMPNLQRTYQVVVAATKDMGIGKDGKLPWRLPTDLKFFKELTTTTFETGKKNAIVMGRKTWESIPLQFRPLPGRLNVVLTRSGSFDAKAAENVVICGSMSSALELLAASPYCTSIEKIFVIGGGEIFRDALNVPECEAIHITEIHTSFECDTFMPPIDFTTFRPWYSSFPKVENNIRYSFTTYVRVRSSVAESLNQSTVSPLDNKPASKKFEVQNFSFLPKMIFERHEEYMYLNLVQEIISQGTSKGDRTGTGTLSKFGCQMRFNLRRGFPLLTTKRVFWRGVVEELLWFISGSTNAKVLQEKGIHIWDDNASREFLDSIGLSEREEGDLGPVYGFQWRHFGARYTNMHNDYAGQGVDQLLDVINKVKHNPDDRRIILSAWNPADLKLMALPPCHMSAQFYVANGELSCQMNQRSADMGLGVPFNIASYALLTCMIAHICELVPGDFIHVLGDAHVYQTHVRPLQEQLHNLPKPFPTLKINSKKKDIDSFVATDFKLIDYDPHQKIEMKMAV

SEQ ID NO: 17640 - DNA, 1563 bp, Leishmania chagasi
  CDS (1)..(1563)
atgtccagggcagctcttaggcttaagattccgatgccggcgacgatggcggacttcgccttcccctctctgcgcgccttctccatcgttgtggccctcgataagcagcacggcatcggcgacggcgagtcgatcccgtggcgggtgccggaggacatggcgttcttcaaggaccagacgacgctgttgcgcaacaaaaagccgccgacggagaagaagcgcaacgctgtcgtgatgggccgcaagacgtgggagagcgtcccggtaaagttccgaccactcaagggacggctgaacattgtgttgtcctcgaaggccaccgtcgaggagcttctggcgccgctgccggagggaaagcgcgctgccgcggcgcaggatgtggtggtggtgaacggcggtctggccgaggcgctccgcctcctcgcacgcccgccgtactgcagctccatcgagacagcgtattgcgtcgggggtgcgcaggtttatgcggacgccatgctgtcgccgtgcgtcgagaagctgcaggaggtgtacctgacccgcatctacacgacggcgcctgcgtgtacgcgcttctttccgtttccgcccgagaacaccaccacggcgtgggacctggcgtcgtctcagggacgccgcaagagcgaggcggacggcctcgagttcgagatctgcaagtacgtgccgcgtaaccatgaggagcggcagtaccttgagctgattgaccgcatcatgaagacggggatcgtgaaggaggaccgcaccggcgtgggcaccatcagcctcttcggcgcacagatgcgcttctccctacgcgacaaccgcctgccgctgctgacgacgaagcgtgtcttctggcgcggcgtgtgcgaggagctgctgtggttcctgcgcggggagacgaacgcgcagctgctggcggacaaggacattcacatctgggacggcaacggctcgcgcgagtttctcgacagccgcggcttgacagagaataaggagatggacctcggccctgtctacggcttccagtggcgccacttcggggcagattacaaggggtttgaagcgaactacgacggcgaaggggtggaccagatcaggtccatcgtggagacgatcaaggcgaacccgaacgaccgccgccttctattcactgcctggaacccgtgcgcgctgcaaaagatggcgctgccgccgtgccacttgcttgctcagttctacgtgaacacggacacgagcgagctatcctgcatgctgtaccagcgctcgtgcgacatgggtctcggcgtccccttcaacatcgcctcctacgcgctgctcaccatcctcattgccaaggcgacgggcctgcggcctggtgagcttgtgcacacccttggtgacgcccacgtctaccgcaaccacgtcggtgccctcaagtcgcagctcgagcgagtcccgcacgcgttcccgaccctcgtcttcaaggaggagcgtcagttcctcgaggactacgagttaacggacatggaggtgatcgactacgttccacacccgccgatcaagatggagatggccgtatag

SEQ ID NO: 17641 - protein, 520 aa, Leishmania chagasi
MSRAALRLKIPMPATMADFAFPSLRAFSIVVALDKQHGIGDGESIPWRVPEDMAFFKDQTTLLRNKKPPTEKKRNAVVMGRKTWESVPVKFRPLKGRLNIVLSSKATVEELLAPLPEGKRAAAAQDVVVVNGGLAEALRLLARPPYCSSIETAYCVGGAQVYADAMLSPCVEKLQEVYLTRIYTTAPACTRFFPFPPENTTTAWDLASSQGRRKSEADGLEFEICKYVPRNHEERQYLELIDRIMKTGIVKEDRTGVGTISLFGAQMRFSLRDNRLPLLTTKRVFWRGVCEELLWFLRGETNAQLLADKDIHIWDGNGSREFLDSRGLTENKEMDLGPVYGFQWRHFGADYKGFEANYDGEGVDQIRSIVETIKANPNDRRLLFTAWNPCALQKMALPPCHLLAQFYVNTDTSELSCMLYQRSCDMGLGVPFNIASYALLTILIAKATGLRPGELVHTLGDAHVYRNHVGALKSQLERVPHAFPTLVFKEERQFLEDYELTDMEVIDYVPHPPIKMEMAV

SEQ ID NO: 17642 - DNA, 1563 bp, Leishmania infantum
  CDS (1)..(1563)
atgtccagggcagctgcgaggtttaagattccgatgccggcgacgaaggcggacttcgccttcccctctctgcgcgccttctccatcgttgtggccctcgataagcagcacggcatcggcgacggcgagtcgatcccgtggcgggtgccggaggacatggcgttcttcaaggaccagacgacgctgttgcgcaacaaaaagccgccgacggagaagaagcgcaacgctgtcgtgatgggccgcaagacgtgggagagcgtcccggtaaagttccgaccactcaagggacggctgaacattgtgttgtcctcgaaggccaccgtcgaggagcttctggcgccgctgccggagggaaagcgcgctgccgcggcgcaggatgtggtggtggtgaacggcggtctggccgaggcgctccgcctcctcgcacgcccgccgtactgcagctccatcgagacagcgtattgcgtcgggggtgcgcaggtttatgcggacgccatgctgtcgccgtgcgtcgagaagctgcaggaggtgtacctgacccgcatctacacgacggcgcctgcgtgtacgcgcttctttccgtttccgcccgagaacaccaccacggcgtgggacctggcgtcgtctcagggacgccgcaagagcgaggcggacggcctcgagttcgagatctgcaagtacgtgccgcgtaaccatgaggagcggcagtaccttgagctgattgaccgcatcatgaagacggggatcgtgaaggaggaccgcaccggcgtgggcaccatcagcctcttcggcgcacagatgcgcttctccctacgcgacaaccgcctgccgctgctgacgacgaagcgtgtcttctggcgcggcgtgtgcgaggagctgctgtggttcctgcgcggggagacgaacgcgcagctgctggcggacaaggacattcacatctgggacggcaacggctcgcgcgagtttctcgacagccgcggcttgacagagaataaggagatggacctcggccctgtctacggcttccagtggcgccacttcggggcagattacaaggggtttgaagcgaactacgacggcgaaggggtggaccagatcaggtccatcgtggagacgatcaaggcgaacccgaacgaccgccgccttctattcactgcctggaacccgtgcgcgctgcaaaagatggcgctgccgccgtgccacttgcttgctcagttctacgtgaacacggacacgagcgagctatcctgcatgctgtaccagcgctcgtgcgacatgggtctcggcgtccccttcaacatcgcctcctacgcgctgctcaccatcctcattgccaaggcgacgggcctgcggcctggtgagcttgtgcacacccttggtgacgcccacgtctaccgcaaccacgtcggtgccctcaagtcgcagctcgagcgagtcccgcacgcgttcccgaccctcgtcttcaaggaggagcgtcagttcctcgaggactacgagttaacggacatggaggtgatcgactacgttccacacccgccgatcaagatggagatggccgtatag

SEQ ID NO: 17643 - protein, 520 aa, Leishmania infantum
MSRAAARFKIPMPATKADFAFPSLRAFSIVVALDKQHGIGDGESIPWRVPEDMAFFKDQTTLLRNKKPPTEKKRNAVVMGRKTWESVPVKFRPLKGRLNIVLSSKATVEELLAPLPEGKRAAAAQDVVVVNGGLAEALRLLARPPYCSSIETAYCVGGAQVYADAMLSPCVEKLQEVYLTRIYTTAPACTRFFPFPPENTTTAWDLASSQGRRKSEADGLEFEICKYVPRNHEERQYLELIDRIMKTGIVKEDRTGVGTISLFGAQMRFSLRDNRLPLLTTKRVFWRGVCEELLWFLRGETNAQLLADKDIHIWDGNGSREFLDSRGLTENKEMDLGPVYGFQWRHFGADYKGFEANYDGEGVDQIRSIVETIKANPNDRRLLFTAWNPCALQKMALPPCHLLAQFYVNTDTSELSCMLYQRSCDMGLGVPFNIASYALLTILIAKATGLRPGELVHTLGDAHVYRNHVGALKSQLERVPHAFPTLVFKEERQFLEDYELTDMEVIDYVPHPPIKMEMAV

SEQ ID NO: 17644 - DNA, 1563 bp, Leishmania tropica
  CDS (1)..(1563): Xaa of translated CDS can stand for any naturally occuring amino acid which can be translated from respective CDS-codon
atgtccagggcagctgcgaggtttaagattctgatgccggagacgaaggcggacttcgctttcccctccctgcgcgccttctccatcgtcgtggccctcgataagcagcacggcatcggcgacggcgagtcgatcccgtggcgggtgccggaggacatggcgttcttcaaggaccagacgacgctgctgcgcaacaagaagccgccgacggagaagaagcgcaacgccgtcgtgatgggccgcaagacgtgggagagcgtcccggtcaagttccgaccactcaaggggcggctgaacattgtgttatcctcgaaggccaccgtcgaggagcttctggcgccgctgccggaggaaaagcgcgcggcggcggagcaggatgtggtggtggtgaacggcggtctggccgaggcgctccgcctcctcgcacgcccgccgtactgcagctccatcgagacagcgtattgcgtcggtggtgcgcaggtttacgcggacgccatgctgtcgccgtgcgtcgagaaactgcaggaggtgtacctgacccgcatctacacgacggcgcctgcgtgtacgcgcttctttccgtttccgcccgagaacgccgccacggcgtgggacctggcgtcgtctcagggacgccgcaagagcgaggcggagggcctcgagttcgagatctgcaagtacgtgccgcgcaaccacgaggagcggcagtaccttgagctgattgaccgcatcatgaagacggggatcgtgaaggaggaccgcaccggcgtgggcaccatcagcctcttcggcgcacagatgcgcttctccttacgcggcaaccgcctgccgctgctgacgacgaagcgtgtcttctggcgcggcgtgtgcgaggagctgctgtggttcctgcgcggggagaccaacgcgcrgctgctggcggacaaggacattcacatctgggacggcaacggctcgcgcgagtttctcgacagccgcggcttgacagagaataaggagatggacctcggccctgtctacggcttccagtggcgccacttcggggcagattacaaggggtttgaagcgaactacgacggcgaaggggtggaccaratccggttcatcgtggagacgatcaaggcgaacccgaacgaccgccgcctcctagtcactgcctggaacccgtgcgcgctgcaaaagatggcgctgccgccgtgccacttgcttgctcagttctacgtgaacacagacacgagcgagctatcctgcatgttgtaccagcgctcgtgcgacatgggtcttggcgtccccttcaacatcgcctcctacgcgctgctcaccatcctcattgccaaggcgacgggtctgcggcctggtgagcttgtgcacaccctcggcgacgcccacgtctaccgcaaccacgttgatgccctcaaggcgcagctcgagcgtgtcccgcacgcgttcccgaccctcatcttcaaggcggagcggcagttcctcgaggactacgagttgacggacatggaggtgatcgactacgttccgcacccgccgatcaagatggagatggccctatag

SEQ ID NO: 17645 - protein, 520 aa, Leishmania tropica
  misc_feature (304)..(304): Xaa can be any naturally occuring amino acid
MSRAAARFKILMPETKADFAFPSLRAFSIVVALDKQHGIGDGESIPWRVPEDMAFFKDQTTLLRNKKPPTEKKRNAVVMGRKTWESVPVKFRPLKGRLNIVLSSKATVEELLAPLPEEKRAAAEQDVVVVNGGLAEALRLLARPPYCSSIETAYCVGGAQVYADAMLSPCVEKLQEVYLTRIYTTAPACTRFFPFPPENAATAWDLASSQGRRKSEAEGLEFEICKYVPRNHEERQYLELIDRIMKTGIVKEDRTGVGTISLFGAQMRFSLRGNRLPLLTTKRVFWRGVCEELLWFLRGETNAXLLADKDIHIWDGNGSREFLDSRGLTENKEMDLGPVYGFQWRHFGADYKGFEANYDGEGVDQIRFIVETIKANPNDRRLLVTAWNPCALQKMALPPCHLLAQFYVNTDTSELSCMLYQRSCDMGLGVPFNIASYALLTILIAKATGLRPGELVHTLGDAHVYRNHVDALKAQLERVPHAFPTLIFKAERQFLEDYELTDMEVIDYVPHPPIKMEMAL

SEQ ID NO: 17646 - DNA, 870 bp, White spot syndrome virus
  CDS (1)..(870)
atggagggagaacatcaatatttgaacctagtcagggagatcctagaaagaggagtgaagaaggacgatagaactggaacaggaactctatccatttttggaccccaaatgaggttctctcttcgagacgacactattccagttctcactaccaagaaaattttctggagaggagttgtggaagaactctcgtggttcatcaggggcaatacagacgccaaagaattggccaagaagaagatacacatctggaacgctaatgggtcgcgggaatttttggacagtagagggttatacgatagagcagagggagatttgggacccgtatacggattccaatggcgtcattttggtgctgaatatgatacctgttcttccgattatactggaaagggtattgatcaattggccaatatactaaagaccctgagagaaaatccagatgatagaaggatgattatgacggcatggaatcctatggatcttcaccttatggctcttcctccatgccacatgactgctcaattttatgtggctaatggagaattgtcgtgccagttgtatcagcgaagcggagatgtcgggttgggcgtgcccttcaatattgcatcatactctcttctgactcatctgatggccagtatggtgggtctaaaaccgggagagtttatcctcactcttggtgacgcacacatttataatacccacattgaggtgttaaagaagcagttgtgccgcgtccctagaccattccctaagttgaggattttaatggctccagaaaaaattgaggactttactatcgacatgttttatcttgaggggtatcaaccacacagtggaaacttgcagatgaaaatggctgtttga

SEQ ID NO: 17647 - protein, 289 aa, White spot syndrome virus
MEGEHQYLNLVREILERGVKKDDRTGTGTLSIFGPQMRFSLRDDTIPVLTTKKIFWRGVVEELSWFIRGNTDAKELAKKKIHIWNANGSREFLDSRGLYDRAEGDLGPVYGFQWRHFGAEYDTCSSDYTGKGIDQLANILKTLRENPDDRRMIMTAWNPMDLHLMALPPCHMTAQFYVANGELSCQLYQRSGDVGLGVPFNIASYSLLTHLMASMVGLKPGEFILTLGDAHIYNTHIEVLKKQLCRVPRPFPKLRILMAPEKIEDFTIDMFYLEGYQPHSGNLQMKMAV

SEQ ID NO: 17648 - DNA, 924 bp, Mus musculus
  CDS (1)..(924)
atgctggtggttggctccgagctgcagtccgatgctcagcagctgagcgcggaagccccgcagcatggagaactccagtacctgaggcaggtggaacacattttgcgctgcggcttcaagaaggaggaccgcacgggcacaggcaccctgtcggtgttcggcatgcaggcacgatacagcctgagagatgaatttcctctgctcacaaccaaacgagtgttctggaagggtgttttggaggagttgttgtggtttatcaagggatccacaaatgctaaagaattgtcctccaagggagtgagaatctgggatgccaatggatcccgagattttctggacagcttgggattttctgcccgacaggaaggggacctgggcccagtttatggtttccaatggaggcattttggagcagagtacaaagatatggattcagattactcgggacaaggagtagaccagctgcaaaaagtgattgacaccatcaaaaccaaccctgatgacagaagaatcatcatgtgtgcctggaacccaaaagatcttcccctgatggcactgcctccttgccatgccctctgtcagttctatgtggtgaatggggaactgtcttgccagctttaccagaggtcaggagatatgggtctgggcgtgcccttcaacattgccagctatgctctgctcacctacatgattgcacatatcacaggcctgcagccaggtgattttgtccacactttgggagatgcacatatttacctgaatcatatagagccgctgaaaattcagctacagcgagaaccaagacctttcccaaagctcaaaatccttcgaaaagttgagacaatcgatgatttcaaagttgaagactttcagattgaagggtataatccacatccaacgattaaaatggaaatggctgtttaa

SEQ ID NO: 17649 - protein, 307 aa, Mus musculus
MLVVGSELQSDAQQLSAEAPQHGELQYLRQVEHILRCGFKKEDRTGTGTLSVFGMQARYSLRDEFPLLTTKRVFWKGVLEELLWFIKGSTNAKELSSKGVRIWDANGSRDFLDSLGFSARQEGDLGPVYGFQWRHFGAEYKDMDSDYSGQGVDQLQKVIDTIKTNPDDRRIIMCAWNPKDLPLMALPPCHALCQFYVVNGELSCQLYQRSGDMGLGVPFNIASYALLTYMIAHITGLQPGDFVHTLGDAHIYLNHIEPLKIQLQREPRPFPKLKILRKVETIDDFKVEDFQIEGYNPHPTIKMEMAV

SEQ ID NO: 17650 - DNA, 840 bp, Homo sapiens
  CDS (1)..(840)
atgcctgtggccggctcggagctgccgcgccggcccttgccccccgccgcacaggagcgggacgccgagccgcgtccgccgcacggggagctgcagtacctggggcagatccaacacatcctccgctgcggcgtcaggaaggacgaccgcacgggcaccggcaccctgtcggtattcggcatgcaggcgcgctacagcctgagagatgaattccctctgctgacaaccaaacgtgtgttctggaagggtgttttggaggagttgctgtggtttatcaagggatccacaaatgctaaagagctgtcttccaagggagtgaaaatctgggatgccaatggatcccgagactttttggacagcctgggattctccaccagagaagaaggggacttgggcccagtttatggcttccagtggaggcattttggggcagaatacagagatatggaatcagatcttcctctgatggcgctgcctccatgccatgccctctgccagttctatgtggtgaacagtgagctgtcctgccagctgtaccagagatcgggagacatgggcctcggtgtgcctttcaacatcgccagctacgccctgctcacgtacatgattgcgcacatcacgggcctgaagccaggtgactttatacacactttgggagatgcacatatttacctgaatcacatcgagccactgaaaattcagcttcagcgagaacccagacctttcccaaagctcaggattcttcgaaaagttgagaaaattgatgacttcaaagctgaagactttcagattgaagggtacaatccgcatccaactattaaaatggaaatggctgtttag

SEQ ID NO: 17651 - protein, 279 aa, Homo sapiens
MPVAGSELPRRPLPPAAQERDAEPRPPHGELQYLGQIQHILRCGVRKDDRTGTGTLSVFGMQARYSLRDEFPLLTTKRVFWKGVLEELLWFIKGSTNAKELSSKGVKIWDANGSRDFLDSLGFSTREEGDLGPVYGFQWRHFGAEYRDMESDLPLMALPPCHALCQFYVVNSELSCQLYQRSGDMGLGVPFNIASYALLTYMIAHITGLKPGDFIHTLGDAHIYLNHIEPLKIQLQREPRPFPKLRILRKVEKIDDFKAEDFQIEGYNPHPTIKMEMAV

SEQ ID NO: 17652 - DNA, 951 bp, Macropodid herpesvirus 1
  CDS (1)..(951)
atgtccaccaaaaatgcggaaggtcgacagagtgaagggtggggcggatttctccaaccgccccccgatgcgggcccccactctcaaccgcatggggagtggcagtatctgtatcaggtggcgcggatcctcagggagggctaccggaagggggaccggaccgggacggggaccctctccgtgttcggcacacaggcccgatacaaccttcggggcgaatttccgctgctgacgacgaaacgtgtgtactggaagggcgtggtcgaggagctgctgtggttcgtgaggggggccacgaacaccaaggagctctcgtcccggggggtgaagatctgggacgctcacgggtctcgagactttctggacaagcgggggttcccatctcgggaggagggcgacttgggcccggtctacgggttccagtggagacactttggggcggagtatcgggggagcgaagcggactattcgggacagggagcggaccagctgcagtacgtgatcgacaccttgaagcggaaccctgatgacagaaggatcgtgatgtgcgcgtggaacccgaaggatctccctctgatggcgctccccccgtgccacaccctctgccaattctacgtcgcgaatggggagctgtcctgccagctctatcaacgatcgggagacatggggttaggggtgccgttcaacattgctagttacgctctgctcacgtacatgatcgctcatgtcgtggggttggttcctggggagctggtgcatacgttgggggatgcgcatatctacctgaaccacatcgagcggctccggatccagctgcaacgagagccccgaccgttcccccagctcaaaattattcgagccgtcacctcaatcgattactttaggagcgaggacttcgtgttggaagggtaccggccgcactcggccctgaagatggagttggcggtgtag

SEQ ID NO: 17653 - protein, 316 aa, Macropodid herpesvirus 1
MSTKNAEGRQSEGWGGFLQPPPDAGPHSQPHGEWQYLYQVARILREGYRKGDRTGTGTLSVFGTQARYNLRGEFPLLTTKRVYWKGVVEELLWFVRGATNTKELSSRGVKIWDAHGSRDFLDKRGFPSREEGDLGPVYGFQWRHFGAEYRGSEADYSGQGADQLQYVIDTLKRNPDDRRIVMCAWNPKDLPLMALPPCHTLCQFYVANGELSCQLYQRSGDMGLGVPFNIASYALLTYMIAHVVGLVPGELVHTLGDAHIYLNHIERLRIQLQREPRPFPQLKIIRAVTSIDYFRSEDFVLEGYRPHSALKMELAV

SEQ ID NO: 17654 - DNA, 1770 bp, Plasmodium gallinaceum
  CDS (1)..(1770)
atgaatgaaatatctgatatttttgatatacacgctatatgcgcctgctgtaaggttgaaaacaaaaatgaaaagaaaaaaaatgaaatcttcagtaataacacatttagaggaattgggaataagggagttttgccatggaaaagtaacccattagacatgaaatattttactacagtaacaacatatgttaatgaatcaaaatataaaaaattaaaatataaaagagagaaatatttagaaaaaacaaaggatacaaagtgtttagagagtataattcaactatcaaataacttacaaaatgttgtagttatgggaagaactagctgggaaagtattccagaacgatttaggccgttagttaatagaataaatgttgtattatcaagatcattaaaaaaagaagacataaaaggagatgctattttaataaataatgtggatgatttacttctattactaagaaaaataaattattataaatgttttattattggtggttcagttgtatacaatgaatttttaaaaagaaatttaataaaaaaaatatactttacaagaataaatagtacgtatgagtgtgatgttttttttccagaaataaaggaaacggaatttgaaattatgtctctaagtgatgtgtatagcaataatggtgcaacattagactttgtaatttataagagaaaaaaagaaatattaaataatgaaaaccccattgaaaataataaagaagcagatatatgttctcaagattccccaaataactatttcactggagaggatgtttacaaaaacatggatgatgacgatgattatgtatattttaattttaataatacaaaggaaaagaaaaattctgaaataagtgatgattttaaaatatacaatagcttgaaatataaatatcatccggaatatcaatatttaaatattatatatgatgttattatgaatgggaataaacaaggtgatagaactggtgttggagtagtaagtaagtttggatatatgatgaaatttaatttaaatcaatattttcctttattaacaacaaaaaaattgttcataagaggaattattgaagaactgttatggtttataagaggggaaactaatggaaacactctgttgaataaaaatgtgagaatatgggaagccaacggaacaagggaattcttagataaaagaaaattatttgatagagaagttaatgatttgggacccatttatggttttcaatggagacattttggtgctgaatatactaatatgcatgacaattatgaaaataaaggagtagatcaattaaaaaatattatcaatttaataaaaaatgagcccactagtagaagaattattttatgtgcatggaatgtaaaggatttagataaaatggcattaccaccttgtcatattttatgtcaattttatgtctttgataataaattgtcatgcattatgtatcaaaggtcatgtgatttgggattaggagttccttttaatattgcatcatattcaatttttacttatatgattgcacaagtgtgtaatttgcaacctgcacagttcatacatattttaggaaatgcacacgtatataacaatcatatcgatagtttaaaaaagcaactaaacagaataccatatcctttcccaactctcaagttaaatccagatataaagaatatagaagactttaaagtttctgattttacaatagaaaattatgtacatcatgataaaatttctatggatatggctgcataa

SEQ ID NO: 17655 - protein, 589 aa, Plasmodium gallinaceum
MNEISDIFDIHAICACCKVENKNEKKKNEIFSNNTFRGIGNKGVLPWKSNPLDMKYFTTVTTYVNESKYKKLKYKREKYLEKTKDTKCLESIIQLSNNLQNVVVMGRTSWESIPERFRPLVNRINVVLSRSLKKEDIKGDAILINNVDDLLLLLRKINYYKCFIIGGSVVYNEFLKRNLIKKIYFTRINSTYECDVFFPEIKETEFEIMSLSDVYSNNGATLDFVIYKRKKEILNNENPIENNKEADICSQDSPNNYFTGEDVYKNMDDDDDYVYFNFNNTKEKKNSEISDDFKIYNSLKYKYHPEYQYLNIIYDVIMNGNKQGDRTGVGVVSKFGYMMKFNLNQYFPLLTTKKLFIRGIIEELLWFIRGETNGNTLLNKNVRIWEANGTREFLDKRKLFDREVNDLGPIYGFQWRHFGAEYTNMHDNYENKGVDQLKNIINLIKNEPTSRRIILCAWNVKDLDKMALPPCHILCQFYVFDNKLSCIMYQRSCDLGLGVPFNIASYSIFTYMIAQVCNLQPAQFIHILGNAHVYNNHIDSLKKQLNRIPYPFPTLKLNPDIKNIEDFKVSDFTIENYVHHDKISMDMAA

SEQ ID NO: 17656 - DNA, 1002 bp, Rhesus monkey rhadinovirus H26
  CDS (1)..(1002)
atgattgtcctggtgcatctcggtatttgctacgttaaaaaaattatacccgtttgcgtggctggaatcgcggccgcacgacgccgggtttcttccacacctgaaggtgccgcggccgtccgctgcgcgtgccgcggcgagcacggcgagctgcagtacctggcgcacctggatttaatcatcaaacacggcgtgcagagggaggacaggacgggcgtgggcaccaggtccgtgttcgggcttcaggcccgatataaccttagggacgagtttcccctgttaaccaccaaaagggtgttctggaggggcgtcgtggaggagttgctgtggtttatcaggggctccaccgactccaccgaactgtcgcgccgcggcgtaaagatttgggacgcgcacggatcccgcgcctttttggcggcgcagggcttcggggaccgccgcgagggcgatctggggccggtgtacgggttccagtggagacattttggggcggagtacaggggggccgacgccaactacgagggtcagggggtggaccagctgcgttacgtggtggatctaattaacaggcggccccacgatcggcgcatcgtcatgtgcgcgtggaaccccgcggacctcgcgcggatggccctccctccttgtcacgttttgtgtcagttttacgtggctcggggggagctgtcctgccagctgtaccagaggtccgccgacatgggccttggggtcccgtttaacatcgccagctacgccctcctgacgtatctgatcgctcacgtcacgggcctgaccccgggagactttgtgcacaccttgggtgacgcccacgtttacaacaaccacgttgatcccctgctgcttcagctgcggaggaccccgcgtccgtttccgcggctgaagattttgagaaaggtggcgcgtctggaggactttacgcgcgcggatctgagtctcgagggctacgacccccatccccacatagagatggagatggccgtttga

SEQ ID NO: 17657 - protein, 333 aa, Rhesus monkey rhadinovirus H26
MIVLVHLGICYVKKIIPVCVAGIAAARRRVSSTPEGAAAVRCACRGEHGELQYLAHLDLIIKHGVQREDRTGVGTRSVFGLQARYNLRDEFPLLTTKRVFWRGVVEELLWFIRGSTDSTELSRRGVKIWDAHGSRAFLAAQGFGDRREGDLGPVYGFQWRHFGAEYRGADANYEGQGVDQLRYVVDLINRRPHDRRIVMCAWNPADLARMALPPCHVLCQFYVARGELSCQLYQRSADMGLGVPFNIASYALLTYLIAHVTGLTPGDFVHTLGDAHVYNNHVDPLLLQLRRTPRPFPRLKILRKVARLEDFTRADLSLEGYDPHPHIEMEMAV

SEQ ID NO: 17658 - DNA, 939 bp, Caenorhabditis elegans
  CDS (1)..(939)
atgaacaaagaaaatatcatcgccgatgcgccttctgatgtcgtaaaaaccgttcaacagcaagttcacttgaatcaagatgaatataaatatttgaagcaagttgagcaaattttgagagaaggaacacgaagagatgatcgcactgggactggaactatttcgatttttggaatgcaatcgaaatactgtttgagaaatggcacaattccgttgcttaccacgaaacgtgtctattggaagggagttctcgaggaattactttggtttatttctggatcgaccgatggaaagcttttgatggagaaaaatgtgaagatttgggagaaaaacggcgatcgcgcgttccttgacaatctcggatttacgtctcgtgaagaaggagatcttggaccagtttatggatttcaatggagacactttggggcgaaatatgtggattgtcatacagattactctggacaaggtgttgatcagttggctgaagttatccgacagattaaggagcaaccggatagtcgaagaatcattatgtccgcgtggaatccgtcggatcttggacaaatggttctgccaccgtgtcacacaatgtgtcagttctatgtggacaatggagagctctcgtgtcagctttaccaacgaagtggagatatgggtctcggagttccattcaaccttgccagctacggccttctcacccacatgattgcaaaagtgtgtggattgaaaccaggaacccttgttcatactctcggagatgctcatgtctactcaaatcatgtggatgctctcaaaattcaactggaccgtgagccatacgctttccccaaaattcgattcacgcgagacgtggcctcaatcgatgatttcacttctgatatgattgccctggatgactacaagtgtcatccaaaaatcccaatggatatggctgtttga

SEQ ID NO: 17659 - protein, 312 aa, Caenorhabditis elegans
MNKENIIADAPSDVVKTVQQQVHLNQDEYKYLKQVEQILREGTRRDDRTGTGTISIFGMQSKYCLRNGTIPLLTTKRVYWKGVLEELLWFISGSTDGKLLMEKNVKIWEKNGDRAFLDNLGFTSREEGDLGPVYGFQWRHFGAKYVDCHTDYSGQGVDQLAEVIRQIKEQPDSRRIIMSAWNPSDLGQMVLPPCHTMCQFYVDNGELSCQLYQRSGDMGLGVPFNLASYGLLTHMIAKVCGLKPGTLVHTLGDAHVYSNHVDALKIQLDREPYAFPKIRFTRDVASIDDFTSDMIALDDYKCHPKIPMDMAV

SEQ ID NO: 17660 - DNA, 924 bp, Trichinella spiralis
  CDS (1)..(924)
atgacagaaactgttcacaaattagatactaattcaacatctcaggatgattacgtgaatcaggaggaactgaattatttgaatcaactgaaggacataattgatcacggtgttcgtaaaaacgatcgtactggaatcggaacattgtcaacttttggaacgcagtctcggtattgccttcgagatgatatttttccgcttcttacaacaaaacgcgtcttttggagaggagtggtcgaagaactgctttggttcatcagtggaagcaccaatgctaaacagctttcagagaagaatgtcaacatttgggatggaaattcttccagagaattcctagacagtagaggactgtacaattatgaagaaggtgatttggggcctgtttatggtttccaatggcgccactttggatgcccgtattcatcgatgacggccgattataaaggaaaaggctacgatcaattacaacagtgtattaaaatgattcgtgaagaaccggaaagtcgacgaatcatcatgaccgcatggaatccctgtgatttagagaaagtcgctttgccaccttgtcactgtttcgtccaattttacgttgctgatggggagctatcttgtcaaatgtatcaacgaagtgcagatatgggattgggagtgccgtttaacattgccagctattctttactgacacgtatgatagcccacattacttcactgaagccagggtttttcatacatacaatcggagatgcgcatgtctacttaacacatgttgacgctttgaaagttcaaatggaaagaaaaccaagaccgtttccgaagctgaaaattttaagaaatgtggaaaatattgatgattttcgggctgaagactttgaattaattaattataaaccatatccaaaaatatcaatgcctatggctgtgtga

SEQ ID NO: 17661 - protein, 307 aa, Trichinella spiralis
MTETVHKLDTNSTSQDDYVNQEELNYLNQLKDIIDHGVRKNDRTGIGTLSTFGTQSRYCLRDDIFPLLTTKRVFWRGVVEELLWFISGSTNAKQLSEKNVNIWDGNSSREFLDSRGLYNYEEGDLGPVYGFQWRHFGCPYSSMTADYKGKGYDQLQQCIKMIREEPESRRIIMTAWNPCDLEKVALPPCHCFVQFYVADGELSCQMYQRSADMGLGVPFNIASYSLLTRMIAHITSLKPGFFIHTIGDAHVYLTHVDALKVQMERKPRPFPKLKILRNVENIDDFRAEDFELINYKPYPKISMPMAV

SEQ ID NO: 17662 - DNA, 1029 bp, Halobacterium volcanii
  CDS (1)..(1029): transl_table=11
atgacgaccacacccaaccagggcacttctcatgcgccaatatttgacctcgtcacggacgtttttggaaccgggcggcacaaaccgaatcgaacgggcgtcgataccatctcgggcttctcgaagcactacaccgtcgacctccaagagggctttccgttgctcacgacgaaggacctctcgggcttccgctggaactccctcatccacgaactgctgtggtatttttccggcgaggaacacatccgcaccctccgcgaggagacgggcatttgggacgcgtgggccgacgaggagggccaccttgacacggcctacggccggttctggcggcgctacccggtccccgaggaggggcttgcgggcgaggcgtggcccgacgacggccaccgctggatgaacgacgaggggacgttcgaccagctcgcgtacgtcctcgacacgctcgacgagaacccgaactcgcgccggctggtcatcaacgcgtggcaccccgccaacgcggccgtctcgacgctcccgccgtgtcactacacgttcgtcttcaacgtgcagggcgacgaactcaacctccatctgacccagcgctccggcgatatcgcgctcggcgtcccgttcaacctcgcggcgtacgccatcctcgcgcaggttgtcgcccagcgcgccggcttcgaactcgggtcgttcgcccacaccatcgtcgacgcccacgtctactgcggggccggcgagcgcggcgcgtggtacggcgaccacctcgacgaactccagtcccgcctcgccgacgtgcagtcgcccgacgaatacctcgacgtgcgcgaatggctcctcgacgcggcccccgaggaggccgacggcgaggaggactacgaccacgtccccggactgctcttgcaggcctcgcgcgagccgcgcgagcgccccgcgctcgacgtggccgacgtgccgctcgaagacctctcgttcgaggacatcgtcctccgcgactacgacccggccgacgggattcgcttcgcggtggccgaatga

SEQ ID NO: 17663 - protein, 342 aa, Halobacterium volcanii
MTTTPNQGTSHAPIFDLVTDVFGTGRHKPNRTGVDTISGFSKHYTVDLQEGFPLLTTKDLSGFRWNSLIHELLWYFSGEEHIRTLREETGIWDAWADEEGHLDTAYGRFWRRYPVPEEGLAGEAWPDDGHRWMNDEGTFDQLAYVLDTLDENPNSRRLVINAWHPANAAVSTLPPCHYTFVFNVQGDELNLHLTQRSGDIALGVPFNLAAYAILAQVVAQRAGFELGSFAHTIVDAHVYCGAGERGAWYGDHLDELQSRLADVQSPDEYLDVREWLLDAAPEEADGEEDYDHVPGLLLQASREPRERPALDVADVPLEDLSFEDIVLRDYDPADGIRFAVAE

SEQ ID NO: 17664 - DNA, 969 bp, Oryza sativa
  CDS (1)..(969)
atgtcaaaaaatgaacagcaataccttgatttagcacaaaaaatattagctgaaggtaacctcaaaggcgaccgtaccggaacggggacgcactccctctttggtacgcaaatgcgctttgacttacaagaaggctttccccttctcacaaccaagaaagttttctttgggttaatcaaatccgaactactctggtttttgcgcggcgataacaacattcgtttcctactacaacataacaaccatatttgggacgaatgggcctttaaaaactgggtagaatcaaacgattacaccggccctgatatgaccaactttggtcatcgcgcagaaactgaccctgaatttgcagccgtctatcaaacgcaaaaagcgatttttgtcgacaagattttaaacgacgatgcgttcatggaaaaatttggttacgtaggtgacgtctatggcaagctctggcgtggttgggaaacgagcagtgtgacagctggtgccgagaccgttgagtcaagttgcggcttagttgaagagattaaaacaacgcctgactctcgtcgccttattttgacagcctggaatgctgatacaacgccgcaagcccccttgccttcatgccacgtcttaagtcaattctatgtcgctgatggcaaattaagccttcagttgtatcaacgttcgggtgatttcttcttgggtgtgccgttcaacattgcgtcatattcacttttgctgcatatgatggccgcacaaaccggttatgaagtgggcgactttgtgcatacaatcggtgacacgcacatttataacaaccacgtggctcaaatcacagaacaactctcacgcccgatgcatcccctaccaaaattatggttaaatccggacgttaaatcaatttttgattacacgatggctgacattaaggtgcttgattatgaaagtgaagctccaattaaggcaccggtcgctgtttaa

SEQ ID NO: 17665 - protein, 322 aa, Oryza sativa
MSKNEQQYLDLAQKILAEGNLKGDRTGTGTHSLFGTQMRFDLQEGFPLLTTKKVFFGLIKSELLWFLRGDNNIRFLLQHNNHIWDEWAFKNWVESNDYTGPDMTNFGHRAETDPEFAAVYQTQKAIFVDKILNDDAFMEKFGYVGDVYGKLWRGWETSSVTAGAETVESSCGLVEEIKTTPDSRRLILTAWNADTTPQAPLPSCHVLSQFYVADGKLSLQLYQRSGDFFLGVPFNIASYSLLLHMMAAQTGYEVGDFVHTIGDTHIYNNHVAQITEQLSRPMHPLPKLWLNPDVKSIFDYTMADIKVLDYESEAPIKAPVAV

SEQ ID NO: 17666 - DNA, 741 bp, Bacteriophage T4
  CDS (1)..(741): transl_table=11
atgattagtgactctatgacagttgaagaaatccgtcttcatttggggcttgcattaaaagaaaaagatttcgtagttgataaaacaggtgttaaaactattgaaattattggcgcatcatttgtagcagatgaaccgtttatttttggcgctcttaatgatgaatacattcagcgtgaacttgaatggtataaatctaaaagcttgttcgttaaagatattccgggtgaaacaccgaagatttggcaacaagtagcatcttctaaaggtgaaattaactcgaattatggttgggctatctggtcagaagataactatgctcagtatgacatgtgtttagctgaacttggtcaaaatcctgattctcgacgtggtatcatgatttatactcgtccatctatgcagtttgactataataaagatggtatgtcagatttcatgtgcacgaatacagtacaatacctgattcgtgacaagaaaatcaatgcggttgttaacatgcgctcaaatgacgtggtcttcggattccgtaatgattatgcatggcaaaaatacgtattagataaattagtatctgatttgaatgcaggtgattcaactcgccagtataaagcaggttccattatatggaatgttggaagcctacatgtgtattctcgtcatttttatttggttgatcattggtggaaaactggcgaaacacatatttcgaaaaaagattatgtaggaaaatacgcttaa

SEQ ID NO: 17667 - protein, 246 aa, Bacteriophage T4
MISDSMTVEEIRLHLGLALKEKDFVVDKTGVKTIEIIGASFVADEPFIFGALNDEYIQRELEWYKSKSLFVKDIPGETPKIWQQVASSKGEINSNYGWAIWSEDNYAQYDMCLAELGQNPDSRRGIMIYTRPSMQFDYNKDGMSDFMCTNTVQYLIRDKKINAVVNMRSNDVVFGFRNDYAWQKYVLDKLVSDLNAGDSTRQYKAGSIIWNVGSLHVYSRHFYLVDHWWKTGETHISKKDYVGKYA

SEQ ID NO: 17668 - DNA, 1560 bp, Arabidopsis thaliana
  CDS (1)..(1560)
atggcaacaactactctcaatgacagtgtcaccactacacttgcttcagagcctcaaaggacttaccaagttgttgttgctgcaactaaagaaatgggtattggtaaagatgggaaattgccatggaatttgccaacagatctcaagttctttaaagacattactttgaccacttcagattcctctaagaaaaatgctgttgtgatgggtagaaagacttgggagtctattcccattaagtataggccgctttcgggtcggcttaacgttgttctaactcgttctggtgggtttgatatagccaacactgagaatgttgtcacttgtagtagtgtagattctgctcttgatttgttagctgcgccgccgtattgtttatctattgagagggtttttgttataggaggtggtgacatattgagggaagcattgaataggcctagttgtgatgctatccatttaactgagattgatacaagtgttgactgtgatacgtttatacctgcgattgatacttctgtttatcagccttggtcttcatcgtttccagtaactgaaaatggacttcggttttgcttcacgacttttgtccgtgtaaagagttctgctgatgaatcttctgatgaaagcaatgggtcacagtctcttcaatttgatgggaagaagtttttgtttcttcctaagatggtttttgatcagcatgaggagtttctgtatttgaatatggttgaagatattatctctaatggcaatgtgaagaatgataggaccgggactggtacattatcaaaatttggttgccagatgaaattcaatttacgcagaagttttccacttctgacaacaaagcgagttttctggagaggtgttgttgaggaacttctatggttcataagcggttcaaccaatgcaaaagtccttcaggaaaaaggtatccatatatgggatgggaatgcgtcaagagagtatctcgatggtatcggcctgacagagagagaggaaggcgaccttggacctgtatacggatttcaatggcgacactttggtgctaagtacacagatatgcatgctgattatactggtcaaggatttgatcaacttgtagatgtaattgacaaaatcaagaacaatcctgatgatcggcgtattataatgtcagcttggaatccttctgatcttaagctgatggcacttcctccatgccatatgtttgcacaattttatgtggcagaaggggaactctcatgtcaaatgtatcagcgttcagcagatatgggccttggtgtgccgtttaacattgcttcttactctcttcttacttgcatgctggctcatgtgtgtgatcttgttcctggtgattttatccatgttcttggggatgctcatgtatacaaaactcacgtgaggcctctgcaagagcaacttctgaatcttccaaaaccctttcctgtaatgaagataaacccggagaagaaacaaatcgattcttttgtggcttctgactttgacctcacaggctatgatcctcacaagaagatagaaatgaaaatggcggtttag

SEQ ID NO: 17669 - protein, 519 aa, Arabidopsis thaliana
MATTTLNDSVTTTLASEPQRTYQVVVAATKEMGIGKDGKLPWNLPTDLKFFKDITLTTSDSSKKNAVVMGRKTWESIPIKYRPLSGRLNVVLTRSGGFDIANTENVVTCSSVDSALDLLAAPPYCLSIERVFVIGGGDILREALNRPSCDAIHLTEIDTSVDCDTFIPAIDTSVYQPWSSSFPVTENGLRFCFTTFVRVKSSADESSDESNGSQSLQFDGKKFLFLPKMVFDQHEEFLYLNMVEDIISNGNVKNDRTGTGTLSKFGCQMKFNLRRSFPLLTTKRVFWRGVVEELLWFISGSTNAKVLQEKGIHIWDGNASREYLDGIGLTEREEGDLGPVYGFQWRHFGAKYTDMHADYTGQGFDQLVDVIDKIKNNPDDRRIIMSAWNPSDLKLMALPPCHMFAQFYVAEGELSCQMYQRSADMGLGVPFNIASYSLLTCMLAHVCDLVPGDFIHVLGDAHVYKTHVRPLQEQLLNLPKPFPVMKINPEKKQIDSFVASDFDLTGYDPHKKIEMKMAV

SEQ ID NO: 17670 - DNA, 1557 bp, Arabidopsis thaliana
  CDS (1)..(1557)
atggcaaacactctcaatggaaatgtgatcatgacttcaaagcctcagagtacttaccaagttgtggtagctgcaaccaaggaaatgggtattggtaaagacggaaaacttccatggaatttgcctaccgatctcaagttcttcaaggatttaactttgtccacttcggattctgctaagaagaacgctgttgttatgggtaggaaaacgtgggagtctattcccaaaaagtataggccactctctggtcgcctgaatgttgtcttgtctcgttctagcggtttcgatatagccaacactgaaaatgttgtaacttgcagtagcatagattctgctctagacttattagctgcacctccgtttagtctgtccattgagaaagtgtttgtaataggaggtggcgacatattgagggaagctttgaataaaccgagctgtgaagccatccacataactgagattgatacaagtatcgactgtgatacatttattcccacggttgacacttctgcatatcagccttggtgttcgtcgtttccaatatgtgaaaatggtcttcgattttccttcacgactcatgttcgtgtaaagagttcttctgccggtgaagcctctgatgagagtgatgggtcaaaggttcttcaagttgattggaagaagttttcttctgttcttcctaaaatgatttttgaccggcatgaggaatatctctacttaaatctggtcaaagagataatctcaaatggaaacttaaaagacgataggacagggactggtacattatctaaatttggttgtcagatgaaattcaatttacgcaggaattttccacttctgacgacaaagagagttttctggagaggtgttgttgaggaacttctatggttcataagcggttcaaccaatgcaaaggtacttcaagaaaagggtatccgtatatgggatgggaatgcgtcgagagcatatcttgatggtattggactgactgagagagaggaaggtgaccttggacccgtttatggatttcagtggagacactttggtgctaagtacacagatatgcatgctgattatactggccaaggatttgatcagctcttagatgtaattaacaagatcaagaacaatcctgatgatcgacggattataatgtcagcttggaatccttctgatcttaagctgatggcacttcctccatgccacatgtttgcacagttttatgttgcaaatggagaactttcatgtcaaatgtatcagcgttcagccgatatgggtctcggcgtaccgtttaacattgcctcatactcccttcttacatgcattcttgctcacgtctgcgatcttgttcctggtgattttatccatgtgattggagatgctcatgtttacaaaaaccatgtcaggcctctgcaagagcaacttgagaacccaccaaaaccttttcctgttttgaagataaatccagagaagaaagatatagattcttttgttgcggatgactttgagctcattggctatgatcctcacaagaaaatagatatgaaaatggctgtttag

SEQ ID NO: 17671 - protein, 518 aa, Arabidopsis thaliana
MANTLNGNVIMTSKPQSTYQVVVAATKEMGIGKDGKLPWNLPTDLKFFKDLTLSTSDSAKKNAVVMGRKTWESIPKKYRPLSGRLNVVLSRSSGFDIANTENVVTCSSIDSALDLLAAPPFSLSIEKVFVIGGGDILREALNKPSCEAIHITEIDTSIDCDTFIPTVDTSAYQPWCSSFPICENGLRFSFTTHVRVKSSSAGEASDESDGSKVLQVDWKKFSSVLPKMIFDRHEEYLYLNLVKEIISNGNLKDDRTGTGTLSKFGCQMKFNLRRNFPLLTTKRVFWRGVVEELLWFISGSTNAKVLQEKGIRIWDGNASRAYLDGIGLTEREEGDLGPVYGFQWRHFGAKYTDMHADYTGQGFDQLLDVINKIKNNPDDRRIIMSAWNPSDLKLMALPPCHMFAQFYVANGELSCQMYQRSADMGLGVPFNIASYSLLTCILAHVCDLVPGDFIHVIGDAHVYKNHVRPLQEQLENPPKPFPVLKINPEKKDIDSFVADDFELIGYDPHKKIDMKMAV

SEQ ID NO: 17672 - DNA, 1548 bp, Crithidia fasciculata
  CDS (1)..(1548)
atgtcacgcgcagctgccaagttcaagatcccgatgccggtcaccaaggccgacttcgccttcccctccctccgcgccttcagcatcgtcgtcgcggccgatcagcagcacggtattggcgacggcgagacgattccgtggacggtgccggagacactggccttcttcaaggaccagacgacgctgctgcgcaacaagaagcccccgacggagaagaagcgcaacgctgtggtgatgggccgcaagacgtgggaagtgccgctcaagttccgtcctctcaagggtcgcctgaacgtggtgctctcctgcaggcgaccggtggacgaccttctggcgcagctgccagaggagaagcgcgctgccgccgctgccgatgtcgtgatcaacggtgggctgaaggaggccctgcacctgctggctcgtccgccgtactgcagttcgattgagacggcgtactgcatcggcggcgcgcgggtctacacagaggcgatgcagtccccgtgtgtggagaagttgaaggaggtgtacctgacccgcgtgcacacggcgccgacgtgcaaccgcttctacgagttcgtacggcggagaagagcgcgcgcagcagtggacctggagtccacctctggcgtgaaggtgagcgacgcagcggcacacctgtcgtatgagattatgaagtacgtgccacacaacgctgaggagcggcagtacctggagctcatcgaccgcatcatgaagaccgggctggtgaaggaggaccgcaccggcgtcggcaccatcagcctcttcggcgcgcagatgttctcgctgcgggacaaccagctgccgctgctgacgacgaagcgcgtcttctggcgtggcgtctgcgaagagctcatctggttcctccgtggcgagacaaacgcgcacgtgctggcagacaaggacattcacatctgggacggcaacggctcccgcgagttcctcgacagccgtgggctaacggagaacaaagagatggaccttgggccggtgtacggctttcagtggcgacacttcggggcagactacaaaggcttcgacgcgaattacgacgagggcgtggatcagatcaagacgattgttgagaccctcaagacgaacgaccgccgtctgctcgttacggcgtggaacccgtgcgcgctgcacaagatggccgtgcggccctgccacctcctcggccagttctatgtgaacacgcagacgaaggagctgtcctgcatgctgtaccagcgctgctgcgacatgggtctcggcgtgcccttcaacatcgcgtcgtacgccttgctgacgattctgattgccaaggcgaccgggctgcgtcctggagagctcgtgcacaccctcggtaccgcgcatgtgtacagcaaccacgtggaggcgctgaaggagcagctgcagcgggtgcccgtggccttccccgtgctcgtcttcaagaaggagcgcgagtttttggaggactacgagtcgacggacatggaggtggtcgactacgtgccctacccgcccatcaagatggagatggctgtctaa

SEQ ID NO: 17673 - protein, 515 aa, Crithidia fasciculata
MSRAAAKFKIPMPVTKADFAFPSLRAFSIVVAADQQHGIGDGETIPWTVPETLAFFKDQTTLLRNKKPPTEKKRNAVVMGRKTWEVPLKFRPLKGRLNVVLSCRRPVDDLLAQLPEEKRAAAAADVVINGGLKEALHLLARPPYCSSIETAYCIGGARVYTEAMQSPCVEKLKEVYLTRVHTAPTCNRFYEFVRRRRARAAVDLESTSGVKVSDAAAHLSYEIMKYVPHNAEERQYLELIDRIMKTGLVKEDRTGVGTISLFGAQMFSLRDNQLPLLTTKRVFWRGVCEELIWFLRGETNAHVLADKDIHIWDGNGSREFLDSRGLTENKEMDLGPVYGFQWRHFGADYKGFDANYDEGVDQIKTIVETLKTNDRRLLVTAWNPCALHKMAVRPCHLLGQFYVNTQTKELSCMLYQRCCDMGLGVPFNIASYALLTILIAKATGLRPGELVHTLGTAHVYSNHVEALKEQLQRVPVAFPVLVFKKEREFLEDYESTDMEVVDYVPYPPIKMEMAV

SEQ ID NO: 17674 - DNA, 1587 bp, Daucus carota
  CDS (1)..(1587)
atggctagcgaactgctcgcaaatcctactaatggaagtggcattacacgccctgatccacaaagaacttatcaggttgtggttgctgcaacccaaaatatgggtatcggtaaggatggtaaattgccctggaggttaccttctgacatgaaatttttcaaggatgtcaccatgactacatcagatcctttgaaaaggaatgcagtcataatgggtaggaaaacttgggaaagtattcccattcaacatcgccctctgccaggacgtcttaatgttgttttgactcgttctgggagttttgatattgcaactgtcgaaaatgtcgtaatatgtggtagcatgatttctgctttggaattattagcaggatctccttattgtgtttcagttgagaaggtttttgtcattgggggtggccagatatatagggaagctctcaatgctcctggatgtgatgcagtccacatcactgaaattgaagaacacatagaatgtgataccttcattcctcttctcgatgaatcagtttttcagccatggtactcatcattcccattggtggagaacaaaattcgttattgtttcacgacttatgttcgtgtgaggaattctgttgcggagctcacaagtcagaccaacggctgttcatctgatagtaaatcagattctggtaattttgaaattcagaatttctcttttcttcccaagacagtttttgagaaacatgaggagtatttgtatctgggattggttgagaatatcatttctaatggtgtgacaaagaatgataggacacgtactggtactgtctctatatttggttgccagatgcggtttaatttgcgcaaatcttttccactcctcacaactaagaaagtgttttggaggggagttgttgaggaactactgtggttcattagtggctcaactaatgctaagattctaaaagagaagggcgttaatatttgggaaggcaatggatcaagggagtatcttgacagtattggtttgacggatagagaagaaggtgacttggggcctatatatggttttcagtggagacactttggtgcaaggtatactgatatgcatgctgactactcaggccagggatttgatcagttgctagatgttatttcaaagataaaaaataatcctgatgataggaggatcattcaatcagcttggaatccatctgatctcaggctaatggcacttccaccctgtcacatgtttgcacagttctatgtagccaatggcgagttatcttgtcaaatgtatcagcgctctgctgatatgggtctcggtgttccattcaacattgcagcatatgcacttttgacatgcatgattgctcatgtttgtgacctggttcctggagactttgttcattctattggtgatgctcatgtctactcgaaccacctgtcagacctcttcgagaccagcttcagaatgttgcctaagacctttccggttttgaagatcaattctggagaaaaggacattgactcatttgaggctgctgatttcaaactcattggttatgatccgcaccagaaaatcgaaatgaaaatggcagtataa

SEQ ID NO: 17675 - protein, 528 aa, Daucus carota
MASELLANPTNGSGITRPDPQRTYQVVVAATQNMGIGKDGKLPWRLPSDMKFFKDVTMTTSDPLKRNAVIMGRKTWESIPIQHRPLPGRLNVVLTRSGSFDIATVENVVICGSMISALELLAGSPYCVSVEKVFVIGGGQIYREALNAPGCDAVHITEIEEHIECDTFIPLLDESVFQPWYSSFPLVENKIRYCFTTYVRVRNSVAELTSQTNGCSSDSKSDSGNFEIQNFSFLPKTVFEKHEEYLYLGLVENIISNGVTKNDRTRTGTVSIFGCQMRFNLRKSFPLLTTKKVFWRGVVEELLWFISGSTNAKILKEKGVNIWEGNGSREYLDSIGLTDREEGDLGPIYGFQWRHFGARYTDMHADYSGQGFDQLLDVISKIKNNPDDRRIIQSAWNPSDLRLMALPPCHMFAQFYVANGELSCQMYQRSADMGLGVPFNIAAYALLTCMIAHVCDLVPGDFVHSIGDAHVYSNHLSDLFETSFRMLPKTFPVLKINSGEKDIDSFEAADFKLIGYDPHQKIEMKMAV

SEQ ID NO: 17676 - DNA, 1563 bp, Leishmania amazonensis
  CDS (1)..(1563)
atgtccagggcggctgcgaagttcaagattccgatgccggtgacgaaggcggacttcgccttcccctccctgcgcgccttctccatcgtcgtggccctcgataagcagcacggcatcggcgacggcgagtcgatcccgtggcgggtgccggaggacatggcgttcttcaaggaccagacgacgctgctgcgcaacaagaagccgccgacggacaagaagcgcaacgccgtcgtgatggggcgcaagacgtgggagagcgttccggtaaagttccggccactcaagggccggctgaacgttgtgttgtcctcgaaggccaccgtcgaggagcttctggcgccactgccggaggaaaagcgcgcggcggcggcgcaggacattgtggtggtgaacggcggtctggccgcggccgtccgcctcctcgcacgtccgccgtactgcagctccatcgagacggcgtactgcgtcggcggtgcgcaggtgtatgcggacgccatgctgtcgccatgcgtcgagaagctgcaggaggtgtacctgacccgcatccacacgacggcgcctgcgtgcacgcgcttcttcccgtttcctcccgagaacgccgccacggcgtgggacctggcgtcgtctcagggacgccgcaagagcgcggtggacggcctcgagttcgagatttgcaagtacgtgccgcgcaaccacgaggagcggcagtaccttgagctgattgaccgcatcatgaagacggggatcgcgaaggaggaccgcaccggcgtgggcaccttgagcctcttcggcgcacagatgcggttctccctacgcgacaaccgcctgccactgctgacgacgaagcgcgtcttctggcgaggcgtgtgcgaggagttgctgtggttcctgcgcggggagacaaacgcgcagctgctcgcggacaaggacatacacatctgggacggcaacggctcgcgcgagtttctcgacagccgcggcttgacagagaatacggagatggacctcggccctgtctacggcttccagtggcgccacttcggggcagaataccgggggctcgaagcgaactacgacggcgagggggtggaccagatcaagttcatcgtggagacgatcaaggcgaacccgaacgaccgccgtctcctgttcactgcgtggaacccgtgcgcgctgcacaagatggcactgccgccgtgccacttgctcgctcaattctacgtgaacacggagaagagcgagctatcctgcatgctgtaccaacgttcgtgcgacatgggcctcggcgtccccttcaacatcgcctcctacgcgctgctcaccatcctcattgccaaggcgacgggtctgcggcctggtgagcttgtgcacaccctcggcgacgcccacgtctaccgcagccacatcgatgccctcaaggcgcagctcgagcgagtcccgcacgcgttcccgaccctcgtgttcaaggaggagcggcagttcctcgaggactacgagttgatggacatggaggtgatcgactacgtgccgcacccgccgatcaagatggagatggccgtatag

SEQ ID NO: 17677 - protein, 520 aa, Leishmania amazonensis
MSRAAAKFKIPMPVTKADFAFPSLRAFSIVVALDKQHGIGDGESIPWRVPEDMAFFKDQTTLLRNKKPPTDKKRNAVVMGRKTWESVPVKFRPLKGRLNVVLSSKATVEELLAPLPEEKRAAAAQDIVVVNGGLAAAVRLLARPPYCSSIETAYCVGGAQVYADAMLSPCVEKLQEVYLTRIHTTAPACTRFFPFPPENAATAWDLASSQGRRKSAVDGLEFEICKYVPRNHEERQYLELIDRIMKTGIAKEDRTGVGTLSLFGAQMRFSLRDNRLPLLTTKRVFWRGVCEELLWFLRGETNAQLLADKDIHIWDGNGSREFLDSRGLTENTEMDLGPVYGFQWRHFGAEYRGLEANYDGEGVDQIKFIVETIKANPNDRRLLFTAWNPCALHKMALPPCHLLAQFYVNTEKSELSCMLYQRSCDMGLGVPFNIASYALLTILIAKATGLRPGELVHTLGDAHVYRSHIDALKAQLERVPHAFPTLVFKEERQFLEDYELMDMEVIDYVPHPPIKMEMAV

SEQ ID NO: 17678 - DNA, 1563 bp, Leishmania major
  CDS (1)..(1563)
atgtccagggcagctgcgaggtttaagattccgatgccggagacgaaggcagactttgctttcccctccctgcgcgccttctccatcgtcgtggccctcgatatgcagcacggcatcggcgacggcgagtcgatcccgtggcgggtgccggaggacatgacgttcttcaagaaccagacgacgctgctgcgcaacaagaagccgccgacggagaagaagcgcaacgccgtcgtgatgggccgcaagacttgggagagcgtcccggtaaagttccgaccactcaagggacggctgaacatcgtgttatcctcgaaggccaccgtcgaggagcttctggcgccgctgccggagggacagcgcgcggcggcggcgcaggatgtggtggtggtgaacggcggtctggccgaggcgctccgcctcctcgcacgcccgctgtactgcagctccatcgagacagcgtattgcgtcggtggtgcgcaggtttacgcggacgccatgctgtcgccgtgcatcgagaaactgcaggaagtgtacctgacccgcatctacgcgacggcgcctgcgtgtacgcgcttctttccgtttccgcccgagaacgcggccacggcgtgggacctggcgtcgtctcagggacgccgcaagagcgaggcggagggcctcgagttcgagatctgcaagtacgtgccgcgcaaccacgaggagcggcagtaccttgagctgattgaccgcatcatgaagacggggatcgtgaaggaggaccgcaccggcgtgggcaccatcagcctcttcggcgcccagatgcgcttctccctacgcgacaaccgcctgccgctgctgacgacgaagcgtgtcttctggcgcggcgtgtgcgaggagctgctgtggttcctgcgcggggagacgagtgcgcagctgctggcagacaaggacattcacatctgggacggcaacggttcgcgcgagtttctcgacagccgcggcttgacagagaataaggagatggacctcggccctgtctacggcttccagtggcgccacttcggggcagattacaaggggtttgaagcgaactacgacggcgaaggggtggaccagatcaagctcatcgtggagaccatcaagacgaacccgaacgaccgccgcctcctagtcactgcctggaacccgtgcgcgctgcaaaagatggcgctgccgccgtgccacttgcttgctcagttctacgtgaacacagacacgagcgagctatcctgcatgttgtaccagcgctcgtgtgacatgggtcttggcgtccccttcaacattgcctcctacgcgctgctcaccatcctcattgccaaggcgacgggtctgcggcctggtgagcttgtgcacaccctcggcgacgcccacgtctaccgcaaccacgttgatgccctcaaggcgcagctcgagcgagtcccgcacgcgttcccgaccctcatcttcaaggaggagcggcagtacctcgaggactacgagttgacggacatggaggtgatcgactacgttccacacccggcgatcaagatggagatggccgtatag

SEQ ID NO: 17679 - protein, 520 aa, Leishmania major
MSRAAARFKIPMPETKADFAFPSLRAFSIVVALDMQHGIGDGESIPWRVPEDMTFFKNQTTLLRNKKPPTEKKRNAVVMGRKTWESVPVKFRPLKGRLNIVLSSKATVEELLAPLPEGQRAAAAQDVVVVNGGLAEALRLLARPLYCSSIETAYCVGGAQVYADAMLSPCIEKLQEVYLTRIYATAPACTRFFPFPPENAATAWDLASSQGRRKSEAEGLEFEICKYVPRNHEERQYLELIDRIMKTGIVKEDRTGVGTISLFGAQMRFSLRDNRLPLLTTKRVFWRGVCEELLWFLRGETSAQLLADKDIHIWDGNGSREFLDSRGLTENKEMDLGPVYGFQWRHFGADYKGFEANYDGEGVDQIKLIVETIKTNPNDRRLLVTAWNPCALQKMALPPCHLLAQFYVNTDTSELSCMLYQRSCDMGLGVPFNIASYALLTILIAKATGLRPGELVHTLGDAHVYRNHVDALKAQLERVPHAFPTLIFKEERQYLEDYELTDMEVIDYVPHPAIKMEMAV

SEQ ID NO: 17680 - DNA, 1566 bp, Zea mays
  CDS (1)..(1566)
atggccgcagttctagccaatggtgattcacagggtcgtcctcagaggaactatcaagttgttgttgctggcactcgtgacatgggcattgggaaggatggggtcttgccatggaagcttcctggtgatcttaaattctttaaagagcttacactaactacatctgatcctgtcaaaaagaatgcagttataatgggaaggaaaacatgggagagcattccggttaagtcaaggccattgcctggtcgtttgaatgtcatacttactcgatctggtagttttgattttgcaacagtagagaatgttgttatctgtggaagtatggagtctgccttagaactgctagcatcaactccatattgcttatcaattgagaaagtgtttgttataggaggcgggcaggtactgagagaatatcttaaaggacctgcatgtgaggctatccatctaactgacattcagtcaagcattgagtgtgacactttcatccctccggttgacttctcagtgttccagccatggtattcatctttcccggtgatagagagcaacattaggcattcgtttgtgtcttttgttcgtgttagaaagtcagtggcagaaactcatgagtcaaatggcaaggaatcaaccgaggttgataccaagaatgacaaatttgaaacagagaatttctcttttctccccaagatggtatatgaccgccatgaggagtaccaatatctcaatcttgttgaagatattataaggtctggtgctcagaaaaacgacaggacaggaactggaacattgtcaaaatttgggtgtcagatgcggttcaacttaaggaaaaattttcctctgctgacaacaaagagggtattttggcgtggtgttgtcgaagaactcctttggttcatcagtggctcaacaaatgcaaaggttttgcaagagaagggtattcatatctgggatggcaatgcttcaagagagtatctcaacagtgttggcttggcacacagggaggaaggtgatttaggtccaatttatggatttcagtggcgtcactttggtgctgaatacactgacatgcatgctgactatacgggaaaaggttttgatcagctaatggatgtgattgacaagatcaagaatgatcctgaggaccgtcgaataattttgtcggcgtggaatccttcagatctcaagaagatggctcttcctccttgccacatgtttgcacaattctatgtggaaaatggggagctatcttgccagatgtatcaacgctctgcagacatggggcttggtgttccattcaacatcgcatcatattctctcctgacatacatgattgctcaagtttgtgatctttctcctggagattttgtccatgttataggggatgcccatgtctatagaaaccatgttcgagcactggaggagcaaattcagaagatgcctaaaccatttccaattttgaagataaatccttcaaaaaaggatatagattcttttatggcatcagacttcaagctggttggctatgatccccaccagaagatagagatgaaaatggcagtgtaa

SEQ ID NO: 17681 - protein, 521 aa, Zea mays
MAAVLANGDSQGRPQRNYQVVVAGTRDMGIGKDGVLPWKLPGDLKFFKELTLTTSDPVKKNAVIMGRKTWESIPVKSRPLPGRLNVILTRSGSFDFATVENVVICGSMESALELLASTPYCLSIEKVFVIGGGQVLREYLKGPACEAIHLTDIQSSIECDTFIPPVDFSVFQPWYSSFPVIESNIRHSFVSFVRVRKSVAETHESNGKESTEVDTKNDKFETENFSFLPKMVYDRHEEYQYLNLVEDIIRSGAQKNDRTGTGTLSKFGCQMRFNLRKNFPLLTTKRVFWRGVVEELLWFISGSTNAKVLQEKGIHIWDGNASREYLNSVGLAHREEGDLGPIYGFQWRHFGAEYTDMHADYTGKGFDQLMDVIDKIKNDPEDRRIILSAWNPSDLKKMALPPCHMFAQFYVENGELSCQMYQRSADMGLGVPFNIASYSLLTYMIAQVCDLSPGDFVHVIGDAHVYRNHVRALEEQIQKMPKPFPILKINPSKKDIDSFMASDFKLVGYDPHQKIEMKMAV

SEQ ID NO: 17682 - DNA, 1389 bp, Paramecium tetraurelia
  CDS (1)..(1389): transl_table=6
atgactactaataaaacatttagtatggtattagcaatgactctcaatggaggcatagggtattagaatagattgccttggaaattaaaggaagatcttcagagattcaagaaaatcacaacaggcgggattgtgataatgggaagaaagacattcgaatcgatgaactctaaacctctaccaaacagagtgaatgtagtgatttcaaaaaatatgaaatcatctaatgaagttcaagtgtttcctagaatagaagatgcattacaattttacaatacatctcatcagaaattatatttaataggaggaaagagaatctttgaagaaggtttagcaactgataaatgttcagatgttcatttgactagaataggagtagaaactaagtgcgatgtgtatttgaacaaaaatattttctctacattttaagtgaataagacaagttaaactaaaagtgaaaatgggatcaattatgattatcaacatttaattaataagaattctcacgaacaatcatatatagatgaagaacattaagaaaatcaatatttagatatgataacaaaaataatgaaggagggagtctcaaaggatgacagaactggagtaggtaccatgtctatttttgggtaaactatgagatttaatttggcctaatcctttcctttattaacaacaaagaaagtattctttcgtggagttgttgaggaattgctatggtttttaagagggaatacaaatggtaaattacttttggataagggagttaagatatgggaaggaaatggcacccgagaatatttggataccattggtttataacatagataggaacatgacttaggaccagtctatggatttcaatggagacattttggagctaaatataaggattgttagactgattattccaattaaggagtggattaagtgaaggagattatacaattactgaaaaacaatccagatagtagaagaataatattatcagcttggaatccaattgatttaaaataaatggcattgccaccatgtcatgtgatgtcataattctttgtggcaaatggcaaattgagttgcatgatgtattagagatcatgtgactttggtttgggaattcccttcaatattgctagttatgcattgctcacttacatgttggcaaaggaatgcaatttgaatttgggagaatttgttcatgttttaggagatactcatatttatagtaatcatgtggaggctttaaagaaataaattgagagggttccttatcctttcccacttctgaaaatcaagggtaataagagtttgtttgattacacttatgaagattttgaattggttggatataatgctcatgataaaatagaaatgaaaatggctgtttga

SEQ ID NO: 17683 - protein, 462 aa, Paramecium tetraurelia
MTTNKTFSMVLAMTLNGGIGYQNRLPWKLKEDLQRFKKITTGGIVIMGRKTFESMNSKPLPNRVNVVISKNMKSSNEVQVFPRIEDALQFYNTSHQKLYLIGGKRIFEEGLATDKCSDVHLTRIGVETKCDVYLNKNIFSTFQVNKTSQTKSENGINYDYQHLINKNSHEQSYIDEEHQENQYLDMITKIMKEGVSKDDRTGVGTMSIFGQTMRFNLAQSFPLLTTKKVFFRGVVEELLWFLRGNTNGKLLLDKGVKIWEGNGTREYLDTIGLQHRQEHDLGPVYGFQWRHFGAKYKDCQTDYSNQGVDQVKEIIQLLKNNPDSRRIILSAWNPIDLKQMALPPCHVMSQFFVANGKLSCMMYQRSCDFGLGIPFNIASYALLTYMLAKECNLNLGEFVHVLGDTHIYSNHVEALKKQIERVPYPFPLLKIKGNKSLFDYTYEDFELVGYNAHDKIEMKMAV

SEQ ID NO: 17684 - DNA, 1752 bp, Plasmodium chabaudi
  CDS (1)..(1752)
atggaagatatctctgaaatattcgatatatatgcaatttgtgcatgttgtaaagttctgaacagtaatgaaaaggctggctgttttagtaataagacttttaagggacttgggaatgaaggggggttaccttggaaatgtaattcagtagatatgaaacattttagctctgtaacatcctatgttaatgaaactaactatatgagattaaaatggaaaagggatagatatatggaaaaaaataatgtaaaattaaatactgatggaataccctccgttgataagttacaaaatattgtagtaatgggaaaagcaagttgggaaagcatcccctcaaaatttaagccattacaaaatcgaataaatattatattgtctagaacattgaaaaaagaagatcttgcaaaagaatataataatgttattataattaatagtgtggatgatttatttcctattttaaaatgcataaaatattataaatgttttattataggaggtgcatctgtttataaagagtttttagatcgtaatttaataaaaaaaatatattttacaagaataaataatgcttatacttgtgatgttttatttccagatatcaatgaagatttatttaaaataacatcaattagtgatgtatatagtagtaataacacgactttagattttgtaatttatagtaagacaaaagaaatacatgaagaaattaatcccaacgatgaactatttaataacacatttttaggtgtgtgtgatgaaaaaaatacaaattttgatgatgaagatgattatacatatttcagttttaataaacataaagataatattaaaaaaaattcggagcatgctcatcattttaaaatatataatagtataaaatataaacatcatcctgaatatcaatatttaaatattatatatgatataataatgcatggaaataaacaagatgatagaacaggtgttggtgtattaagtaaatttggatatatgatgaaatttaatttaagtgaatattttccattattaacaacaaaaaaattatttgtaagaggtatcattgaagagttgttatggtttataaggggagaaacaaatggaaatacattattagaaaaaaatgtaagaatatgggaagctaatgggacaagagagtttttagataataggaaattatttcatagagaagttaatgacttaggtccaatttacggatttcaatggaggcactttggtgctgaatatacagatatgcatgctgattataaagataaaggtgttgatcaactaaaaaatattataaatttaattaaaaacgatccgacatgtagacgaattattttatgtgcatggaatgtaaaagatttagatcaaatggcattacctccttgtcatattttatgtcaattttatgtttttgatggaaaattatcatgtattatgtatcaaagatcttgtgatttaggtcttggtgttccattcaatattgcttcctattctatatttacatatatgatagcacaagtatgtaatttacaaccagctgaatttatacatgtattgggaaatgctcatgtttataataatcatgttgaaagcttaaaagttcagttaaatagaacaccctatcctttccctactcttaaattaaatccggaaattaaaaatatcgaggattttacaatttcagattttactgtacaaaattatgtccatcacgataaaatcagtatggatatggcagcttaa

SEQ ID NO: 17685 - protein, 583 aa, Plasmodium chabaudi
MEDISEIFDIYAICACCKVLNSNEKAGCFSNKTFKGLGNEGGLPWKCNSVDMKHFSSVTSYVNETNYMRLKWKRDRYMEKNNVKLNTDGIPSVDKLQNIVVMGKASWESIPSKFKPLQNRINIILSRTLKKEDLAKEYNNVIIINSVDDLFPILKCIKYYKCFIIGGASVYKEFLDRNLIKKIYFTRINNAYTCDVLFPDINEDLFKITSISDVYSSNNTTLDFVIYSKTKEIHEEINPNDELFNNTFLGVCDEKNTNFDDEDDYTYFSFNKHKDNIKKNSEHAHHFKIYNSIKYKHHPEYQYLNIIYDIIMHGNKQDDRTGVGVLSKFGYMMKFNLSEYFPLLTTKKLFVRGIIEELLWFIRGETNGNTLLEKNVRIWEANGTREFLDNRKLFHREVNDLGPIYGFQWRHFGAEYTDMHADYKDKGVDQLKNIINLIKNDPTCRRIILCAWNVKDLDQMALPPCHILCQFYVFDGKLSCIMYQRSCDLGLGVPFNIASYSIFTYMIAQVCNLQPAEFIHVLGNAHVYNNHVESLKVQLNRTPYPFPTLKLNPEIKNIEDFTISDFTVQNYVHHDKISMDMAA

SEQ ID NO: 17686 - DNA, 1827 bp, Plasmodium falciparum
  CDS (1)..(1827)
atgatggaacaagtctgcgacgttttcgatatttatgccatatgtgcatgttgtaaggttgaaagcaaaaatgaggggaaaaaaaatgaggtttttaataactacacatttagaggtctaggaaataaaggagtattaccatggaaatgtaattccctagatatgaaatattttcgtgcagttacaacatatgtgaatgaatcaaaatatgaaaaattgaaatataagagatgtaaatatttaaacaaagaaactgtggataatgtaaatgatatgcctaattctaaaaaattacaaaatgttgtagttatgggaagaacaaactgggaaagcattccaaaaaaatttaaacctttaagcaataggataaatgttatattgtctagaaccttaaaaaaagaagattttgatgaagatgtttatatcattaacaaagttgaagatctaatagttttacttgggaaattaaattactataaatgttttattataggaggttccgttgtttatcaagaatttttagaaaagaaattaataaaaaaaatatattttactagaataaatagtacatatgaatgtgatgtattttttccagaaataaatgaaaatgagtatcaaattatttctgttagcgatgtatatactagtaacaatacaacattggattttatcatttataagaaaacgaataataaaatgttaaatgaacaaaattgtataaaaggagaagaaaaaaataatgatatgcctttaaagaatgatgacaaagatacatgtcatatgaaaaaattaacagaattttacaaaaatgtagacaaatataaaattaattatgaaaatgatgatgatgatgaagaagaagatgattttgtttattttaattttaataaagaaaaagaagagaaaaataaaaattctatacatccaaatgattttcaaatatataatagcttgaaatataaatatcatcctgaataccaatatttaaatattatttatgatattatgatgaatggaaataaacaaagtgatcgaacgggagtaggtgttttaagtaaattcggatatattatgaaatttgatttaagtcaatatttcccattattaactacgaagaaattatttttaagaggaattattgaagaattgctttggtttattagaggagaaacaaatggtaatacgttgttaaataagaatgtaaggatatgggaagctaatggtactagggaatttttagataatagaaaattatttcatagagaagttaacgatttaggacctatttatggttttcaatggagacatttcggtgctgaatatacaaatatgtatgataattatgaaaataaaggagtggatcaattaaaaaatataataaatttaattaaaaatgatcctacaagtagaagaattcttttgtgtgcatggaatgtaaaagatcttgaccaaatggcattacctccttgtcatattttatgtcagttttatgttttcgatgggaaattatcatgtattatgtatcaaagatcatgtgatttagggctaggagtaccttttaatattgcttcttattctatttttactcatatgattgcacaagtctgtaatttgcaacctgcgcagttcatacacgttttaggaaatgcacatgtttataataatcacattgatagtttaaaaattcaacttaacagaataccctatccattcccaacacttaaattaaatccagatattaaaaatattgaagattttacaatttcggattttacaatacaaaattatgttcatcatgaaaaaatttcaatggatatggctgcttaa

SEQ ID NO: 17687 - protein, 608 aa, Plasmodium falciparum
MMEQVCDVFDIYAICACCKVESKNEGKKNEVFNNYTFRGLGNKGVLPWKCNSLDMKYFRAVTTYVNESKYEKLKYKRCKYLNKETVDNVNDMPNSKKLQNVVVMGRTNWESIPKKFKPLSNRINVILSRTLKKEDFDEDVYIINKVEDLIVLLGKLNYYKCFIIGGSVVYQEFLEKKLIKKIYFTRINSTYECDVFFPEINENEYQIISVSDVYTSNNTTLDFIIYKKTNNKMLNEQNCIKGEEKNNDMPLKNDDKDTCHMKKLTEFYKNVDKYKINYENDDDDEEEDDFVYFNFNKEKEEKNKNSIHPNDFQIYNSLKYKYHPEYQYLNIIYDIMMNGNKQSDRTGVGVLSKFGYIMKFDLSQYFPLLTTKKLFLRGIIEELLWFIRGETNGNTLLNKNVRIWEANGTREFLDNRKLFHREVNDLGPIYGFQWRHFGAEYTNMYDNYENKGVDQLKNIINLIKNDPTSRRILLCAWNVKDLDQMALPPCHILCQFYVFDGKLSCIMYQRSCDLGLGVPFNIASYSIFTHMIAQVCNLQPAQFIHVLGNAHVYNNHIDSLKIQLNRIPYPFPTLKLNPDIKNIEDFTISDFTIQNYVHHEKISMDMAA

SEQ ID NO: 17688 - DNA, 1872 bp, Plasmodium vivax
  CDS (1)..(1872)
atggaggacctttcagatgtatttgacatttacgccatctgcgcatgctgcaaggtcgcccccaccagtgaagggacaaagaatgaaccgttcagcccgcggacctttaggggtctgggcaataaggggactctcccatggaaatgcaactccgtcgatatgaagtacttcagctcggtgacgacctacgtggatgagtcaaagtatgagaagctaaagtggaagagggagaggtacctacgaatggaagcctcacagggggggggtgacaacacaagcggtggtgacaacacacacggtggtgacaacgccgacaagctgcaaaacgtcgtggtcatggggagaagcagctgggagagcatccccaagcagtacaagccgctcccaaacagaatcaacgtcgtgctttccaagacgctaacaaaggaagacgtgaaggaaaaggtcttcataattgacagcatagatgacctactgctgctcttaaagaagctgaagtactacaaatgcttcatcattgggggagcacaagtttatagggaatgcctaagtagaaacttaatcaagcagatctacttcacgaggatcaacggcgcctacccgtgtgacgtcttcttccccgagtttgacgaaagccagtttcgggtgacgtccgtcagtgaggtgtacaacagcaagggcaccactctggactttttggtttacagcaaggtgggggggggagttgacgggggcgcctccaacgggagcactgcgacagcgcttcggagaactgcaatgcgttcaactgcaatgcgccgaaatgtagcgccccgaactgccgctcccccaatgggaccgcacagcagggcgaatggggaaagggccccgccgcgtgcccgtgcgagaagaacaacgccgaggcagaggaagacgacctcgtgtacttcagctttaacaacaaagtgggggagaaaaacccggagcacctgcaagattttaaaatttacaacagcctcaagattaatgcagcacccagagtaccaatacctaggcatcatatacgacatcatcatgaatggaaacaaacaaggagacagaacaggtgtgggagtgatgagcaattttggctacatgatgaaatttaatttaagtgaatacttccccctattaacaacaaagaagttatttttgaggggaataattgaggaactgctttggttcattcgaggagaaacaaacggaaacactttgttaaataaaaacgtgaggatatgggaagcaaatggaacgagggagttcctcgacaacaggaaattattccacagagaagtgaatgacttggggcccatttatggcttccagtggagacacttcggtgctgaatacacaaatatgcatgacaattacgaagataaaggtgtagaccaattaaaaaatgttattcatttaataaaaaatgaaccaacaagtaggagaattattttgtgtgcatggaatgtaaaagatttggatcaaatggctttacctccttgtcatattttatgccaattttacgttttcgatgggaaactatcatgcattatgtaccagaggtcttgtgacttgggtcttggggtccccttcaacatcgcttcgtattccatattcacacacatgattgcgcaggtgtgcaatttgcagcctgcacagttcatacacattttgggcaacgcgcacgtctacaacaaccatgttgacagcttgaaagtgcagctgaacaggatcccctacccgttcccaacgcttaaactgaacccggaggtgaagaacattgaggattttaccatttcggatttcacaatagagaattacgtgcaccacgataaaataaccatggagatggccgcctaa

SEQ ID NO: 17689 - protein, 623 aa, Plasmodium vivax
MEDLSDVFDIYAICACCKVAPTSEGTKNEPFSPRTFRGLGNKGTLPWKCNSVDMKYFSSVTTYVDESKYEKLKWKRERYLRMEASQGGGDNTSGGDNTHGGDNADKLQNVVVMGRSSWESIPKQYKPLPNRINVVLSKTLTKEDVKEKVFIIDSIDDLLLLLKKLKYYKCFIIGGAQVYRECLSRNLIKQIYFTRINGAYPCDVFFPEFDESQFRVTSVSEVYNSKGTTLDFLVYSKVGGGVDGGASNGSTATALRRTAMRSTAMRRNVAPRTAAPPMGPHSRANGERAPPRARARRTTPRQRKTTSCTSALTTKWGRKTRSTCKILKFTTASRLMQHPEYQYLGIIYDIIMNGNKQGDRTGVGVMSNFGYMMKFNLSEYFPLLTTKKLFLRGIIEELLWFIRGETNGNTLLNKNVRIWEANGTREFLDNRKLFHREVNDLGPIYGFQWRHFGAEYTNMHDNYEDKGVDQLKNVIHLIKNEPTSRRIILCAWNVKDLDQMALPPCHILCQFYVFDGKLSCIMYQRSCDLGLGVPFNIASYSIFTHMIAQVCNLQPAQFIHILGNAHVYNNHVDSLKVQLNRIPYPFPTLKLNPEVKNIEDFTISDFTIENYVHHDKITMEMAA

SEQ ID NO: 17690 - DNA, 1593 bp, Glycine max
  CDS (1)..(1593)
atgcccagtgattcttctgtaatctccaatggacacagcaatggcagtgtcaatccactacctaacctgcaaaggacttaccaagtggtagtggctgccactcaagattggggcatcggtaaggatgggaaattaccctggagattgcctactgatctcaagttttttaaggagatcactatgaaaacatctgagcctgggaagaagaatgccattgtaatgggaaggaaaacatgggagagcatccctcttgagtacaggcctctttctggtcgccttaatgttgttcttactcgctcaggaagttttgatattgcaacagcagagaatgttgttatatgtggaagcatgtcttctgcattggaactgttagctgcttctccttactctctgtcaattgagaaagtttttgttatagggggtggtcagatatttagagaggctctcaatgtgcctggatgtgaagctatccacttaacggaaattcagtcaagcattgagtgtgacacttttatgcctccagttgatttcactatatttcggccatggtactcatcctttcctaaagtggaaaacaacatccgctattctttcaccacttatgtgcgtgtacggagttctgctgcagagtccgcgggtcagaacattgatccacttcttgataataattctgagtccatgaaatttgaggtcaaggatttttcttttcttcctaaaatgatttctgagagacatgaggagtatctgtatcttaagctggttcaggacatcattgctgaaggtacaactaagggtgataggacagggactggtaccttgtcaaaatttggttgccagatgaggttcaatctgcgtggaaactttcctcttctaacaactaagaaagtattttggcgaggggttgttgaagagcttctttggtttatcagtggctcaacaaatgccaaggtgctacaggaaaaaggcattcatatttgggatggcaatgcatccagagaataccttgatggtgttggtttgacagagcgggaggagggtgacttgggacctgtttatgggtttcaatggaggcactttggtgccagatatactgacatgcatcatgactactccggccaagggtttgatcaacttttagatgttattaacaagataaagcgtaatcctgatgatcggcgaatcattctctctgcatggaatccagtggatcttaaattaatggcacttccaccctgccacatgtttgcacagttttatgtagcacacggggagttatcatgtcaaatgtatcagcgatctgctgatatgggcctgggcattccatttaatattgcatcttatgcccttttgacatgcatgattgctcatgtttgtgatctcattcctggtgattttattcatgttattggggatgctcatatttaccgcaatcacgtgaggcctttgcaggagcagctccataaccagccaaagccttttccaactttgaagataaatccaaagaagaaagatatagattcttttgtggctgctgatttcaagctcataggctatgatcctcaccagaagattgatatgaagctgtctgtctaa

SEQ ID NO: 17691 - protein, 530 aa, Glycine max
MPSDSSVISNGHSNGSVNPLPNLQRTYQVVVAATQDWGIGKDGKLPWRLPTDLKFFKEITMKTSEPGKKNAIVMGRKTWESIPLEYRPLSGRLNVVLTRSGSFDIATAENVVICGSMSSALELLAASPYSLSIEKVFVIGGGQIFREALNVPGCEAIHLTEIQSSIECDTFMPPVDFTIFRPWYSSFPKVENNIRYSFTTYVRVRSSAAESAGQNIDPLLDNNSESMKFEVKDFSFLPKMISERHEEYLYLKLVQDIIAEGTTKGDRTGTGTLSKFGCQMRFNLRGNFPLLTTKKVFWRGVVEELLWFISGSTNAKVLQEKGIHIWDGNASREYLDGVGLTEREEGDLGPVYGFQWRHFGARYTDMHHDYSGQGFDQLLDVINKIKRNPDDRRIILSAWNPVDLKLMALPPCHMFAQFYVAHGELSCQMYQRSADMGLGIPFNIASYALLTCMIAHVCDLIPGDFIHVIGDAHIYRNHVRPLQEQLHNQPKPFPTLKINPKKKDIDSFVAADFKLIGYDPHQKIDMKLSV

SEQ ID NO: 17692 - DNA, 1833 bp, Toxoplasma gondii
  CDS (1)..(1833)
atgcagaaaccggtgtgtctggtcgtcgcgatgacccccaagaggggcatcggcatcaacaacggcctcccgtggccccacttgaccacagatttcaaacacttttctcgtgtgacaaaaacgacgcccgaagaagccagtcgcctgaacgggtggcttcccaggaaatttgcaaagacgggcgactctggacttccctctccatcagtcggcaagagattcaacgccgttgtcatgggacggaaaacctgggaaagcatgcctcgaaagtttagacccctcgtggacagattgaacatcgtcgtttcctcttccctcaaagaagaagacattgcggcggagaagcctcaagctgaaggccagcagcgcgtccgagtctgtgcttcactcccagcagctctcagccttctggaggaagagtacaaggattctgtcgaccagatttttgtcgtgggaggagcgggactgtacgaggcagcgctgtctctgggcgttgcctctcacctgtacatcacgcgtgtagcccgcgagtttccgtgcgacgttttcttccctgcgttccccggagatgacattctttcaaacaaatcaactgctgcgcaggctgcagctcctgccgagtctgtgttcgttcccttttgtccggagctcggaagagagaaggacaatgaagcgacgtatcgacccatcttcatttccaagaccttctcagacaacggggtaccctacgactttgtggttctcgagaagagaaggaagactgacgacgcagccactgcggaaccgagcaacgcaatgagctccttgacgtccacgagggagacaactcccgtgcacgggttgcaggctccttcttcggccgcagccattgccccggtgttggcgtggatggacgaagaagaccggaaaaaacgcgagcaaaaggaactgattcgggccgttccgcatgttcactttagaggccatgaagaattccagtaccttgatctcattgccgacattattaacaatggaaggacaatggatgaccgaacgggcgttggtgtcatctccaaattcggctgcactatgcgctactcgctggatcaggcctttccacttctcaccacaaagcgtgtgttctggaaaggggtcctcgaagagttgctgtggttcattcgcggcgacacgaacgcaaaccatctttctgagaagggcgtgaagatctgggacaagaatgtgacacgcgagttcctcgattcgcgcaatctcccccaccgagaggtcggagacatcggcccgggctacggcttccagtggagacacttcggcgcggcatacaaagacatgcacacagactacacagggcagggcgtcgaccagctgaagaatgtgatccagatgctgagaacgaatccaacagatcgtcgcatgctcatgactgcctggaatcctgcagcgctggacgaaatggcgctgccgccttgtcacttgttgtgccagttctacgtgaacgaccagaaggagctgtcgtgcatcatgtatcagcggtcgtgcgatgtcggcctcggcgtccccttcaacatcgcttcctattcgcttttgacgctcatggttgcacacgtctgcaacctaaaacctaaggagttcattcacttcatggggaacacgcatgtctacacgaaccatgtcgaggctttaaaagagcagctgcggagagaaccgagaccgttccccattgtgaacatcctcaacaaggaacgcatcaaggaaatcgacgatttcaccgccgaggattttgaggtcgtgggctacgtcccgcacggacgaatccagatggagatggctgtctag

SEQ ID NO: 17693 - protein, 610 aa, Toxoplasma gondii
MQKPVCLVVAMTPKRGIGINNGLPWPHLTTDFKHFSRVTKTTPEEASRLNGWLPRKFAKTGDSGLPSPSVGKRFNAVVMGRKTWESMPRKFRPLVDRLNIVVSSSLKEEDIAAEKPQAEGQQRVRVCASLPAALSLLEEEYKDSVDQIFVVGGAGLYEAALSLGVASHLYITRVAREFPCDVFFPAFPGDDILSNKSTAAQAAAPAESVFVPFCPELGREKDNEATYRPIFISKTFSDNGVPYDFVVLEKRRKTDDAATAEPSNAMSSLTSTRETTPVHGLQAPSSAAAIAPVLAWMDEEDRKKREQKELIRAVPHVHFRGHEEFQYLDLIADIINNGRTMDDRTGVGVISKFGCTMRYSLDQAFPLLTTKRVFWKGVLEELLWFIRGDTNANHLSEKGVKIWDKNVTREFLDSRNLPHREVGDIGPGYGFQWRHFGAAYKDMHTDYTGQGVDQLKNVIQMLRTNPTDRRMLMTAWNPAALDEMALPPCHLLCQFYVNDQKELSCIMYQRSCDVGLGVPFNIASYSLLTLMVAHVCNLKPKEFIHFMGNTHVYTNHVEALKEQLRREPRPFPIVNILNKERIKEIDDFTAEDFEVVGYVPHGRIQMEMAV

SEQ ID NO: 17694 - DNA, 1566 bp, Trypanosoma cruzi
  CDS (1)..(1566)
atgtcgctgtttaagatccgcatgccggagacggtggcggaggggacacgtctcgcactgcgtgccttttccctcgttgtagcggtcgacgagcacggcggcattggggacgggcggtcgatcccatggaatgtgcccgaggacatgaagtttttccgggatttgacaacaaaactgcgggggaagaacgtcaaaccatcgcctgcgaagcgcaacgccgttgtgatgggccgcaagacgtgggacagcattccgcccaaattccgcccgcttcccggtcgcctgaacgtcgttttgtcgtccaccctcacgacgcaacacctcttggacggcctgccagacgaagaaaaacggaatttgcatgccgacagcattgtggcggtaaatggtggactcgagcaggcattgcggttgctcgcgtcccccaattacacgccgagcattgagacggtctactgcattggtggcggctctgtgtatgcggaggcccttcgcccgccgtgcgttcatttgctgcaagccatttaccgcaccaccatccgcgccagcgagtcttcttgcagcgtgttttttcgcgttcccgagtcgggtacggaggcggcggcggggattgagtggcagcgggagacaatctccgaggagctcacgtcggcaaacggcaacgagacaaagtactactttgagaagctcatcccacgcaacagagaggaggagcagtatctaagccttgtggatcgcatcatacgcgaggggaatgtgaagcatgaccgcactggggtgggtacgctctccatctttggcgcacagatgcgtttctcgctccgcaacaatcgcctaccacttttgacaacgaagcgggttttttggcgcggtgtgtgcgaggaactgctgtggtttctacggggcgaaacatatgccaaaaagttaagtgacaagggagtccacatatgggacgacaacggctcgcgcgcgtttcttgacagtcgtggcctcacggagtacgaggagatggacctcggtcctgtctacggctttcagtggcgtcactttggtgccgcctacacacaccatgatgccaactatgacggacagggtgtggatcaaatcaaggcaatcgttgaaacgctaaagacaaatcctgacgatcgccggatgctattcacggcatggaatccgagcgctttgcccaggatggccctaccaccgtgccacctgctcgcacagttttacgtgagcaatggggaactgtcttgcatgctctaccagcgctcatgtgacatgggccttggcgtcccgttcaacattgcctcctacgccctcttgaccatcctcatcgcaaaggcgacggggctgcggccgggagagttggtgcacacccttggtgacgctcacgtgtacagcaatcacgtcgagccgtgcaatgagcaactgaaacgtgtgccacgtgcctttccgtatcttgtgtttcgccgcgagcgcgagttcctggaggactacgaggagggtgacatggaggtcattgactatgcgccataccctcccatctccatgaagatggcggtttag

SEQ ID NO: 17695 - protein, 521 aa, Trypanosoma cruzi
MSLFKIRMPETVAEGTRLALRAFSLVVAVDEHGGIGDGRSIPWNVPEDMKFFRDLTTKLRGKNVKPSPAKRNAVVMGRKTWDSIPPKFRPLPGRLNVVLSSTLTTQHLLDGLPDEEKRNLHADSIVAVNGGLEQALRLLASPNYTPSIETVYCIGGGSVYAEALRPPCVHLLQAIYRTTIRASESSCSVFFRVPESGTEAAAGIEWQRETISEELTSANGNETKYYFEKLIPRNREEEQYLSLVDRIIREGNVKHDRTGVGTLSIFGAQMRFSLRNNRLPLLTTKRVFWRGVCEELLWFLRGETYAKKLSDKGVHIWDDNGSRAFLDSRGLTEYEEMDLGPVYGFQWRHFGAAYTHHDANYDGQGVDQIKAIVETLKTNPDDRRMLFTAWNPSALPRMALPPCHLLAQFYVSNGELSCMLYQRSCDMGLGVPFNIASYALLTILIAKATGLRPGELVHTLGDAHVYSNHVEPCNEQLKRVPRAFPYLVFRREREFLEDYEEGDMEVIDYAPYPPISMKMAV

SEQ ID NO: 17696 - DNA, 885 bp, Encephalitozoon cuniculi
  CDS (1)..(885)
atgccccaggacccgcgccacccagagcaccagtatcttgacctggtgaagcacatactggaaaacggcgccagaaggatggacaggacaggcacgggaacgctgtccgtcttcggagcaacaatgaggttttccctcgaagacaacaccttcccgctgctgacgacaaggagggtcttctacagaggcgttgtcgaggagctcctgttcttcctgagaggcgagacagactcgaaggtccttgagaagaaaggagtccggatctgggaaaagaacggggccaagcagttcctgcagtccgtggggatagacagggaggagggcgacctcggcccgatatacggcttccagtggaggcacttcggcgcccggtacgagacatcggcctcgagctacgagggcaagggggtcgaccagatcgcgagcgccatcgcagcaatcagggccaaccccgccagcaggaggattgttgtgagtgcatggaaccccacagacctcgggagcatggcccttcccccgtgccacgtgctcttccagttcaacgtgacggacgggaagctcagctgtgcaatgtaccagaggtctggagacatgggcctgggcgttcccttcaacattgcctcgtactcgctgctcacaatactcgtggcgcatctgacaggcctgcagcccggggagtttgttcactttctgggcgacgcccacgtgtatctggaccacgtcgactctcttcggcagcagatccagagacccccgagagcatttccaaagctctttgtcagcccaaaggggccgagaacagagccggagcacttccagtacgaggacttcgagcttgtgggatacgacccgcaccctgcaatcaagatgaacatgagtgcttga

SEQ ID NO: 17697 - protein, 294 aa, Encephalitozoon cuniculi
MPQDPRHPEHQYLDLVKHILENGARRMDRTGTGTLSVFGATMRFSLEDNTFPLLTTRRVFYRGVVEELLFFLRGETDSKVLEKKGVRIWEKNGAKQFLQSVGIDREEGDLGPIYGFQWRHFGARYETSASSYEGKGVDQIASAIAAIRANPASRRIVVSAWNPTDLGSMALPPCHVLFQFNVTDGKLSCAMYQRSGDMGLGVPFNIASYSLLTILVAHLTGLQPGEFVHFLGDAHVYLDHVDSLRQQIQRPPRAFPKLFVSPKGPRTEPEHFQYEDFELVGYDPHPAIKMNMSA

SEQ ID NO: 17698 - DNA, 840 bp, Bacillus licheniformis
  CDS (1)..(840): transl_table=11
atgagccattatgaccagcaatacaatgcaatcatacaaaaaattattgaatcagggatctccgatgaagaatatcaggttcggacgaagtgggattcagacggaacgccggctcatacgctgagcatcatgagcgaaaaaatgcggtttgacaattcagaagtgccgattttgacgacgaagaaggtggcgtggaaaacggccattaaagagctgctttggatttggcagctgaaatccaatgatgttcaagttctgaatgatatgggggttcatatttgggatcaatggcgtcttgaagacggcacaatcggagcagcgtacggctatcaattagggaagaaaaacagaacggttaacggccagaaagtcgatcaagtggattatttgcttcatcagttaaagcataacccttcttcacgcaggcatttgaccatgctgtggaatcccgatgatttggatggcatggctttgacgccctgcgtctatgagacgcaatggtatgtgaaagaaggaaagctctctttagaagtaagagcgagaagcaacgacatggcgcttggcaacccgttcaatgtgtttcaatataatgtcttgcagcgcatgatcgcgcaagtcctcggttatgagctgggcgaatacatcttcaacatcggtgactgccacatctatacccgtcacatcgacaatttaaacattcagatgaaacgcgagcagtatgaagcgccaaagctatggatcaacccggatatcaaaaatttttatgactttacaatcgatgattttaaattaatcgactataagcacggcgacaagctgacatttgaagttgccgtatga

SEQ ID NO: 17699 - protein, 279 aa, Bacillus licheniformis
MSHYDQQYNAIIQKIIESGISDEEYQVRTKWDSDGTPAHTLSIMSEKMRFDNSEVPILTTKKVAWKTAIKELLWIWQLKSNDVQVLNDMGVHIWDQWRLEDGTIGAAYGYQLGKKNRTVNGQKVDQVDYLLHQLKHNPSSRRHLTMLWNPDDLDGMALTPCVYETQWYVKEGKLSLEVRARSNDMALGNPFNVFQYNVLQRMIAQVLGYELGEYIFNIGDCHIYTRHIDNLNIQMKREQYEAPKLWINPDIKNFYDFTIDDFKLIDYKHGDKLTFEVAV

SEQ ID NO: 17700 - DNA, 840 bp, Bacillus subtilis
  CDS (1)..(840): transl_table=11
atgacgcaattcgataaacaatacaattcaattataaaggatattatcaataatggaatctcagacgaagagtttgatgtaagaaccaagtgggactcagatggaacaccggcacatactctaagtgtaatcagtaagcaaatgagattcgacaactcagaggttccgattttaacgacaaaaaaggttgcctggaaaacagccattaaagagttgctctggatttggcagctgaaatctaatgatgttaatgatttaaacatgatgggcgtccatatttgggatcagtggaaacaagaagacggaaccatcggacatgcatatggatttcagctggggaagaaaaacagaagtctaaatggagaaaaagtggatcaggtagactatcttcttcatcaattgaagaacaatccatcttcacgcagacacattacaatgctgtggaatcctgatgaattagacgcaatggccttaacgccatgtgtatacgagacacaatggtacgttaaacatgggaaactccaccttgaggtaagagcacggagcaatgatatggcattgggaaatccattcaatgtattccagtataatgtgttgcagcgcatgattgctcaagtgactggttatgagcttggtgaatatatctttaacattggggattgccatgtgtacacacgtcatatagacaatttgaaaattcaaatggaaagagaacagtttgaagcacctgaactatggatcaatcctgaagtgaaagatttttatgactttaccattgatgatttcaagttaatcaactataaacatggggacaagcttttatttgaggtagcggtttaa

SEQ ID NO: 17701 - protein, 279 aa, Bacillus subtilis
MTQFDKQYNSIIKDIINNGISDEEFDVRTKWDSDGTPAHTLSVISKQMRFDNSEVPILTTKKVAWKTAIKELLWIWQLKSNDVNDLNMMGVHIWDQWKQEDGTIGHAYGFQLGKKNRSLNGEKVDQVDYLLHQLKNNPSSRRHITMLWNPDELDAMALTPCVYETQWYVKHGKLHLEVRARSNDMALGNPFNVFQYNVLQRMIAQVTGYELGEYIFNIGDCHVYTRHIDNLKIQMEREQFEAPELWINPEVKDFYDFTIDDFKLINYKHGDKLLFEVAV

SEQ ID NO: 17702 - DNA, 1243 bp, Bacillus amyloliquefaciens
  CDS (157)..(951)
gagctcggcagcatttactgggaccgcaatacgccgcctgactggatgagcgtataataccgtgaagaaataaaaaaatcatttctgagaaattttgcagaaatgattttttattgtgttacactactaaaagactactttaaaaggatgaaaaagatgaaacaatataaagatttgtgccgtcatgtgttagaaaacggagaaaaaaaaggagaccgtacgggaacgggtacgatcagcacgttcggctaccaaatgcggtttaaccttcagggaggtttcccgatgcttacgacgaaaaaactccattttaaatcaatcgcccatgagctgctttggtttttaaaaggtgacacgaatgtccgctaccttcaggaaaacggagtccgcatctggaacgaatgggcggatgaaaacggagaactcggaccggtttacggctctcaatggcgttcatggcgcggagcggacggcgagacgattgatcaaatctcccggctgattcacgacatcaagacaaatccgaattccagacgtttaatcgtcagcgcgtggaatgtcggcgaaattgatcgtatggcgcttcctccttgccactgtctgtttcagttctatgtcgcggacggaaagctgtcgtgccagctttatcagcgctcagcggatgtatttctcggcgtgccgtttaatattgcgtcttatgcgcttttaacaatgatgatcgcgcatgtgacggggcttgaaccgggtgagttcgttcatacgttcggagacgtccacatttaccaaaaccatgtggagcaggtgaatttgcagctgacaagggatgtccgtccgctgccgaaactgcggtttgcgcgaaacgtggattctatttttgattttgcgttcgaagactttatcattgaggattatgacccgcatccgcatataaaaggagctgtcagcgtatgatatcgttttatttttgcgatggatgaaaaccggctgatcggaaaagataacgatctgccttggcaccttccggatgatctcgcatatttcaaaaaagtgacgacgggacacaccattgtgatggggcggaaaacatttgaatcaatcgggcgtccgcttccgaaccggcgtaacatcgtagtaacctcgcgggatgcatccttattcccgggctgtactgtcgccggctcggctgaggaagtgctcaagctgatcccggctgatgaagaatgctttgtaatcggcggagctc

SEQ ID NO: 17703 - protein, 264 aa, Bacillus amyloliquefaciens
MKQYKDLCRHVLENGEKKGDRTGTGTISTFGYQMRFNLQGGFPMLTTKKLHFKSIAHELLWFLKGDTNVRYLQENGVRIWNEWADENGELGPVYGSQWRSWRGADGETIDQISRLIHDIKTNPNSRRLIVSAWNVGEIDRMALPPCHCLFQFYVADGKLSCQLYQRSADVFLGVPFNIASYALLTMMIAHVTGLEPGEFVHTFGDVHIYQNHVEQVNLQLTRDVRPLPKLRFARNVDSIFDFAFEDFIIEDYDPHPHIKGAVSV

SEQ ID NO: 17704 - DNA, 795 bp, Bacillus subtilis
  CDS (1)..(795): transl_table=11
atgaaacagtataaggatttctgcagacatgttttagagcatggtgagaaaaagggagaccggactgggaccggaacaatcagcactttcggatatcaaatgagatttaatttacgggaaggctttccgatgctcaccactaaaaaactccactttaaatcaattgcgcatgaactgctgtggttcttaaaaggagatacgaatgtacgctatctgcaggaaaacggagtgcgaatctggaatgagtgggctgatgaaaacggtgaacttggacctgtatatggctcccaatggcgttcttggcggggagctgatggagaaaccattgatcaaatttcccgtcttattgaagatattaaaacaaatccgaactccagacgcttaatcgtcagcgcctggaatgttggtgaaattgataaaatggcgttgccgccgtgccattgcctgttccaattctatgtgtctgacggcaagctgtcctgtcagctgtatcagcgctctgccgatgttttcttaggtgtgccgtttaatattgcatcttatgccctcctaaccatgatcattgctcatgtgactgggcttgaaccgggcgagttcatccatacgtttggtgatgttcatatttaccaaaatcatattgaacaagtcaatttgcagctggaaagagatgttagaccgcttccgcagcttcgtttcgccagaaaggttgattctatttttaactttgcatttgaggactttatcatcgaggattatgatccgcatcctcatataaaaggggcggtcagcgtatga

SEQ ID NO: 17705 - protein, 264 aa, Bacillus subtilis
MKQYKDFCRHVLEHGEKKGDRTGTGTISTFGYQMRFNLREGFPMLTTKKLHFKSIAHELLWFLKGDTNVRYLQENGVRIWNEWADENGELGPVYGSQWRSWRGADGETIDQISRLIEDIKTNPNSRRLIVSAWNVGEIDKMALPPCHCLFQFYVSDGKLSCQLYQRSADVFLGVPFNIASYALLTMIIAHVTGLEPGEFIHTFGDVHIYQNHIEQVNLQLERDVRPLPQLRFARKVDSIFNFAFEDFIIEDYDPHPHIKGAVSV

SEQ ID NO: 17706 - DNA, 843 bp, Acinetobacter sp
  CDS (1)..(843): transl_table=11
atgcgcacctatttagaccttttacaacatatcctcgacaacggcggcgacaaaggtgaccgtacaggcacagggacacgttctgtatttggtcatcaaatgcgttttgacctatctcaagggtttcctttacttaccaccaagaaagtacatttccgctcaattgtgattgagctgctgtggtttctcaaaggcgataccaacgttcaatatttaaaagaccataaagtcagcatttgggatgagtgggcaacggcagagcaaactgcacgttttggccgtccagaaggcgagcttggcccagtttatggacaccaatggcgtaatttcggtgctactcaaaattcagatgggagctacaaaaacgacggttttgatcaaatcaaatggctcattaatgaaatcaagaccaatccgaattcacgtcgcttgattgtatcaggctggaatccaaatgaagccggacaagtggctttaccaccttgtcataccctgtttcagttttttgttcaggatggcaaactctcttgtcagctctatcaacgtagtgccgatgtgtttttaggtgtgccatttaacattgccagttatgcccttctcacccatatgattgcgcaggtgtgtggcctaggtgtaggcgattttgtctggacgggcggtgacacccatttatacgccaatcattttgagcaagcacaacttcaactgacacgtgaaccgttaccactttgtcagcttaaattaaaccctgaaattaccgatctgtttgattttaaatttgaagatattgaaattgtggattatcaatcccaccctgcaatcaaagcccctgttgccgtataa

SEQ ID NO: 17707 - protein, 280 aa, Acinetobacter sp
MRTYLDLLQHILDNGGDKGDRTGTGTRSVFGHQMRFDLSQGFPLLTTKKVHFRSIVIELLWFLKGDTNVQYLKDHKVSIWDEWATAEQTARFGRPEGELGPVYGHQWRNFGATQNSDGSYKNDGFDQIKWLINEIKTNPNSRRLIVSGWNPNEAGQVALPPCHTLFQFFVQDGKLSCQLYQRSADVFLGVPFNIASYALLTHMIAQVCGLGVGDFVWTGGDTHLYANHFEQAQLQLTREPLPLCQLKLNPEITDLFDFKFEDIEIVDYQSHPAIKAPVAV

SEQ ID NO: 17708 - DNA, 891 bp, Agaricus bisporus
  CDS (1)..(891)
atgcacgatgaagaccagtatctacacctcatcagacgcgttctcgacacgggtgaccttcgccccgatcgaacggggacagggaccatctcgctctttgcgccgccaaatctacgcttctcgcttcgtgaatccaccgtgccactcctgacaaccaagcgcacttttttacgtggcatcgtggaagagctgctgtggttcacgaacggattgacagattcaaaaatcctgtctgacaagggcgtcaaaatatgggatgggaatgggtcgaaagcgttccttgagagccgggggttgggtcatcgtagagaaggtgatctcggtccggtgtatggattccagtggcggcatttcggggcggaatacgaggattgcgatgcggattatgctggcaagggtgtcgaccagctgcgagaatgcatccgaaaaatcaaagaaaatccgacggacagacggataattcttagtgcatggaacccaaaagatattccctcgatggcattgcctccctgccacatgttgtgccaattctacgtgcatctcccagccgacactgccaaaccggaactgtcgtgtctgatgttccagcggtctgcagatcttgggctggggattcccttcaatatcgcatcctacgcgctccttacacatatgatcgcgcacgttacagggacgacggcacgggagctgattatccagcttggagatgctcatgtctatcgcgatcacgtcgaggccctcgaggtgcaactccaacgcgagccgcgtccttttcccaagcttcgatgggcgagggacggtatcacggacattgaagactttgagtattctgactttgtaatcgagggctacaaccctcatccctctattgcgatgaagatgagtgtctga

SEQ ID NO: 17709 - protein, 296 aa, Agaricus bisporus
MHDEDQYLHLIRRVLDTGDLRPDRTGTGTISLFAPPNLRFSLRESTVPLLTTKRTFLRGIVEELLWFTNGLTDSKILSDKGVKIWDGNGSKAFLESRGLGHRREGDLGPVYGFQWRHFGAEYEDCDADYAGKGVDQLRECIRKIKENPTDRRIILSAWNPKDIPSMALPPCHMLCQFYVHLPADTAKPELSCLMFQRSADLGLGIPFNIASYALLTHMIAHVTGTTARELIIQLGDAHVYRDHVEALEVQLQREPRPFPKLRWARDGITDIEDFEYSDFVIEGYNPHPSIAMKMSV

SEQ ID NO: 17710 - DNA, 795 bp, Agrobacterium tumefaciens
  CDS (1)..(795): transl_table=11
atgaaacaatatctcgatcttctccggcatgtgatggaaaccggctccgaccgcggagaccgcaccggcaccggcacgcgttcggtattcggttaccagatgcgtttcgacctttccgaaggttttccggttctcaccacaaagaaactgcatctgcgctccatcatccatgagctgctgtggttcctaaacggcgataccaatattgcctatctcaaggaaaatggtgtttccatctgggatgaatgggccgatgagaacggcgatctcggtccggtctatggcgcgcaatggcggtcctggccagcgcctgatggccgccatatcgaccagatcgcgcttctgatcgaggcgcttaaaaccaatcccaattcccgccgccacatcgtttcggcctggaacccggcgctggtggacgaaatggcgctgccgccctgccattgcctgttccagttctatgtgtccgatggaaagctgtcctgccagctttaccagcgctcggccgatattttcctcggcgtgcccttcaatatcgcatcctacgcgctgctgacgctgatggtggcgcaggtcgtgggcctcaagcccggcgatttcgttcatacccttggtgatgcgcatatctacgccaaccatttcgaacaggcgcagctgcagatgacgcgtacgccgaaggccttgccgaccatgcgcctcaaccctgatgtgaagaaccttttcggctttaagttcgaggactttacgctggagaattacgaggccgattcaagcatcaaggcaccgatcgcggtatga

SEQ ID NO: 17711 - protein, 264 aa, Agrobacterium tumefaciens
MKQYLDLLRHVMETGSDRGDRTGTGTRSVFGYQMRFDLSEGFPVLTTKKLHLRSIIHELLWFLNGDTNIAYLKENGVSIWDEWADENGDLGPVYGAQWRSWPAPDGRHIDQIALLIEALKTNPNSRRHIVSAWNPALVDEMALPPCHCLFQFYVSDGKLSCQLYQRSADIFLGVPFNIASYALLTLMVAQVVGLKPGDFVHTLGDAHIYANHFEQAQLQMTRTPKALPTMRLNPDVKNLFGFKFEDFTLENYEADSSIKAPIAV

SEQ ID NO: 17712 - DNA, 885 bp, Ascaris suum
  CDS (1)..(885)
atggagggagcaaatgtgaacgaagatgagaggaagtatctacggcaaatcaagcacatcattgatgagggtgataaggtcattgatcgtaccggtgttggtacgctttccttgttcggactgcactctacctattcattgcgcaacggtgtgattccgttactaacgacgaaacgtgtctactggaagggtgtcgtcgaagaattgctgtggttcatcaaaggtgacacagatgcaaaacgtctgtcagcaaaaggtgtgaagatttgggatgcgaatggatctcgtgagttcctggatagtcaaggtttcaaggatcgccccgaaggcgatttgggtccgatttacggattccaatggcgtcattttggtgccgaataccatggtacagatgccgattataaaggccaaggtgtcgaccaactcgccgatgtcattgagcaaatcaaaaataatccgaatagtaggcggatcatcctcaacgcttggaatgttaaagatcttcaccagatggcattgccaccatgtcacacccttgctcagttcgctgtaaagaatggagagctttcatgtcagctctatcagcgctcaggtgatatgggattgggagtgccattcaatctggctagctatggtctcttgacacatatgatcgcccatgtttgtgctctgaaaacggggttcctgcaccatgttttgggtgatgcgcacgtctacctcaaccatatcgatgccctcaaggaacagttgtcgcgcgatccgcgtccattcccaacagttcatttcgaaggcagaatcgattcaatcgacgatttcacagccgaatctatcatcctgaatgggtacaatccgatggctccaataaaaatgcccatggccgtgtga

SEQ ID NO: 17713 - protein, 294 aa, Ascaris suum
MEGANVNEDERKYLRQIKHIIDEGDKVIDRTGVGTLSLFGLHSTYSLRNGVIPLLTTKRVYWKGVVEELLWFIKGDTDAKRLSAKGVKIWDANGSREFLDSQGFKDRPEGDLGPIYGFQWRHFGAEYHGTDADYKGQGVDQLADVIEQIKNNPNSRRIILNAWNVKDLHQMALPPCHTLAQFAVKNGELSCQLYQRSGDMGLGVPFNLASYGLLTHMIAHVCALKTGFLHHVLGDAHVYLNHIDALKEQLSRDPRPFPTVHFEGRIDSIDDFTAESIILNGYNPMAPIKMPMAV

SEQ ID NO: 17714 - DNA, 795 bp, Azoarcus sp
  CDS (1)..(795): transl_table=11
atgaaacagtatctcgacctgatgcgccatgtcctcgatcatggcgaccggaaatccgaccggaccggcaccggcacactttcgatcttcggttggcagatgcggtttaatctcgacgacggctttcctctgctcacgacgaagaaactgcacacccgttcgataattcacgaattgctgtggtttctgcgcggcgataccaatatccgctacctcaacgagaatggcgtgtcgatctgggacgactgggccgacgagaatggcgatctcgggccggtgtacggcaagcaatggcgccgctgggagacggcaaacggcgccactatcgaccagatcgcacaactgatcgacggactgaagcacaatcctgattcgcgccgccatctggtttcagcgtggaatccgggagaagtggccggaatggcgcttcccccgtgtcacgcactgttccagttctatgttgcgggtgaccgactgtcctgccagttgtaccaacgcagtgccgacatcttcctcggagtaccgttcaacattgcgtcctacgcgctactgacactgatggtggctcaggtctgcgggctgcgggccggggatttcgtatggacagggggggattgccacctgtacctcaaccatctcgatcaggcacgtctgcagctctcccggcaaccacgcgctttgccgcggatgatcgtgaatcccggcgtcaccgacatctttggattccgcttcgaagattttcgtctcgaaggctatgacccccacccccatatcaaagcggaagtggccgtatga

SEQ ID NO: 17715 - protein, 264 aa, Azoarcus sp
MKQYLDLMRHVLDHGDRKSDRTGTGTLSIFGWQMRFNLDDGFPLLTTKKLHTRSIIHELLWFLRGDTNIRYLNENGVSIWDDWADENGDLGPVYGKQWRRWETANGATIDQIAQLIDGLKHNPDSRRHLVSAWNPGEVAGMALPPCHALFQFYVAGDRLSCQLYQRSADIFLGVPFNIASYALLTLMVAQVCGLRAGDFVWTGGDCHLYLNHLDQARLQLSRQPRALPRMIVNPGVTDIFGFRFEDFRLEGYDPHPHIKAEVAV

SEQ ID NO: 17716 - DNA, 957 bp, Bacillus cereus
  CDS (1)..(957): transl_table=11
atgaaacatgctgaaaatgaatacttaaatttatgccgccatgtaatggaacatggtacgaagaaagaagatcgtacagggacaggaactgtatctgtatttggatatcaaatgcgttttgatttaagtaaaggttttcctttattaacgacaaagagagtaccgtttcgccttgtagcaagtgaattgctatggtttatgaaaggtgatacaaatattcgctatttattgcagcataataataacatttggaatgaatgggcatttaagagctgggtagaaagcgacgagtatactggtcctgacatgactgatttcggtcttcgttcacaacaagatgaggaatttaaagtgcagtacgataagcaaatggaattatttaaaaagaacgttttagaagatgatgatttctcaaataaatatggttatttaggagacgtatacggtaagcagtggcgtgcttggaaaacgacagctggtgagacacttgatcaattaaaggatgtaattgaaatgattaagaagacgccagattcgcgtcgcctaattgtttctgcttggaatccggaagatgtaccaagtatggcattaccgccttgtcatacactattccaattttatgtagcagatggcaaactttcttgtcagctatatcaaagaagtggtgacatattccttggaattccatttaacattgcaagttactcactactgacacatttaattgcacatgaatgcggacttgaagtgggagaatttgttcatacaattggagatgcacacatttatacaaaccattttgagcaagtagaaaagcaattggcacgtgaaccacgtccattcccgaaacttacactaaatccagatgtgaaatctgtgtttgattttgaaatggaagatttaacaattgaaggatatgatccgcatccagcaattaaagcaccagttgcagtgtaa

SEQ ID NO: 17717 - protein, 318 aa, Bacillus cereus
MKHAENEYLNLCRHVMEHGTKKEDRTGTGTVSVFGYQMRFDLSKGFPLLTTKRVPFRLVASELLWFMKGDTNIRYLLQHNNNIWNEWAFKSWVESDEYTGPDMTDFGLRSQQDEEFKVQYDKQMELFKKNVLEDDDFSNKYGYLGDVYGKQWRAWKTTAGETLDQLKDVIEMIKKTPDSRRLIVSAWNPEDVPSMALPPCHTLFQFYVADGKLSCQLYQRSGDIFLGIPFNIASYSLLTHLIAHECGLEVGEFVHTIGDAHIYTNHFEQVEKQLAREPRPFPKLTLNPDVKSVFDFEMEDLTIEGYDPHPAIKAPVAV

SEQ ID NO: 17718 - DNA, 795 bp, Bacteroides fragilis
  CDS (1)..(795): transl_table=11
atgaaacaatatttagacctgctcgaccgagtgttgacggagggaatagaaaaaggtgaccgcaccggaacgggaaccatcagtgtcttcggacaccagatgcgtttcaacctggacgagggattcccttgcctgactaccaagaaacttcatctgaaatcaatcatttacgaactactgtggttcctcaaaggagacacgaatgtgaaatatctgcaggaccacggcgtacgcatctggaacgaatgggcggacgaaacaggagatctgggacatatatatggataccagtggcgttcgtggccaacctacgacggaggatttatcgaccagatcagcgaagctgtagatgccatcaagcacaatcccgattcacgccgcatcattgtcagtgcatggaatgtaggagacctggatcacatgaacctccctccttgccacgcattcttccagttttacgtagcaaacggacggctgagcctgcaactctatcaacgcagcgccgatatcttcctgggggtacctttcaatatagcatcttatgcattgctgctacagatgatggcgcaagtcaccggtctgcaggcaggagactttatccacacactgggcgacgcacatatctacctgaaccacttggaacaggtgaaactccagctcagccgggaaccgcgcccactaccacaaatgaagatcaatccggacgtgaaaaacatcttcgacttccaattcaaggactttgaattagtaaattatgatccgcacccgcacatcgctggaaaagttgcggtataa

SEQ ID NO: 17719 - protein, 264 aa, Bacteroides fragilis
MKQYLDLLDRVLTEGIEKGDRTGTGTISVFGHQMRFNLDEGFPCLTTKKLHLKSIIYELLWFLKGDTNVKYLQDHGVRIWNEWADETGDLGHIYGYQWRSWPTYDGGFIDQISEAVDAIKHNPDSRRIIVSAWNVGDLDHMNLPPCHAFFQFYVANGRLSLQLYQRSADIFLGVPFNIASYALLLQMMAQVTGLQAGDFIHTLGDAHIYLNHLEQVKLQLSREPRPLPQMKINPDVKNIFDFQFKDFELVNYDPHPHIAGKVAV

SEQ ID NO: 17720 - DNA, 795 bp, Bacillus halodurans
  CDS (1)..(795): transl_table=11
atggaacaatatttagagctttgccgccacgttctcgagcatggaaccgagcgatcagaccggacaggaacagggacgatcagcgtttttggctatcagatgagatttgatctccaagaaggatttcccgttgttacgacgaaaaaactgcacctgcggtcgatcatccatgaactgctttggtttttaaaaggagagactaacatcgcctacttgcaagagaatggtgtgcgaatttggaacgagtgggccgatgaaaatggggaacttggtcctgtatatggtaagcagtggcgctcatgggaaggagcgaatgggaaaacggtcgaccaaatttctcaagtcgtagaagcgattaaacatcaaccggattcaagacgattgatcgtaagtgcttggaatgcagcggagattgaagatatggccttggctccatgtcattgtctattccaattttatgtgcaagatggaaagctatcgtgtcagctctatcagcgaagtgcagacattttcctaggcgtacctttcaacatcgcttcatacgccttgttaacaaaaatgatcgcccaagtatgcgatttagaagaaggagagtttgttcacacgttcggtgacgctcacatttacttaaatcatatcgaacaagtaaaattacagttaacgagagagccaagaccattaccggagatgcgtttgaacccagaggttcgttcattgttcgacttcacgttcgatgattttgaacttgtcggatatgatccgcaccctcatataaaaggagaagtgtctgtatga

SEQ ID NO: 17721 - protein, 264 aa, Bacillus halodurans
MEQYLELCRHVLEHGTERSDRTGTGTISVFGYQMRFDLQEGFPVVTTKKLHLRSIIHELLWFLKGETNIAYLQENGVRIWNEWADENGELGPVYGKQWRSWEGANGKTVDQISQVVEAIKHQPDSRRLIVSAWNAAEIEDMALAPCHCLFQFYVQDGKLSCQLYQRSADIFLGVPFNIASYALLTKMIAQVCDLEEGEFVHTFGDAHIYLNHIEQVKLQLTREPRPLPEMRLNPEVRSLFDFTFDDFELVGYDPHPHIKGEVSV

SEQ ID NO: 17722 - DNA, 840 bp, Bacillus mojavensis
  CDS (1)..(840): transl_table=11
atgactcaatttgataaacaatacaattcaattataaaggaaattataaagaatggaatctcagacgaagaatttgatgtgagaaccaagtgggaatcagatggaacaccggctcacacactaagcatcatcaccaagcaaatgagattcgacaactcagaggttccgattttaacaacaaaaaaagttgcctggaaaacagcgattaaagagctgctctggatctggcaactgaaatctaacgatgttacggaattaaacaaaatgggcgtacatatctgggatcaatggaaacaagaagatggcagcatcggacatgcatatggattccagctggccaagaaaaacagaaatctaaatggagaaaaggtagatcaggttgattatcttctgcatcaattgaagaacaacccatcttcacggagacacattactatgctttggaatcctgatgaattagactcaatggccttaacgccatgtgtatacgagacacaatggtacgttaaacaagggaaactccaccttgaggtaagagcccgtagtaatgacatggccttgggaaatcccttcaatgtattccagtacaatgttttgcagcgcatgattgctcaagtaactggttatgagcttggtgaatatatctttaacattggtgattgccatgtttacacacgtcatatagacaatttgaaaattcaaatggaaagagaacagtttgaagcacctaaattatggatcaatcctgaagtcaaagatttttatgactttaccattgatgatttcaagttaatcaactataaacatggggacaggctttcatttgaggtagcagtttaa

SEQ ID NO: 17723 - protein, 279 aa, Bacillus mojavensis
MTQFDKQYNSIIKEIIKNGISDEEFDVRTKWESDGTPAHTLSIITKQMRFDNSEVPILTTKKVAWKTAIKELLWIWQLKSNDVTELNKMGVHIWDQWKQEDGSIGHAYGFQLAKKNRNLNGEKVDQVDYLLHQLKNNPSSRRHITMLWNPDELDSMALTPCVYETQWYVKQGKLHLEVRARSNDMALGNPFNVFQYNVLQRMIAQVTGYELGEYIFNIGDCHVYTRHIDNLKIQMEREQFEAPKLWINPEVKDFYDFTIDDFKLINYKHGDRLSFEVAV

SEQ ID NO: 17724 - DNA, 840 bp, Bacillus subtilis var
  CDS (1)..(840): transl_table=11
atgacgcaattcgataaacaatacaattcaattataaaggatattatcaataatggaatctcagacgaagagtttgatgtaagaaccaagtgggactcagatggaacaccggcacatactctaagtgtaatgagtaagcaaatgagattcgacaactcagaggttccgattttaacgacaaaaaaggttgcctggaaaacagccattaaagagttgctctggatttggcagctgaaatctaatgatgttaatgatttaaacaagatgggcgtacatatttgggatcagtggaaacaagaagacggcaccatcggacatgcatatggatttcagctggggaagaaaaacagaagtctaaacggagaaaaagtggatcaggtagactatcttcttcatcaattgaagaacaacccgtcttcacgcagacatattacaatgctgtggaatcctgatgatttagacgcaatgtccttaacgccatgtgtatacgagacacaatggtacgttaaacatgggaaactccaccttgaggtaagagcacggagcaatgatatggcattaggaaatcccttcaatgtattccagtacaatgtgttgcagcgcatgattgctcaagtgactggttatgagcttggtgaatatatctttaacattggggattgccatgtgtacacacgtcatatagacaatttgaaaattcaaatggaaagagaacagtttgaagcacctgaactatggatcaatcctgaagtgaaagatttttataactttaccattgatgatttcaagttaatcaactataaacatggggacaagcttttatttgaggtagcggtttaa

SEQ ID NO: 17725 - protein, 279 aa, Bacillus subtilis var
MTQFDKQYNSIIKDIINNGISDEEFDVRTKWDSDGTPAHTLSVMSKQMRFDNSEVPILTTKKVAWKTAIKELLWIWQLKSNDVNDLNKMGVHIWDQWKQEDGTIGHAYGFQLGKKNRSLNGEKVDQVDYLLHQLKNNPSSRRHITMLWNPDDLDAMSLTPCVYETQWYVKHGKLHLEVRARSNDMALGNPFNVFQYNVLQRMIAQVTGYELGEYIFNIGDCHVYTRHIDNLKIQMEREQFEAPELWINPEVKDFYNFTIDDFKLINYKHGDKLLFEVAV

SEQ ID NO: 17726 - DNA, 795 bp, Bacillus clausii
  CDS (1)..(795): transl_table=11
atggaacaatacttgcagttatgcgagcacgttttgcaaaacggctcgccaaaatcagatcggacaggcactggcaccattagtgtatttggttaccaaatgcgctttgatttagaaaagggttttccaattgtcacaacgaaaaaattgcatatgcgttcgatcatccatgaattgctttggtttctaaaaggcgacacgaacatccgttatttgcaagaaaatggcgttcgtatttggaacgaatgggcggatgaaaacggcgaccttgggcctgtttacggaaaacaatggcgctcctgggaaggggcaaacggcaaaacagtcgaccaaattactgaagtggttgagcaaataaaaacgaatccgaattctcgccgcttaattgtcaatgcgtggaatgtcgcggagattgaagaaatggcgcttgcgccatgccattgcttgtttcagttttacgtaaacgacggaaaactttcttgccaattgtaccagcgcagtgccgatatttttcttggcgttccttttaatatatcgtcttatgccctgttaacgatgatgatggcccaagtgtgcggattaaagcctggcgaatttatccatacgtttggcgatgcccatttgtacaacaaccatattgaacagacgaagcttcaattaacgcgtaaaccaaaacagctacctacgatgcatatcaatccagaggtaacagacctgtttgcgtttacttacgatgattttgaactgaaacattatgatccttatccgcatattaaagcagaggtgtccgtatga

SEQ ID NO: 17727 - protein, 264 aa, Bacillus clausii
MEQYLQLCEHVLQNGSPKSDRTGTGTISVFGYQMRFDLEKGFPIVTTKKLHMRSIIHELLWFLKGDTNIRYLQENGVRIWNEWADENGDLGPVYGKQWRSWEGANGKTVDQITEVVEQIKTNPNSRRLIVNAWNVAEIEEMALAPCHCLFQFYVNDGKLSCQLYQRSADIFLGVPFNISSYALLTMMMAQVCGLKPGEFIHTFGDAHLYNNHIEQTKLQLTRKPKQLPTMHINPEVTDLFAFTYDDFELKHYDPYPHIKAEVSV

SEQ ID NO: 17728 - DNA, 795 bp, Bacteroides thetaiotaomicron
  CDS (1)..(795): transl_table=11
atgaaacaatatttagatttactcaatcgcgtattaactgaaggaactgagaaaagtgaccgtacaggaaccggaacgatcagtgtgttcggacatcagatgcgtttcaacctcgacgagggtttcccgtgtctgaccaccaaaaaactgcatctgaaatcaatcatctacgagttactctggtttctgcaaggtgatacgaacgcgaaatatctgcaagaacacggtgtacgcatctggaacgaatgggcggacgagaacggtgatttagggcatatctatggctatcagtggcgttcgtggcccgactacgacggcggattcatcgaccagatcagcgaagcggtagagacgatcaagcacaatcccgactcccgccgtatcattgtcagcgcctggaatgtagccgatttaaagaatatgaacctgcctccctgtcatgccttcttccagttttacgtggcagacggtcggctgagcctgcaactttaccagcgcagcgcggatatatttctcggagtcccgttcaatatcgcatcatatgcactgctgctacaaatgatggcgcaggtgacaggactgaaagcgggtgaatttatccatacacttggcgatgcccatatctatctgaaccacttggatcaggtcaaattgcagcttagccgcgaaccacgcgcattgcctcaaatgaaaattaatccggatgtgaagagtatctatgacttccagttcgaagacttcgaactggtgaactacgacccgcatccacatattgccggaatagtagcggtataa

SEQ ID NO: 17729 - protein, 264 aa, Bacteroides thetaiotaomicron
MKQYLDLLNRVLTEGTEKSDRTGTGTISVFGHQMRFNLDEGFPCLTTKKLHLKSIIYELLWFLQGDTNAKYLQEHGVRIWNEWADENGDLGHIYGYQWRSWPDYDGGFIDQISEAVETIKHNPDSRRIIVSAWNVADLKNMNLPPCHAFFQFYVADGRLSLQLYQRSADIFLGVPFNIASYALLLQMMAQVTGLKAGEFIHTLGDAHIYLNHLDQVKLQLSREPRALPQMKINPDVKSIYDFQFEDFELVNYDPHPHIAGIVAV

SEQ ID NO: 17730 - DNA, 795 bp, Bartonella henselae
  CDS (1)..(795): transl_table=11
atgaaaacctatcttgatcttttatctcatgttttaaataaaggcattgatcgtactgacagaactggtgtaggaacacgatcggtttttggctatcagatgcggtttgatttacaggctggatttccattgttaacaacgaagaaattgcatttacgctcgatcatttatgagcttttgtggtttcttagaggtgataccaatattgcctggttgaaagaacatggtgtgtcaatttgggatgagtgggctgatgaaaaaggcaatcttggtcctatttatggttatcagtggcgttcttggccagctcctgatggacgtcatattgatcagatcagtaatcttttgatgatgattaaaaaaacgcctgattctcgtcgtttaattgtctctgcgtggaatcctgcctcgataaaggaaatggctcttccaccatgccattgtttttttcaattttatgttgcagatggtaaattgtcttgccaactttatcaacgttctgcagatatttttttaggtattccgttcaatattgcttcctatgcgttattaacaatgatgattgcacaagtaagtggtcttaaagtcggcgattttattcatactcttggtgatgcgcatctttattctaatcattttgaacaggctcaacatcaattgtctcgtataccaaatgctttgccgtttatgcgtataaatccagcggtaacagatcttttttcttttaaatttgaggattttgaattgcttaattatgatgcacaaccacatatcaaggcgccaatagcagtatga

SEQ ID NO: 17731 - protein, 264 aa, Bartonella henselae
MKTYLDLLSHVLNKGIDRTDRTGVGTRSVFGYQMRFDLQAGFPLLTTKKLHLRSIIYELLWFLRGDTNIAWLKEHGVSIWDEWADEKGNLGPIYGYQWRSWPAPDGRHIDQISNLLMMIKKTPDSRRLIVSAWNPASIKEMALPPCHCFFQFYVADGKLSCQLYQRSADIFLGIPFNIASYALLTMMIAQVSGLKVGDFIHTLGDAHLYSNHFEQAQHQLSRIPNALPFMRINPAVTDLFSFKFEDFELLNYDAQPHIKAPIAV

SEQ ID NO: 17732 - DNA, 795 bp, Bartonella quintana
  CDS (1)..(795): transl_table=11
atgaaaacttacctcgatcttttatctcatgttttaaataagggcattgatcgtacagaccgaactggtgttgggacgcgatcggtttttggctatcagatgcggtttgatttacagatcggatttccattgttaacaacgaagaaattgcatttacgctcgatcatttatgaacttttgtggtttcttagaggtgatacaaatgtcgcatggttaaaagaacatggtgtatcaatttgggatgagtgggctgatgaaaaaggcaatcttggtcctatttatggttatcaatggcgttcttggccagcttctgatggacgctatattgatcaaatcagtcgtcttttaacgatgattaaaaaaacacctgattctcgtcgcttgattgtctctgcgtggaatcctgcattgatagaagaaatggctttgccaccttgtcattgcttttttcaattttatgttgccgacgataagttgtcttgccagctttatcagcgttcggcggatatttttttaggtgttccgttcaatattgcttcttatgcgttgttaacgatgatgattgcgcaagtgagtggccttaaagccggtgatttcattcatactctcggcgatgcccatctttattctaatcattttgaacaggctcgataccaattatctcgtataccaaatgctttgccatcgatgcttataaatccatcggtaacagatcttttttcgtttaaattcgaggattttgaattgcttaattatgaagcgcaaccacatataaaggcaccggtagcagtatga

SEQ ID NO: 17733 - protein, 264 aa, Bartonella quintana
MKTYLDLLSHVLNKGIDRTDRTGVGTRSVFGYQMRFDLQIGFPLLTTKKLHLRSIIYELLWFLRGDTNVAWLKEHGVSIWDEWADEKGNLGPIYGYQWRSWPASDGRYIDQISRLLTMIKKTPDSRRLIVSAWNPALIEEMALPPCHCFFQFYVADDKLSCQLYQRSADIFLGVPFNIASYALLTMMIAQVSGLKAGDFIHTLGDAHLYSNHFEQARYQLSRIPNALPSMLINPSVTDLFSFKFEDFELLNYEAQPHIKAPVAV

SEQ ID NO: 17734 - DNA, 795 bp, Bdellovibrio bacteriovorus
  CDS (1)..(795): transl_table=11
atgaagcagtatcacgatctcatcaaaacagttctagaacatggcgtgaaaaaagaggaccgcacaggcaccggcactatttccatgttcggttatcagatgcgctacaatctgcaagagggcttccctctgctgaccaccaaaaaactgcacacgcgctcgatctttcatgaactgctgtggttcctgaagggtgaaaccaacatcaagtatcttcacgacaacaaagtgacgatctgggatgaatgggctgatgaaaacggcaacctgggcccggtgtacggaaaacaatggcgctcctgggaaacggccgacggccgcaccatcgatcagatcaccaacgtcgtagagcaaatcaaaaagaatccgaactcccgccgcatgctggtggtggcgttcaatccgggcgacgttgacaagatggctttgccgccatgtcacgccttcttccagttctatgtggcgaacggaaagctttcctgccagctgtatcagcgcagtgctgatatcttcctgggcgtgccgttcaatatcgccagctacgctttgctgacccatatgatcgcgcaagtttgtgatcttgaagtgggtgactttgttcacaccctgggtgatgcgcatctttacctgaatcaccttgaacaggcgaacctgcaactgacccgtgaattccgtccactgcctcagttgaaactgaacccggcaaagaaggatcttttcgacttcacttacgaagacatcgaaatcatcggttacgatccgcacccggccatcaaggctgaggtggcagtatga

SEQ ID NO: 17735 - protein, 264 aa, Bdellovibrio bacteriovorus
MKQYHDLIKTVLEHGVKKEDRTGTGTISMFGYQMRYNLQEGFPLLTTKKLHTRSIFHELLWFLKGETNIKYLHDNKVTIWDEWADENGNLGPVYGKQWRSWETADGRTIDQITNVVEQIKKNPNSRRMLVVAFNPGDVDKMALPPCHAFFQFYVANGKLSCQLYQRSADIFLGVPFNIASYALLTHMIAQVCDLEVGDFVHTLGDAHLYLNHLEQANLQLTREFRPLPQLKLNPAKKDLFDFTYEDIEIIGYDPHPAIKAEVAV

SEQ ID NO: 17736 - DNA, 801 bp, Bifidobacterium longum
  CDS (1)..(801): transl_table=11
atgccctatgaggacctggtgcgcaagatcctgaccgaaggcacgctgaagtccgatcgcaccggcaccggcacgatttccctgttcggccagcagatgcgctttgacctgtcgaagtacttcccgttgctgaccaccaagaccgtgttcttcaaaggcctggcctatgagctgctgtggtttttgaagggttcctccaacatcaactggctgctggagcacaacgtgcatatttgggatgagtgggcggacgagaacggcgatctgggcccggtctatggcgtgcagtggcgttcctggcccgcgccgacccccgaggacccgaatcgcaccatcgaccagatctccaatgtgctcgacctcatcaagcatcatccggattcgcgccgcatgatcgtctccgcgtggaatccggccgaggtggagaagatggcgttgccgccctgccacgcgctcttccagttctacgtggccgacgacaagctaagctgccagctgtaccagcgttcctgcgacatgttcctcggcgtgccgttcaatatcgcctcctactcgctgctcaccatgatgatggcgcagcaggccgggctcaagccgggcgaattcgtctggaccggcggcgactgccatgtttacgacaaccacgtcgaccagttccttgagcagctgggccgcaagccctacccgtacccgaccatcgagatccgtaaggccgattccctgttcgactaccagtatgaggacttcaaggtcgtcggctaccagcatcaccccactattaaggcacctgttgcggtctga

SEQ ID NO: 17737 - protein, 266 aa, Bifidobacterium longum
MPYEDLVRKILTEGTLKSDRTGTGTISLFGQQMRFDLSKYFPLLTTKTVFFKGLAYELLWFLKGSSNINWLLEHNVHIWDEWADENGDLGPVYGVQWRSWPAPTPEDPNRTIDQISNVLDLIKHHPDSRRMIVSAWNPAEVEKMALPPCHALFQFYVADDKLSCQLYQRSCDMFLGVPFNIASYSLLTMMMAQQAGLKPGEFVWTGGDCHVYDNHVDQFLEQLGRKPYPYPTIEIRKADSLFDYQYEDFKVVGYQHHPTIKAPVAV

SEQ ID NO: 17738 - DNA, 972 bp, Bordetella pertussis
  CDS (1)..(972): transl_table=11
atgaaacaatatctagacctcgtccaatccattctcgaccagggcgcctggcaggaaaaccgcaccggcgtgcgcacgctctcgctgcccggcgcggcgctgcgcttcgacctgcagcaggggtttcccgccgtcaccaccaagaagctggcgttcaagtccgccatcggcgaaatggtgggcttcctgcgcgccacgcgcagcgccgcgcagttccgcgcgctgggttgcaaggtctgggaccagaacgccaacgagaacgagcaatggctggccaacccgtaccgcgagggtcccgacgacctcggcccggtctacggcgtccaatggcgccattggccggcctacaagctgctgccgagcagcgccggcggccaggtggccgacgcgctggcgcgcggctaccgacaagtggccgaggtcgacgaaaacggcgcgccgcacgtgctgctgtacaaggcggtggaccagttgcgccagtgcctggacaccatccgccaatcgccgggcgaccgccgcatcctgttccatggctggaactgggcgcagatcgaggaaatggccctgccgccctgccatctgctctaccagttcctgcccaacgccggcacgcgcgaaatctcgctgtgcctgtacatccgctccaacgacgtcggcctgggcacgcccttcaacctgaccgagggcgcggcgctgctgcacctggtcggccgcctgaccggctacaagccgcgctggttcagctatttcatcggcgatgcgcacgtctacgaaaaccacctgccgatgctgcgcgagcaactggcgcgcgagccctatccggccccgcagctggtgctgtcggaccgcattcccgatttcgccgtgaccggcaagtacgagccgcaatggctggagcaggtcgagccgggcgatttcacgctgagcggctaccagcaccacgcgccgctgaccgcccccatggcggtctga

SEQ ID NO: 17739 - protein, 323 aa, Bordetella pertussis
MKQYLDLVQSILDQGAWQENRTGVRTLSLPGAALRFDLQQGFPAVTTKKLAFKSAIGEMVGFLRATRSAAQFRALGCKVWDQNANENEQWLANPYREGPDDLGPVYGVQWRHWPAYKLLPSSAGGQVADALARGYRQVAEVDENGAPHVLLYKAVDQLRQCLDTIRQSPGDRRILFHGWNWAQIEEMALPPCHLLYQFLPNAGTREISLCLYIRSNDVGLGTPFNLTEGAALLHLVGRLTGYKPRWFSYFIGDAHVYENHLPMLREQLAREPYPAPQLVLSDRIPDFAVTGKYEPQWLEQVEPGDFTLSGYQHHAPLTAPMAV

SEQ ID NO: 17740 - DNA, 840 bp, Bacteriophage phi
  CDS (1)..(840): transl_table=11
atgactcaattcgataaacaatacaattcaattataaaggatattatcaataatggaatctcagacgaagagtttgatgtaagaaccaagtgggactcagatggaacgccggcacatactctaagtgtaatgagtaagcaaatgagattcgacaactcagaggttccgattttaacgacaaaaaaggttgcctggaaaacagccattaaagagttactctggatttggcagctgaaatcgaacgatgttactgaattgaacaaaatgggcgtacatatttgggatcagtggaaacaagaagacggcaccatcggacatgcatatggatttcagctggggaagaaaaacagaagtctaaatggagaaaaagtggatcaggtagactatcttcttcatcaattgaagaacaacccgtcttcacgcagacacattacaatgctgtggaatcctgatgatttagacgcaatggccttaacgccatgtgtatacgagacacaatggtatgttaagcaaggtaagctccaccttgaggtaagagcacggagcaatgacatggcgttggggaatccattcaatgtattccagtacaatgtgttgcagcgcatgattgctcaagtgactggttatgagcttggtgaatatatctttaacattggggattgccatgtgtacacacgtcatatagacaatttgaaaatccagatggaaagagaacagtttgaagcacctgaactatggatcaatcctgaagtgaaagatttttataactttaccgttgatgatttcaaattaatcaactataaacatggggacaagcttttatttgaggtagcggtttaa

SEQ ID NO: 17741 - protein, 279 aa, Bacteriophage phi
MTQFDKQYNSIIKDIINNGISDEEFDVRTKWDSDGTPAHTLSVMSKQMRFDNSEVPILTTKKVAWKTAIKELLWIWQLKSNDVTELNKMGVHIWDQWKQEDGTIGHAYGFQLGKKNRSLNGEKVDQVDYLLHQLKNNPSSRRHITMLWNPDDLDAMALTPCVYETQWYVKQGKLHLEVRARSNDMALGNPFNVFQYNVLQRMIAQVTGYELGEYIFNIGDCHVYTRHIDNLKIQMEREQFEAPELWINPEVKDFYNFTVDDFKLINYKHGDKLLFEVAV

SEQ ID NO: 17742 - DNA, 861 bp, Bacteriophage T4
  CDS (1)..(861): transl_table=11
atgaaacaataccaagatttaattaaagacatttttgaaaatggttatgaaaccgatgatcgtacaggcacaggaacaattgctctgttcggatctaaattacgctgggatttaactaaaggttttcctgcggtaacaactaagaagctcgcctggaaagcttgcattgctgagctaatatggtttttatcaggaagcacaaatgtcaatgatttacgattaattcaacacgattcgttaatccaaggcaaaacagtctgggatgaaaattacgaaaatcaagcaaaagatttaggataccatagcggtgaacttggtccaatttatggaaaacagtggcgtgattttggtggtgtagaccaaattatagaagttattgatcgtattaaaaaactgccaaatgataggcgtcaaattgtttctgcatggaatccagctgaacttaaatatatggcattaccgccttgtcatatgttctatcagtttaatgtgcgtaatggctatttggatttgcagtggtatcaacgctcagtagatgttttcttgggtctaccgtttaatattgcgtcatatgctacgttagttcatattgtagctaagatgtgtaatcttattccaggggatttgatattttctggtggtaatactcatatctatatgaatcacgtagaacaatgtaaagaaattttgaggcgtgaacctaaagagctttgtgagctggtaataagtggtctaccttataaattccgatatctttctactaaagaacaattaaaatatgttcttaaacttaggcctaaagatttcgttcttaacaactatgtatcacaccctcctattaaaggaaagatggcggtgtaa

SEQ ID NO: 17743 - protein, 286 aa, Bacteriophage T4
MKQYQDLIKDIFENGYETDDRTGTGTIALFGSKLRWDLTKGFPAVTTKKLAWKACIAELIWFLSGSTNVNDLRLIQHDSLIQGKTVWDENYENQAKDLGYHSGELGPIYGKQWRDFGGVDQIIEVIDRIKKLPNDRRQIVSAWNPAELKYMALPPCHMFYQFNVRNGYLDLQWYQRSVDVFLGLPFNIASYATLVHIVAKMCNLIPGDLIFSGGNTHIYMNHVEQCKEILRREPKELCELVISGLPYKFRYLSTKEQLKYVLKLRPKDFVLNNYVSHPPIKGKMAV

SEQ ID NO: 17744 - DNA, 795 bp, Bradyrhizobium japonicum
  CDS (1)..(795): transl_table=11
atgcaccagtatcaggacctgctcgagcggattctttcagacggcgccgagaagaccgaccggaccggcaccggcacgctctcggtgttcggccatcagatgcgctttaatctgtcggccggcttcccgatgctgaccaccaagcggctgccgctgaaggcgatcgtgcacgagctgttgtggttcctgaagggcgacaccaacatcaaatatctgcgcgacaacggcgtcaccatctgggacgagtgggcggacgccaatggcgatctcggcccggtctacggtcatcagtggcgttcctggcccgcgccggacggacgcagcatcgaccagatcgccaacgtcgtcgacatgatcaagcgcaatccggactcgcgccgcctgatcgtctcggcctggaatccggccgaggtcgacaagatggcgttgccgccgtgccattgcctgttccagttctatgtcgccaacggcaagctgtcgtgccagctctatcagcgctcggccgacgtattcctcggcgtgcccttcaacatcgcctcctatgcgctgctcaccatgatggtggcgcaggtcacgggcctcaagcccggcgacttcgtgcattcgttcggcgacacccatctctattccaaccatctggagcaggcgaagctccagctcacgcgcgcgccgcgtgcgctgccggtgatgcggatcaatcctgacgtgaaggacatcttctccttccgcttcgaggatttcgagctcgtcggctacgatccgcacccgcacatcaaggcggaagtcgcggtctga

SEQ ID NO: 17745 - protein, 264 aa, Bradyrhizobium japonicum
MHQYQDLLERILSDGAEKTDRTGTGTLSVFGHQMRFNLSAGFPMLTTKRLPLKAIVHELLWFLKGDTNIKYLRDNGVTIWDEWADANGDLGPVYGHQWRSWPAPDGRSIDQIANVVDMIKRNPDSRRLIVSAWNPAEVDKMALPPCHCLFQFYVANGKLSCQLYQRSADVFLGVPFNIASYALLTMMVAQVTGLKPGDFVHSFGDTHLYSNHLEQAKLQLTRAPRALPVMRINPDVKDIFSFRFEDFELVGYDPHPHIKAEVAV

SEQ ID NO: 17746 - DNA, 795 bp, Brucella melitensis
  CDS (1)..(795): transl_table=11
atgcgcacctatcttgatcttctccagcatgtgctcgaccacggcgttgaccgtgacgaccgcacgggaacgggcacacgctcggtcttcggctatcagatgcggttcgacctggaggaggggtttccggttctcacgaccaagaaactccatttgcgttcgatcattcatgaactcttgtggttcctgaaaggcgatacgaacattgcctatctgaaagaaaacggcgttacgatctgggatgaatgggccgatgaaaacggcgatctggggccggtttatggctatcagtggcgttcatggcctgcgccggacggacggcatatcgaccagatcgcgaatcttttgaagatgttgcacacaaatcctcagtcgcggcgtctgattgtttcggcgtggaacccggcgctggtggatgaaatggctctgccgccctgccactgcctgttccagttctatgtcgccaatggcaggctttcctgccagctttaccagcgttccgcggatattttcctcggcgtgccgttcaatatcgcctcctatgccctgttgacgatgatgatcgcgcaggtgacggggctgaaaccgggcgagttcatccatacgctgggcgatgcccatatttattccaaccatttcgagcaggcacgactacaactgacccgcacgccgaagaagctgccggtgatgcatatcaacccggacgtgaaggatctctttgcctttcgtttcgaggatttccggctggatggctatgaagccgaccccacgatcaaagcgcctatcgcggtatag

SEQ ID NO: 17747 - protein, 264 aa, Brucella melitensis
MRTYLDLLQHVLDHGVDRDDRTGTGTRSVFGYQMRFDLEEGFPVLTTKKLHLRSIIHELLWFLKGDTNIAYLKENGVTIWDEWADENGDLGPVYGYQWRSWPAPDGRHIDQIANLLKMLHTNPQSRRLIVSAWNPALVDEMALPPCHCLFQFYVANGRLSCQLYQRSADIFLGVPFNIASYALLTMMIAQVTGLKPGEFIHTLGDAHIYSNHFEQARLQLTRTPKKLPVMHINPDVKDLFAFRFEDFRLDGYEADPTIKAPIAV

SEQ ID NO: 17748 - DNA, 795 bp, Buchnera aphidicola
  CDS (1)..(795): transl_table=11
atgaaacaatacatcaaattaattaaaaaaatcatcagggttggaaaccaaaaaaaagatcgcacaggaacaggaactttatctatttttggttataatatgaaatttgatttaaaaaaaggttttccacttcttactacaaaaaaatgtcatattgcatctatcatctacgagcttttatggtttttaaaaggagacacaaacatttcttatctaaatgaaaataaaatatcaatttggaataattgggcaaatgaatccggagatgttggtccaatatacggaaaacaatggcgtaattggagtacaccagaaggacacgaaattgatcaaataaaaaatgtattaatacaattaaaaaaaaatcccgattcccgtagaatgttagtttctagttggaatgttggagatatagataaaatgagattacctccttgccatgttctatttcaattttatgtatttaacaatacattaagttgtcaattgtaccagcgttcttgtgatgtgtttctaggactaccttttaatatagctagttactcaatacttatacacatgatagcacaacaatgtgatttaaaagttggagattttttgtggacaggaggcgatgttcacttatataataatcatatagaattagcaaaaaaacaaatactcagaatacctcgaacgcttcccaaactaaccatcctcaaaaaacctcagtcattatttcaatattgtttcgaagactttaaaattattggatatcatccttatcctgctatcaaaggagaaatatctatataa

SEQ ID NO: 17749 - protein, 264 aa, Buchnera aphidicola
MKQYIKLIKKIIRVGNQKKDRTGTGTLSIFGYNMKFDLKKGFPLLTTKKCHIASIIYELLWFLKGDTNISYLNENKISIWNNWANESGDVGPIYGKQWRNWSTPEGHEIDQIKNVLIQLKKNPDSRRMLVSSWNVGDIDKMRLPPCHVLFQFYVFNNTLSCQLYQRSCDVFLGLPFNIASYSILIHMIAQQCDLKVGDFLWTGGDVHLYNNHIELAKKQILRIPRTLPKLTILKKPQSLFQYCFEDFKIIGYHPYPAIKGEISI

SEQ ID NO: 17750 - DNA, 795 bp, Buchnera aphidicola
  CDS (1)..(795): transl_table=11
atgaaacaatatttagatttaataaaaaaaataattaaaaatggaaattcaaaaaaagatcgaaccggtacaggaactttatctatttttggacatcatatgaaatttgatttaaaaaaaggttttcctcttatcacaacaaaaaaatgtcatataccatcaattattcatgaacttttatggtttcttaggggagaaacaaatattaaatatcttaacgaaaataaaatatcaatttgggataactgggcagataaatttggtgatctaggtccaatttatggaaaacaatggagaagttgggatacatctaacggaaaaaaaatcgatcaaataaaaaacgtactaaaacaaataaaagaagatcctgattcacgtagaattttagtatctagttggaacgttggagaaattgataaaatgtctttagctccatgtcatatattatttcaattttacgtattaaaaaaaaaattaagttgtcaactttaccaacgttcttgcgatgtatttcttggtttgccttttaatatagctagctatgcaatactgatacatatgatagctcaacaatgtaatctacaagttggagaatttttatggacaggaggtgacgttcatttatataaaaatcatgttgaattggcgaaaaaacaaatattgagaatacctaaaaaattaccagagttaataattttaaaaaaacctcaatcattatttcaatattcttttgaagattttaaaattgttgggtataaaccatattccttaattaagggaaaaatatctgtataa

SEQ ID NO: 17751 - protein, 264 aa, Buchnera aphidicola
MKQYLDLIKKIIKNGNSKKDRTGTGTLSIFGHHMKFDLKKGFPLITTKKCHIPSIIHELLWFLRGETNIKYLNENKISIWDNWADKFGDLGPIYGKQWRSWDTSNGKKIDQIKNVLKQIKEDPDSRRILVSSWNVGEIDKMSLAPCHILFQFYVLKKKLSCQLYQRSCDVFLGLPFNIASYAILIHMIAQQCNLQVGEFLWTGGDVHLYKNHVELAKKQILRIPKKLPELIILKKPQSLFQYSFEDFKIVGYKPYSLIKGKISV

SEQ ID NO: 17752 - DNA, 795 bp, Buchnera aphidicola
  CDS (1)..(795): transl_table=11
atgaagagttatttggttttgttaaaaaaaatattaaaagaaggaagtaataggaaagatcgaacaggaataggaacattatcagtttttggatatcatatggaatttaatttgaaattgggatttccgttaattacgactaaaaaatgtcattttcctgctatagttcatgaacttttgtggtttttaaagggagatacaaatataaagtatttaaatgatcataatatatctatttggaatccatgggctgatgaacgtggatatttaggtccaatttatggagaacaatggagatcatggaaaacaaaagatggacgtgtaattgatcaaatagataatgtaatacatttaataaaaaacaatccaaattctcgaagaatagttgtatctagttggaatgttggtgatttacataaaatggcattattaccatgtcatgtattatttcagtttcacgttgttgatcacgttttgcattgtcaattatatcagcgatcttgtgatgtttttcttggtttgccttttaatatagctagttattctttattaacacatatgatagcacaacagtgtaatctaaaagtaggtaattttatatggactggcggtgatgtgcatttatataaaaatcatatcaaacaagctaaaaaacaaattttaagacgtccttatttacttccaaaattagttattaacagaaaacctactcaaatatttaattatcttttacaagattttaatttattgaattataaatatcatccttctattcatgctaaaatagcaatataa

SEQ ID NO: 17753 - protein, 264 aa, Buchnera aphidicola
MKSYLVLLKKILKEGSNRKDRTGIGTLSVFGYHMEFNLKLGFPLITTKKCHFPAIVHELLWFLKGDTNIKYLNDHNISIWNPWADERGYLGPIYGEQWRSWKTKDGRVIDQIDNVIHLIKNNPNSRRIVVSSWNVGDLHKMALLPCHVLFQFHVVDHVLHCQLYQRSCDVFLGLPFNIASYSLLTHMIAQQCNLKVGNFIWTGGDVHLYKNHIKQAKKQILRRPYLLPKLVINRKPTQIFNYLLQDFNLLNYKYHPSIHAKIAI

SEQ ID NO: 17754 - DNA, 840 bp, Caulobacter crescentus
  CDS (1)..(840): transl_table=11
atgagcaccgccgtcctcgacgcccccaaagccgcgaccgaccatcccgagcggcagtacctgaccctgctggccgacatcctggagaatggcgtccagcgcggcgaccgcacgggcacggggacactgggcgtattcggccgccagatccgctttgacctggccaagggcttcccggtcctgaccaccaagaagctgcacctgcgctcgatcatcatcgagctgctgtggttcctgaagggcgacaccaacatcgcctatctcaaggacaacggcgtgcgcatctgggacgagtgggccgacgagaacggcgacctgggtcccgtctatggcaagcagtggcgctcctgggccacgcctgacggccgggtgatcgaccagatctcggccctggtcgagaacctgaaggccaaccccaacagccgccgccacatcgtcacggcctggaacccggccgatgtcgacgacatggccctgccgccttgccactgcctgttccagttcttcgtggcggatggaaaactgagctgccagctctaccagcgcagcgccgacgtgttcttaggggtgccgttcaacatcgccagctacgccctgctcaccctgatggtcgccaaggtcgtgggcctggagcccggcgagttcgtccacaccttcggcgacgcccacctctatctgaaccacctggatcaggcccgcgagcaactgacccgcgagcccttcgactttcccacgatgaagatcgccgacaagcgcgacctcttcgggttcgagtacgaggacttcacgctggagggctatcaggcccacccgcacatcaaggccgaggtttcggtctag

SEQ ID NO: 17755 - protein, 279 aa, Caulobacter crescentus
MSTAVLDAPKAATDHPERQYLTLLADILENGVQRGDRTGTGTLGVFGRQIRFDLAKGFPVLTTKKLHLRSIIIELLWFLKGDTNIAYLKDNGVRIWDEWADENGDLGPVYGKQWRSWATPDGRVIDQISALVENLKANPNSRRHIVTAWNPADVDDMALPPCHCLFQFFVADGKLSCQLYQRSADVFLGVPFNIASYALLTLMVAKVVGLEPGEFVHTFGDAHLYLNHLDQAREQLTREPFDFPTMKIADKRDLFGFEYEDFTLEGYQAHPHIKAEVSV

SEQ ID NO: 17756 - DNA, 795 bp, Chromobacterium violaceum
  CDS (1)..(795): transl_table=11
atgcaacagtacctcgacctgatgcgccatgtgctggaacatggacacgacaaggcagaccgcaccggaaccggcacccgctcggtgttcggctaccagatgcgcttcgatttggcggccggcttcccgctggtcaccaccaagaaatgccatctgcgctccatcattcatgaactgctgtggttcctgtcgggcgacaccaatatccgctacctgaaggaaaacggcgtgtcgatctgggacgagtgggccgacgagaacggcgacctggggccggtctacggctaccagtggcgcagctggccggcgccggacggccgccacatcgaccagatcagccagctcttggacatgatcaagaagaatccggactcgcgccggctgatcgtgtcggcgtggaatccggcgctggtggaccagatggcgctgccgccgtgccacagcctgtttcagttctacgtcgccaatgggcgcctgtcctgccagctgtaccagcgttcggccgacatcttcctcggcgtgccgttcaacatcgccagctacgcgttgctgaccatgatggtggcccaggtgtgcggcctgcagcccggcgatttcgtccacacgctgggcgacgcccacctgtacagcaaccacctggagcaggcccggctgcaactgacgcgcgatccccgcccgctgccgacgatgaagctgaacccggaggtgaaggatctgttcgcgttcaccttcgacgacttcgcgctggaaggctacgatccgcatccgcacatcaaggcgcaggtggcggtatga

SEQ ID NO: 17757 - protein, 264 aa, Chromobacterium violaceum
MQQYLDLMRHVLEHGHDKADRTGTGTRSVFGYQMRFDLAAGFPLVTTKKCHLRSIIHELLWFLSGDTNIRYLKENGVSIWDEWADENGDLGPVYGYQWRSWPAPDGRHIDQISQLLDMIKKNPDSRRLIVSAWNPALVDQMALPPCHSLFQFYVANGRLSCQLYQRSADIFLGVPFNIASYALLTMMVAQVCGLQPGDFVHTLGDAHLYSNHLEQARLQLTRDPRPLPTMKLNPEVKDLFAFTFDDFALEGYDPHPHIKAQVAV

SEQ ID NO: 17758 - DNA, 792 bp, Clostridium acetobutylicum
  CDS (1)..(792): transl_table=11
atgagcaaagctgatgaaaaatatttagatataatagaaaacattttagaaaatggttattatgataacaatagaacaggaattgaaacctataagcttcctcatcaaattatgcagtttgacttgtccaaagagtttccaatactcacaacaaaatttgttgcttttaaaacttctgtaaaggagcttttgtggatatataaagatcaatcaaacgatgtgagaaaacttcaaaatgagaatgttaccatatgggatgaatggatgctcgaagacggcactataggaaaagcttacggttatcaagtagctaaatttaaacaaattgacaatctaatagacaccttaaaaacggaccctcaaagtagacgaatgcttatatccttatggaatatagccgacttaaaggatatgtctcttacaccttgctgctatgaaacactgtgggatgtacaaaatggcaaactaaattgtatgctagttcaaagaagtggtgacatgcctttaggtgtaccttttaatatgtgccaatatgcagttttagtacatttaatagcccaggttactggccttaaaccaggtctctttactcatgtgataaataatgctcatatatataaaaatcaaattgaaggtatgaaaattcaacttaaaagaagagataaggcatacgaagcaccaaagctgtggataaatcctaacattaaaaatttttatgattttacagctgatgacattaaattaatagattacaaacatcacgataaaataaaaatggaggtggccgtgtaa

SEQ ID NO: 17759 - protein, 263 aa, Clostridium acetobutylicum
MSKADEKYLDIIENILENGYYDNNRTGIETYKLPHQIMQFDLSKEFPILTTKFVAFKTSVKELLWIYKDQSNDVRKLQNENVTIWDEWMLEDGTIGKAYGYQVAKFKQIDNLIDTLKTDPQSRRMLISLWNIADLKDMSLTPCCYETLWDVQNGKLNCMLVQRSGDMPLGVPFNMCQYAVLVHLIAQVTGLKPGLFTHVINNAHIYKNQIEGMKIQLKRRDKAYEAPKLWINPNIKNFYDFTADDIKLIDYKHHDKIKMEVAV

SEQ ID NO: 17760 - DNA, 813 bp, Corynebacterium diphtheriae
  CDS (1)..(813): transl_table=11
atgagcaccaacaacaccataaaaaccccgtatgaagaccttcttcgcacaatccttgaacagggctcccacaaagacgaccgtaccggcaccggtacaaccagcctttttggccaacagatgcgtttcgatctcaccgaggccttcccactcatcaccaccaagaaggtgtattggaaaggtgtaatcggagaactcctctggttcctgcaaggctcctccaatgttcgctggctccaaaagcgcaacattcacatctgggatgaatgggcttccgaagaaggcgaactgggacctgtttatggtgttcaatggcgcagctggcctacccctgatgggcagcatgtggaccagatcgcccaagcactagatatactcaaaaacaatccggactctaggcgcaacatcgtctcagcgtggaacgtggccgatctcaacaatatggcgcttccaccgtgccacttgttgttccagctttatgttgccgatggaaagttgagctgccagctctaccagcgcagcgcagacatgttcttaggtgttccgtttaatatcgcctcctactccgctctcacacatatgctcgcacaacaagcaggccttaaggtcggcgagttcatttggactggcggcgactgccacatctacgacaatcatcgcgagcaggttctcacccagctctcacgtgaacctcgcccctaccctcagttgacattgcggaaagcctcctcgatcttcgactacgacttcgacgatttcactatcgagggctacgatcctcacccagcgattcgtggcgaggtagcagtgtaa

SEQ ID NO: 17761 - protein, 270 aa, Corynebacterium diphtheriae
MSTNNTIKTPYEDLLRTILEQGSHKDDRTGTGTTSLFGQQMRFDLTEAFPLITTKKVYWKGVIGELLWFLQGSSNVRWLQKRNIHIWDEWASEEGELGPVYGVQWRSWPTPDGQHVDQIAQALDILKNNPDSRRNIVSAWNVADLNNMALPPCHLLFQLYVADGKLSCQLYQRSADMFLGVPFNIASYSALTHMLAQQAGLKVGEFIWTGGDCHIYDNHREQVLTQLSREPRPYPQLTLRKASSIFDYDFDDFTIEGYDPHPAIRGEVAV

SEQ ID NO: 17762 - DNA, 804 bp, Corynebacterium efficiens
  CDS (1)..(804): transl_table=11
atgactgccattcccaccccatatgaggacctcctccgcaccatcagagacgaaggcgcccataaggacgatcgcaccggcaccggcaccacctccctgttcggccagcagatccgttacaacctgcaggagggtttccccctcctgaccaccaagaaggttcatttccactccgtggtcggtgaactgctgtggttcctgcgcggtgactccaacgtccgttggctccaggacaacaacatccgcatctggaacgagtgggccgatgaggacggcgagctcggtcccgtctacggcgtgcagtggcgcagctggcccaccccggacggtcgccacatcgaccagatctcgcgtgcactggagatgctgaagaacaatccggattcccgccgtaacatcgtctccgcatggaacgtctccgaactggagaacatggcgcttcccccctgtcatctgctgttccagctgtatgtcgccgatgggaaactgtcctgccagctctaccagcgcagcgccgacatgttcctcggtgtgcccttcaacatcgcctcctacgccctgctgacgcacatgttcgcccagcaggcagacctggaggtgggtgagttcatctggaccggcggtgactgccacatctatgacaatcacaccgaacaggtcgatgaacagctgagccgcgcggcgcgcccctaccccaccctggaactgaacaaggctgcgtccctgttcgactacaccttcgaggacattgccgtgagcaactacgatccgcacccgctcatccgcggcaaggtcgcggtatga

SEQ ID NO: 17763 - protein, 267 aa, Corynebacterium efficiens
MTAIPTPYEDLLRTIRDEGAHKDDRTGTGTTSLFGQQIRYNLQEGFPLLTTKKVHFHSVVGELLWFLRGDSNVRWLQDNNIRIWNEWADEDGELGPVYGVQWRSWPTPDGRHIDQISRALEMLKNNPDSRRNIVSAWNVSELENMALPPCHLLFQLYVADGKLSCQLYQRSADMFLGVPFNIASYALLTHMFAQQADLEVGEFIWTGGDCHIYDNHTEQVDEQLSRAARPYPTLELNKAASLFDYTFEDIAVSNYDPHPLIRGKVAV

SEQ ID NO: 17764 - DNA, 801 bp, Corynebacterium glutamicum
  CDS (1)..(801): transl_table=11
atgactgttccaacgccttatgaagaccttcttcggaagattgctgaagaagggtcccacaaggacgaccgcaccggcaccggcactacttctttattcggacaacaaatccgctttgatctcaatgaaggttttccccttctgaccaccaagaaggtccatttccactctgttgtgggtgagcttttgtggttccttcagggggattccaacgtcaaatggctgcaggataacaacatccgcatttggaatgaatgggcagatgaggacggcgagctgggccctgtttatggtgtccagtggcgttcttggccaacccctgatggtcgtcacattgaccagatctcaggtgctttagaaactctgcgaaacaaccctgattcacgtcgcaatattgtctcggcgtggaatgtttccgagcttgaaaacatggctcttcccccttgtcacttgcttttccagctctatgtcgccgatggcaaactgtcttgccagctctaccagcgttctgcggacatgttcctgggtgtgcctttcaacatcgcatcttatgcactgctcacccacatgtttgcccagcaggcaggcttggaagtcggcgagttcatttggactggcggcgactgccacatttatgacaaccacaaggaacaggtcgcggagcagctgagccgcgaagctcgcccctaccccaccttggagctcaacaaggcagcgtccatgtttgagtacagcttcgatgacatcaccgtgtccggctacgatccacacccattgatccgcggcaaggtcgccgtatga

SEQ ID NO: 17765 - protein, 266 aa, Corynebacterium glutamicum
MTVPTPYEDLLRKIAEEGSHKDDRTGTGTTSLFGQQIRFDLNEGFPLLTTKKVHFHSVVGELLWFLQGDSNVKWLQDNNIRIWNEWADEDGELGPVYGVQWRSWPTPDGRHIDQISGALETLRNNPDSRRNIVSAWNVSELENMALPPCHLLFQLYVADGKLSCQLYQRSADMFLGVPFNIASYALLTHMFAQQAGLEVGEFIWTGGDCHIYDNHKEQVAEQLSREARPYPTLELNKAASMFEYSFDDITVSGYDPHPLIRGKVAV

SEQ ID NO: 17766 - DNA, 795 bp, Coxiella burnetii
  CDS (1)..(795)
atgaaagaatatcttaattttttgcaatttatccttgatcacggagtcgctaaaacggaccggaccggaataggaacgaaaagtgtttttggctacgaaatgcgctttaatctgcgggaaggttttccgttagttaccactaagaaaatccatttgaaaagtgttatttatgaattgttatggtttttacggggtgacacgaatattcagtttttaaacgacaatggtgtaaccatttgggatgaatgggccgatgaaaacggcgatttaggtccgatttatggcaaacaatggcgtcgctggcactgcccggatggtcgcaccgtcgatcaaatgcaacgattaattcgcgaaataaaaactaaccccgattcacggcgtttaattgtcagcgcctggaatgtcggtgaacttgatcaaatggcattgccaccctgtcatttactttttcaattttatgtggcggatggttttctttcttgtaaattaacgcaacgttcagccgacgcttttttaggcgtgccgtttaatattgcttcttattcacttttaactcacctgatcgcgcgacaatgcaatttaaaagcgggtgaatttatttggtctggcggagattgtcatatttataatacccatcaagaccaagtaagcacccaattgtcgcgcgagccacgtgctttacctcaattaatcatcaaccgtgatccttcatccttatacgattataattttaacgatttttccatcgtgaattatcacccacatcccgctattaaagcaccggtcgcggtgtag

SEQ ID NO: 17767 - protein, 264 aa, Coxiella burnetii
MKEYLNFLQFILDHGVAKTDRTGIGTKSVFGYEMRFNLREGFPLVTTKKIHLKSVIYELLWFLRGDTNIQFLNDNGVTIWDEWADENGDLGPIYGKQWRRWHCPDGRTVDQMQRLIREIKTNPDSRRLIVSAWNVGELDQMALPPCHLLFQFYVADGFLSCKLTQRSADAFLGVPFNIASYSLLTHLIARQCNLKAGEFIWSGGDCHIYNTHQDQVSTQLSREPRALPQLIINRDPSSLYDYNFNDFSIVNYHPHPAIKAPVAV

SEQ ID NO: 17768 - DNA, 954 bp, Cryptococcus neoformans
  CDS (1)..(954)
atgacagcaacaatcgacgaccaggaaaagaaccaacgatctaacccggaccacgaggaatatcagtacctcgatctcattaggcgaatcattaacgtaggagaggttcggccagaccgtaccggtacaggaactgttgctctctttgctcctccttctttccgcttttccctcgccgacaacacccttcctcttctgacgacgaaacgcgtcttccttcgcggtgtcattgccgagcttttgtggttcgtttctggctgtaccgacgccaaaatgctctctagccagggtgtagggatctgggatggtaatggaagcaaagaattcctggagaaggtcggacttggccacagaagggaaggtgatctgggacctgtatacgggttccagtggagacattttggtgccgagtacactgatgccgacggagactacaagggcaaaggagtcgaccaattgcaaagggtaatcgacactatcaagaacaacccaactgacagacggattatcttatcggcttggaacccaaaggatcttcccctgatggctcttccgccctgccacatgttctgccaattcttcgtctcacttcctcctgctgattcaccgggttccaagccaaaactttcttgcttgatgtatcagaggtcttgtgacttaggccttggtgtcccattcaacattgcgtcttacgcactgctaacccatatgattgccctcattaccgacaccgaaccgcatgagtttattttacaaatgggagatgcgcatgtgtacagggatcatgttgagccattgaagacgcaactggaaagggagcctagagatttccccaagttaaaatgggctaggagcaaggaagaaattggagacatcgatggtttcaaggttgaggactttgtggttgagggatacaagccatgggggaaaatcgacatgaagatgtctgcttaa

SEQ ID NO: 17769 - protein, 317 aa, Cryptococcus neoformans
MTATIDDQEKNQRSNPDHEEYQYLDLIRRIINVGEVRPDRTGTGTVALFAPPSFRFSLADNTLPLLTTKRVFLRGVIAELLWFVSGCTDAKMLSSQGVGIWDGNGSKEFLEKVGLGHRREGDLGPVYGFQWRHFGAEYTDADGDYKGKGVDQLQRVIDTIKNNPTDRRIILSAWNPKDLPLMALPPCHMFCQFFVSLPPADSPGSKPKLSCLMYQRSCDLGLGVPFNIASYALLTHMIALITDTEPHEFILQMGDAHVYRDHVEPLKTQLEREPRDFPKLKWARSKEEIGDIDGFKVEDFVVEGYKPWGKIDMKMSA

SEQ ID NO: 17770 - DNA, 966 bp, Drosophila melanogaster
  CDS (1)..(966)
atggttttaacaccaacgaaagatgggcccgaccaggagagcatgccgttgccggccgacaatggggagtcaccaagtaaacagcaggcccctgtcaatcgggatgagatgcactacttggatcttctgaggcacatcatcgcaaatggagagcagcggatggaccgcacggaggtgggcactctgtccgtgttcggcagtcagatgcgcttcgacatgcggaactcctttcctttgctgaccacgaagcgcgtcttcttccgcgcggtggccgaggagctgctgtggttcgtggcgggcaagacggacgccaagctgctgcaggcgaagaatgtgcacatctgggatgggaacagctccagagaatttctggacaagatggggttcacggggcgagccgttggggatctggggccggtgtacggcttccaatggaggcatttcggggcgcagtacggcacctgcgacgacgactacagcggcaaggggatcgaccagctgcgccaggtgatcgacaccatcaggaataacccctcagaccgtcgcatcatcatgtcggcttggaatccactggacatcccaaagatggccctgccgccgtgccactgcttggcgcagttttacgtctccgagaagcgcggtgagctttcgtgccagctataccagagaagcgcagacatgggcctgggcgtacccttcaacatcgcctcctatgccctgctcacccacatgattgcccatgtgacgggtctgaagccgggcgactttgttcacaccatgggcgacacacacgtctacctgaaccacgtagagccgctgaaggagcaactggagcgcacaccgcgaccctttcccaagctgatcattaaacgtcaggtgcaggacatcgaggacttccgcttcgaggactttcagatagtcgactacaatccacatccaaaaatccaaatggacatggccgtgtag

SEQ ID NO: 17771 - protein, 321 aa, Drosophila melanogaster
MVLTPTKDGPDQESMPLPADNGESPSKQQAPVNRDEMHYLDLLRHIIANGEQRMDRTEVGTLSVFGSQMRFDMRNSFPLLTTKRVFFRAVAEELLWFVAGKTDAKLLQAKNVHIWDGNSSREFLDKMGFTGRAVGDLGPVYGFQWRHFGAQYGTCDDDYSGKGIDQLRQVIDTIRNNPSDRRIIMSAWNPLDIPKMALPPCHCLAQFYVSEKRGELSCQLYQRSADMGLGVPFNIASYALLTHMIAHVTGLKPGDFVHTMGDTHVYLNHVEPLKEQLERTPRPFPKLIIKRQVQDIEDFRFEDFQIVDYNPHPKIQMDMAV

SEQ ID NO: 17772 - DNA, 870 bp, Equine herpesvirus 2
  CDS (1)..(870)
atggtcacccactgcgagcaccagtacctcaacaccgtcagggagatcctggcgaacggggtgcgcaggggggacaggacgggcgtgggcaccctgtccgtcttcggggaccaggccaagtactccctgcggggccagttccccctgctgaccaccaagagggtcttctggaggggggtcctcgaagagctgctctggttcatcagggggtccacggactccaatgagctctccgcgaggggcgtcaagatctgggacgccaacgggtcccgggacttcctcgcccgggccgggctggggcacagggagcccggggacctggggcccgtctacgggttccagtggaggcacttcggggccgcgtacgtggactccaagacagattaccgggggcagggcgtggaccagctcagggacctgataggggagatcaagaggaaccccgagagcaggaggctcgtcctcaccgcctggaacccggcggacctgcccgccatggccctgccgccctgccacctcctgtgccagttctacgtggcgggcggggagctctcctgccagctgtaccagcgctcgggggacatggggctgggggtgcccttcaacatagccagctactccctgctgacctacatggtcgcccacctcacgggcctcgagcccggggacttcatccacgtcctgggggacgcgcacgtctacctcaaccacgtggagcccctgaagctccagctgaccaggagcccccggccctttcccaggctcaggatcctgaggcgggtggaggacatagatgacttcagggcggaggactttgcgctggagggctaccacccccacgcggccatccccatggagatggcggtctaa

SEQ ID NO: 17773 - protein, 289 aa, Equine herpesvirus 2
MVTHCEHQYLNTVREILANGVRRGDRTGVGTLSVFGDQAKYSLRGQFPLLTTKRVFWRGVLEELLWFIRGSTDSNELSARGVKIWDANGSRDFLARAGLGHREPGDLGPVYGFQWRHFGAAYVDSKTDYRGQGVDQLRDLIGEIKRNPESRRLVLTAWNPADLPAMALPPCHLLCQFYVAGGELSCQLYQRSGDMGLGVPFNIASYSLLTYMVAHLTGLEPGDFIHVLGDAHVYLNHVEPLKLQLTRSPRPFPRLRILRRVEDIDDFRAEDFALEGYHPHAAIPMEMAV

SEQ ID NO: 17774 - DNA, 948 bp, Enterococcus faecalis
  CDS (1)..(948): transl_table=11
atggaagaagcatacttagcgctaggaaaaaagattttagaagaaggtcattttaaagaagaccgtacaggaactgggacgtatagtttatttggctatcaaatgcgttttgatttggccaaaggatttcccttactaacaaccaaacgagtaccgtttggcttgattaaaagtgagttattgtggtttttaaaaggcgacacgaatattcgctatttgttagagcgaaataatcatatttgggatgaatgggcgttcgaacgttacgtaaaaagcgcagattatcaaggaccagacatgacggattttgggcatcgtgtcttacaagatccagcgtttgcagaacaatacaaagaagaacatcaaaaattctgtgatgccattttaaatgatgcagagtttgcagaaaaatatggtgaattagggaatatttatggtgcacaatggcgtcactgggaaaccaaagatggtagctttatcgatcaattagctaatgtgattgaaatgattaaaaccaatcctgattctcgccgtttaattgtttccgcttggaatccagaagatgtgccttcaatggcgttgccgccttgtcacactatgtttcaattttatgtaaatgaaggaaaattaagctgtcaactttatcagcgcagtgccgatgtttttttaggtgttccttttaacattgcaagctatgctttattgacacatctgattgcgcatgaaacaggtttagaagtgggggagtttgtacacacgctaggagatgcccacttatatcaaaatcatgtggaacaaatgcaagaacaattatcacgagaagttcgttctttcccaacgctcgttttgaatccagacaaggcttctgtttttgattttgatatggaagatattaaagtagaaggctatgacccacatccaacgattaaagcgccgattgccgtataa

SEQ ID NO: 17775 - protein, 315 aa, Enterococcus faecalis
MEEAYLALGKKILEEGHFKEDRTGTGTYSLFGYQMRFDLAKGFPLLTTKRVPFGLIKSELLWFLKGDTNIRYLLERNNHIWDEWAFERYVKSADYQGPDMTDFGHRVLQDPAFAEQYKEEHQKFCDAILNDAEFAEKYGELGNIYGAQWRHWETKDGSFIDQLANVIEMIKTNPDSRRLIVSAWNPEDVPSMALPPCHTMFQFYVNEGKLSCQLYQRSADVFLGVPFNIASYALLTHLIAHETGLEVGEFVHTLGDAHLYQNHVEQMQEQLSREVRSFPTLVLNPDKASVFDFDMEDIKVEGYDPHPTIKAPIAV

SEQ ID NO: 17776 - DNA, 795 bp, Erwinia carotovora
  CDS (1)..(795): transl_table=11
atgaaacagtatctggatctgatgaaaaaagtgcttgaagaaggcacgccgaaggccgaccgtaccggtacgggcacgcgttccattttcggccatcagatgcgtttcaacttgcaggacgggtttccgctggttaccaccaaaaaatgccacctgcgttcgattatccatgaactactttggtttctgaacggcgataccaatgttgcttatctgaatgaaaacaaagtcagtatttgggacgaatgggcagatgagaacggtgatttggggccagtttacggtaaacagtggcgttcgtggggagccgcagacggtcgtcagatcgaccagttgaagaatgtcctgacccagttgagacaggatccagattctcgccgtattatcgtgtctgcctggaacgtgggcgagttggacaaaatggcgctggcaccgtgccacgcgtttttccagttctacgtggcagatggcaaactctcttgccagctttatcagcgctcgtgcgatatcttcctcggcctgccgttcaacatcgccagctatgcgcttctggtgcatatggtggcgcagcagtgcgatctggacgtcggtgatttcgtctggacaggtggtgacacgcatctgtacaacaaccatatggaacagacgcacttacagttgagccgtgaaccgcgcgcattgcctaagctggtgattaaacgccgcccagatacgctgttcgactatcgtttcgaagattttgaaatcgagggatacgatccgcatcctgccatcaaagcaccggtggcaatctaa

SEQ ID NO: 17777 - protein, 264 aa, Erwinia carotovora
MKQYLDLMKKVLEEGTPKADRTGTGTRSIFGHQMRFNLQDGFPLVTTKKCHLRSIIHELLWFLNGDTNVAYLNENKVSIWDEWADENGDLGPVYGKQWRSWGAADGRQIDQLKNVLTQLRQDPDSRRIIVSAWNVGELDKMALAPCHAFFQFYVADGKLSCQLYQRSCDIFLGLPFNIASYALLVHMVAQQCDLDVGDFVWTGGDTHLYNNHMEQTHLQLSREPRALPKLVIKRRPDTLFDYRFEDFEIEGYDPHPAIKAPVAI

SEQ ID NO: 17778 - DNA, 825 bp, Francisella tularensis
  CDS (1)..(825): transl_table=11
atgcaagaatatctaaatttccttaagtatatcaaagaaaatggcgttttaaagggtgatagaaccggtactggaacaagaagtatctttggctatcaaatgcgttttgatcttcaaaaaggcttcccattagtaactacaaaaaaaattcatattcctagtgttgttcatgaattattatggtttttaagtggtagtacaaatatcaaatatcttaatgataacaatgttagaatttggaatgagtgggcaactgtagatggcgaacttggtcctatttatggcaagcagtggcgtgattttaatggtcaaggtatagatcaaattgccgatgtaattcagatgctaaaaacaaacccaaactcacgtaggattctagtttcagcgtggaatccatgtgttgttccatcagaaaaaatctctccacaagaaaatgttgtaaaaggtaattcagccctaccaccatgccatgcaatgtttcagttctatgtagcaaataataaactatcatgcatgcttacgcaaagaagtgctgatgcttttcttggagtgccatttaacattgcaagttattcactactgacaaatatggttgcacaacaatgtaatcttgatgttggtgagttcatctggtcaggtggtgattgtcatatttacaataatcatattgagcaagtcaatgaacagcttagtcgtgagcctttagctttaccaacactaaagattttaagaaaaccaaactccatctttgattataaatacgaagattttgaatttgagaactataaccatcaccctgccatcaaagcaaaaatatctgtataa

SEQ ID NO: 17779 - protein, 274 aa, Francisella tularensis
MQEYLNFLKYIKENGVLKGDRTGTGTRSIFGYQMRFDLQKGFPLVTTKKIHIPSVVHELLWFLSGSTNIKYLNDNNVRIWNEWATVDGELGPIYGKQWRDFNGQGIDQIADVIQMLKTNPNSRRILVSAWNPCVVPSEKISPQENVVKGNSALPPCHAMFQFYVANNKLSCMLTQRSADAFLGVPFNIASYSLLTNMVAQQCNLDVGEFIWSGGDCHIYNNHIEQVNEQLSREPLALPTLKILRKPNSIFDYKYEDFEFENYNHHPAIKAKISV

SEQ ID NO: 17780 - DNA, 828 bp, Fusobacterium nucleatum
  CDS (1)..(828): transl_table=11
atgaaagctagatttgataaaatatataaagatatagttgacacaatagcagaaaaaggaatttggagtgaggggaatgttagaacaaaatatgcagatggaacagctgcacattataaaagctatataggctaccaatttagacttgataactcagatgatgaagcacatttaataacttcaagatttgcaccaagtaaagcaccaataagagaactatattggatatggatattacaatcaaataatgttgatgttttaaatgagttaggttgtaagttttgggatgaatggaaaatgcaagatgggactattggaaaggcctatggttatcaaatagctcaagaaacttttgggcaaaaatctcaacttcattatgtaataaatgaattgaaaaaaaatcctaatagcagaagaattatgacagaaatttggatacctaatgaactttcagaaatggcattaacaccttgtgtacatttaactcaatggtcagtaattgggaataaattgtatttagaagttagacaaagaagttgtgatgtagcattgggcttagttgctaatgtatttcaatattcagttttacataaattagtagcacttgaatgtggacttgagccagcagaaataatttggaatatacataatatgcatatttatgatagacattatgataagttaatagaacaagttaatagagaaacatttgaacctgcaaaaataaaaataaataattttaaatcaatatttgattttaaacctgatgatatagaaataattgattataagtatggagaaaaagttagctatgaggtggctatttaa

SEQ ID NO: 17781 - protein, 275 aa, Fusobacterium nucleatum
MKARFDKIYKDIVDTIAEKGIWSEGNVRTKYADGTAAHYKSYIGYQFRLDNSDDEAHLITSRFAPSKAPIRELYWIWILQSNNVDVLNELGCKFWDEWKMQDGTIGKAYGYQIAQETFGQKSQLHYVINELKKNPNSRRIMTEIWIPNELSEMALTPCVHLTQWSVIGNKLYLEVRQRSCDVALGLVANVFQYSVLHKLVALECGLEPAEIIWNIHNMHIYDRHYDKLIEQVNRETFEPAKIKINNFKSIFDFKPDDIEIIDYKYGEKVSYEVAI

SEQ ID NO: 17782 - DNA, 795 bp, Geobacillus kaustophilus
  CDS (1)..(795): transl_table=11
ttgcggcaatatttgcagcttttggaggatattttggaaaacggcgtcgaaaaagaagaccgcacgggcgtcggcacgctgtcggtgttcggccgccagctccgcttcaacttgcaagatggatttccgctcgtgacaacgaaaaaattgcatatccgctccatcatttatgaactgctttggtttttaaaaggcgatacgaacgtccgctatttgcaggagaatggcgtgacgatttgggacgagtgggcggacgaaaacggcgatctcggcccgatttacggcgcgcaatggcgctcatggaaaggggcggacgggaaaacaatcgaccagatcgcgtgggtcgtcgaggagatcaaacgaaatccgaattcacgccggttgcttgtgagcgcttggaacgtagcggaattagacgagatgaagctgccgccgtgccattatgcctttcagttttatgtcgcgaacggtcggttgtcgtgcatgtggcagcagcgctccgttgatacgtttttagggctgccgtttaacattgccagctacgcgctgttgacgcatatgatcgcccagcaatgcgatctcgatgtcggcgaactcattttcaccggcggtgatgtccatttgtacaaaaaccatctcgaacaggcgaaactgcagctgacgcgcgagccgcgcccgctgccgaagctcgtgatcaaacggaagccgccgtccattttcgattacgaatacgacgattttgaaattgtcggctacaacccgcatccgacgattaaagcaccggtggctgtgtaa

SEQ ID NO: 17783 - protein, 264 aa, Geobacillus kaustophilus
MRQYLQLLEDILENGVEKEDRTGVGTLSVFGRQLRFNLQDGFPLVTTKKLHIRSIIYELLWFLKGDTNVRYLQENGVTIWDEWADENGDLGPIYGAQWRSWKGADGKTIDQIAWVVEEIKRNPNSRRLLVSAWNVAELDEMKLPPCHYAFQFYVANGRLSCMWQQRSVDTFLGLPFNIASYALLTHMIAQQCDLDVGELIFTGGDVHLYKNHLEQAKLQLTREPRPLPKLVIKRKPPSIFDYEYDDFEIVGYNPHPTIKAPVAV

SEQ ID NO: 17784 - DNA, 852 bp, Haemophilus ducreyi
  CDS (1)..(852): transl_table=11
atgaaacaatatttagatctatgccatcgtatcctaaatgaagggaaatgggtaaaaaacaagcgaactgataaactatgcttaaccgttattaatgccgacctaacttatgatgtcgcaaaaggtgaattcccgcttattactactcgtaaaagtttttggaaagccgccattgctgagctactaggctatatacgtggctatgacaacgcggcagattttcgccaattaggaacaaaatcttgggatgcaaatgccaatcaaaacgctgattggttagccaatccatatcgcaaaggagtcgatgatatgggattagtgtatggcgcaatcggtagaaaatttcctaaagcagatcatggttcgcttgatttacttaaacaaattgttgatgatttaagcaatggcattgataatcgtggcgaaatttatactttctatcatccgggtgcttttcatatggggtgcttacgcccttgtttatatagccaccatttttcattattagacggtacattatatctaaatagcacgcaacgttctgcagatgtgccattaggtttaaattggaatatggttcaatgctatacatttttagcattaatggcacaaattactaatcataaagcaggacaagtttttcataaaatcgttaatgcacatatttatgaagatcaactcgctttaatgcgtgatgtacagctaaaacgtgaaccatttgcgactcccacgcttaccatcaatccagcgattaagtcattagaagatttagaaatttgggttacgctcgatgactttaaagtggaaaactacttttaccatccaagtattcaataccccttttctatttaa

SEQ ID NO: 17785 - protein, 283 aa, Haemophilus ducreyi
MKQYLDLCHRILNEGKWVKNKRTDKLCLTVINADLTYDVAKGEFPLITTRKSFWKAAIAELLGYIRGYDNAADFRQLGTKSWDANANQNADWLANPYRKGVDDMGLVYGAIGRKFPKADHGSLDLLKQIVDDLSNGIDNRGEIYTFYHPGAFHMGCLRPCLYSHHFSLLDGTLYLNSTQRSADVPLGLNWNMVQCYTFLALMAQITNHKAGQVFHKIVNAHIYEDQLALMRDVQLKREPFATPTLTINPAIKSLEDLEIWVTLDDFKVENYFYHPSIQYPFSI

SEQ ID NO: 17786 - DNA, 852 bp, Haemophilus influenzae
  CDS (1)..(852): transl_table=11
atgaagcaatatcttgagctttgtcgccgcattgttagtgaaggggaatgggttgctaatgaacgtacaggtaagcattgcctcacggtcattaatgcagatttagaatatgatgtggcgaataatcaatttccgctgattactacccgtaaaagttattggaaagcggcgattgctgaatttttaggttatattcgtggatatgacaatgccgctgatttccgcgcacttggcacgaaaacttgggatgctaatgcgaatgaaaatgcagcttggcttgcaaatccgcatcgtagaggcgttgatgatatggggcgcgtatatggtgtgcaaggcagagcatggcgtaagcctaatggagaaactatcgatcagctacgtaaaattgttaataacttaacgaaaggtattgatgatagaggagagattttaactttttttaaccctggggaatttgatcttggttgtcttcgtccttgtatgcatacgcatactttttctcttgtgggcgatactttacatcttactagctatcagcgttcctgtgatgttccgcttggattgaatttcaatcaaattcaggtgtttaccttcttagcacttatggctcagatcacgggcaaaaaagccggcaaggcatatcataaaattgtgaatgcgcatatttatgaagatcagcttgagttaatgcgtgacgtacaacttaaacgcgagcctttcccattaccaaaattagaaattaatccagatataaaaacgcttgaagatttggaaacttgggtcacgatggatgattttaaagtcgttggctatcaatcccacgaaccaattaaatatcctttttccgtctaa

SEQ ID NO: 17787 - protein, 283 aa, Haemophilus influenzae
MKQYLELCRRIVSEGEWVANERTGKHCLTVINADLEYDVANNQFPLITTRKSYWKAAIAEFLGYIRGYDNAADFRALGTKTWDANANENAAWLANPHRRGVDDMGRVYGVQGRAWRKPNGETIDQLRKIVNNLTKGIDDRGEILTFFNPGEFDLGCLRPCMHTHTFSLVGDTLHLTSYQRSCDVPLGLNFNQIQVFTFLALMAQITGKKAGKAYHKIVNAHIYEDQLELMRDVQLKREPFPLPKLEINPDIKTLEDLETWVTMDDFKVVGYQSHEPIKYPFSV

SEQ ID NO: 17788 - DNA, 1014 bp, Human herpesvirus 8
  CDS (1)..(1014)
atgtttccgtttgtacctttaagcttgtatgtcgccaaaaagttattccgtgccagggggtttcgcttctgtcaaaagcctggcgtcttggctttggcccccgaggttgacccttgttcgattcagcatgaggtaactggggctgagacgccccacgaggaacttcagtatctcaggcagttgagggaaattttgtgccgtggcagcgatcgactcgaccgcaccggcataggcaccctctctctatttggcatgcaggccaggtatagtctgcgggaccactttcccttactaaccacaaagcgggtgttttggcgaggcgtagtgcaagagctgctttggtttctgaaggggagtactgactccagggagctttcaagaacaggagtcaagatatgggacaaaaatggctccagggagttcctggccgggcgcggcctggcgcacagaagggagggggatttgggacctgtttacggtttccagtggaggcactttggggcggcgtacgtggacgcggatgctgactatacaggccaggggtttgaccaattgtcgtacattgtggatttaataaaaaataatccgcacgatagaagaatcattatgtgtgcgtggaacccggcggacttgtcgttgatggcgcttccgccctgtcacttgttatgtcaattttatgtagctgacggtgagctttcctgtcagctgtatcagaggtcgggagacatgggtttgggagttccttttaacattgccagctattccctcttaacttatatgcttgctcatgttactggtcttagacccggggagtttattcacacgttgggagatgcccacatctacaaaacgcatatagagccactacggctgcagctgacgcgcactccacgtccctttccgcgcctggagatactccggtctgtttcttccatggaagagtttacacctgatgattttagactggtggactactgcccgcatcctaccattcgtatggaaatggcagtatag

SEQ ID NO: 17789 - protein, 337 aa, Human herpesvirus 8
MFPFVPLSLYVAKKLFRARGFRFCQKPGVLALAPEVDPCSIQHEVTGAETPHEELQYLRQLREILCRGSDRLDRTGIGTLSLFGMQARYSLRDHFPLLTTKRVFWRGVVQELLWFLKGSTDSRELSRTGVKIWDKNGSREFLAGRGLAHRREGDLGPVYGFQWRHFGAAYVDADADYTGQGFDQLSYIVDLIKNNPHDRRIIMCAWNPADLSLMALPPCHLLCQFYVADGELSCQLYQRSGDMGLGVPFNIASYSLLTYMLAHVTGLRPGEFIHTLGDAHIYKTHIEPLRLQLTRTPRPFPRLEILRSVSSMEEFTPDDFRLVDYCPHPTIRMEMAV

SEQ ID NO: 17790 - DNA, 852 bp, Idiomarina loihiensis
  CDS (1)..(852): transl_table=11
atgaaacaatatttacaactgtgccaacgcattgtcgacgaaggggtctgggttaaaaatgaacgtacaggcattaactgcctgacggttataaacgccgacttagagtatgatgttgcgaacaatcaatttcctttaattactactcggaaaagctattacaagtcggctattgctgagcttctaggatacttgcgaggctacaatagtgccgctcaattccgcgatattggctgcaaaacctgggacgccaatgccaacgaaaaccaggcctggctgaataatccgaatcgcaaaggcgaagacgacatgggccgtgtatacggtgtgcaggggcgctcatggcaaaagccggatggcagccacttagaccagctgaaaaaggtcattaataacctgtcgaaaggcattgatgaccgtggggaaattgttactttctataaccctggcgaatttgaactgggttgtttgcgtccgtgcatgcatacccacaacttttcgctgttaggcgacacgctttacctaacctcttaccaacgcagctgtgacgtgcccctgggactcaactttaaccaaattcagtgctttgctcttttagctttggtggcacaaattactggtcacaagccgggcaaggcctaccacaagatagtgaacgctcacatttatgagaaccagttggaactcatgcgtgatgtacagctgaagcgagagccttttccatcgccacagctgcatattaacccagagataaagtctttagaagacattgaaacctgggtcagcaaagacgatttcatcgtcagcggctaccagtgtcacgaccccattaaatacccattcgcagtgtag

SEQ ID NO: 17791 - protein, 283 aa, Idiomarina loihiensis
MKQYLQLCQRIVDEGVWVKNERTGINCLTVINADLEYDVANNQFPLITTRKSYYKSAIAELLGYLRGYNSAAQFRDIGCKTWDANANENQAWLNNPNRKGEDDMGRVYGVQGRSWQKPDGSHLDQLKKVINNLSKGIDDRGEIVTFYNPGEFELGCLRPCMHTHNFSLLGDTLYLTSYQRSCDVPLGLNFNQIQCFALLALVAQITGHKPGKAYHKIVNAHIYENQLELMRDVQLKREPFPSPQLHINPEIKSLEDIETWVSKDDFIVSGYQCHDPIKYPFAV

SEQ ID NO: 17792 - DNA, 957 bp, Lactobacillus acidophilus
  CDS (1)..(957): transl_table=11
atggcaattcttgaacaaccatatttagatttgattaataaaattatgattgaaggtcatgataaaaatgatcgtacaggaactggaactaggagttattttggtgctcaaatgcgctttgacttatcaaaagggtttccaattttaaccactaaaaaggttccattcggtttaattaaaagtgaactcctatggttcttacgaggggacactaatattcgttttttattagaacataaaaatcatatttgggatgagtgggcatttaaaaattgggttaacagtgatgaatatactggtcctgatatgactgattttggtttacgaagtcaaagtgatccggaatttaataaaatttatcaagctgaattaaaaaaatttgatcgacgtatccttgatgatgagaacttcgccaaaaaatatggtaatttaggcgacgtttatggtgcacaatggcgccattggcaaaagcgagatggtagctttattgatcaaattgaaaatgtaattgaacaaattaaaaataatccagattcacgcaggatgattgtaacagcctggaatccagaagatgtaccaactagtgctcttcctccgtgtcatgttatgttccaattttatgtggtagatggaaaaattagcgttcagctttatcagcgtagtggagatatgtttttaggcgtgccatttaatattgcatcatatgcacttttattaaatatgattgccagagaaactggtctgcaagtgggtgaatttattcatacattgggggatgctcatatttatagtaaccactttagtcaagtgaaggaaatgcttagtcgcaagccatatgaatctccacagttatggcttaatcctgaaaaaaaacatattgaagattttgatatgcaagatattaagttagtggattataagcatcatggcacaattaaggcgccagttgctgtttaa

SEQ ID NO: 17793 - protein, 318 aa, Lactobacillus acidophilus
MAILEQPYLDLINKIMIEGHDKNDRTGTGTRSYFGAQMRFDLSKGFPILTTKKVPFGLIKSELLWFLRGDTNIRFLLEHKNHIWDEWAFKNWVNSDEYTGPDMTDFGLRSQSDPEFNKIYQAELKKFDRRILDDENFAKKYGNLGDVYGAQWRHWQKRDGSFIDQIENVIEQIKNNPDSRRMIVTAWNPEDVPTSALPPCHVMFQFYVVDGKISVQLYQRSGDMFLGVPFNIASYALLLNMIARETGLQVGEFIHTLGDAHIYSNHFSQVKEMLSRKPYESPQLWLNPEKKHIEDFDMQDIKLVDYKHHGTIKAPVAV

SEQ ID NO: 17794 - DNA, 971 bp, Lactobacillus casei
  CDS (20)..(970)
aattcaggaggtaataattatgctggaacagccgtacctggatctcgcgaaaaaagttctagatgaaggccacttcaaaccggatcgtacgcacactggtacttacagcatcttcggccaccagatgcgcttcgacttaagcaaaggcttcccgctgctgaccaccaaaaaggtaccattcggcctgatcaaaagcgagctgctgtggttcctgcacggtgataccaatattcgcttcctgctgcagcaccgcaaccacatctgggatgagtgggctttcgaaaaatgggttaaaagcgatgaataccacgggcccgacatgactgacttcggtcaccgcagccagaaggatccagagttcgcggccgtttaccacgaagaaatggccaaattcgacgaccgtgttctgcacgacgacgcgttcgctgctaaatacggtgacctgggactagtttacggttcccagtggcgcgcttggcacactagcaaaggtgacactatcgatcagctgggtgacgttatcgaacagatcaaaactcacccgtactcccgtcgactgatcgtttccgcttggaaccctgaggatgttccgaccatggctctgccgccgtgtcacactctgtaccagttttacgtaaacgatggcaagctgagcttgcagctgtaccagagatctgctgacatcttcctaggcgttccgtttaacatcgctagctatgcattgctgacccacctggttgctcacgaatgtggcctcgaggttggcgagttcatccacacctttggcgatgcgcacctttacgttaaccacctggaccagatcaaagaacagctgtcccgcaccccgcggcctgcaccgactttgcagctgaatccggataaacacgatattttcgacttcgacatgaaagatatcaaactgctgaactacgatccttacccggccatcaaggccccggttgctgtttaaa

SEQ ID NO: 17795 - protein, 316 aa, Lactobacillus casei
MLEQPYLDLAKKVLDEGHFKPDRTHTGTYSIFGHQMRFDLSKGFPLLTTKKVPFGLIKSELLWFLHGDTNIRFLLQHRNHIWDEWAFEKWVKSDEYHGPDMTDFGHRSQKDPEFAAVYHEEMAKFDDRVLHDDAFAAKYGDLGLVYGSQWRAWHTSKGDTIDQLGDVIEQIKTHPYSRRLIVSAWNPEDVPTMALPPCHTLYQFYVNDGKLSLQLYQRSADIFLGVPFNIASYALLTHLVAHECGLEVGEFIHTFGDAHLYVNHLDQIKEQLSRTPRPAPTLQLNPDKHDIFDFDMKDIKLLNYDPYPAIKAPVAV

SEQ ID NO: 17796 - DNA, 957 bp, Lactobacillus johnsonii
  CDS (1)..(957): transl_table=11
atggcaactttagagcaaccatatttagatttactaagtaaaataatgagtgaagggcatgacaaggaagataggactggtacaggtactagaagcttgtttggagcccaaatgagatttgatttaaatgatggctttcctattttaactactaaaaaaataccttttggacttattaagagcgaattgttatggtttttacgaggagacactaatatccgttttttgctagaacataataatcatatttgggatgaatgggcctttaaaaattgggtagagagcaatgaatatcaggggccagatatgactaattttggtctaagaagtcaacaagacccagaatttaaaagaatatatcaagaagaaatgaaaaaatttgatcaaaaagtcttggaagatcaaactttcgcagaaaaatatggaaatttaggagacgtttatggtgctcaatggagacattggcagaagcgtgaaggtggctttattgatcaaattcaaaatgtaattgatcaaattaagaaaacaccttattctcgtcgcttaattgttagcgcatggaatcccgaagatgtaccaacgtctgctttaccgccatgtcatgtcttgtttcagttttatgttaatgacgggtgtttaagtttacaactgtatcaaagatcaggcgacatgtttttaggtgtaccgtttaatattgcgagttatgctttactagtaaatttagtcgcgcgtgaaacgggactaaagccgggtgaatttattcataccttaggggatgctcatatttataaaaatcactttaaccaagttaaagaattattgaatcgatctgcatatgacgctcctatgctttggctaaatccggataaaaaattagtacaggattttgaaatgaaagatatcaagttaattaattaccggcatcatggcactattaaggcgccggtagccgtttaa

SEQ ID NO: 17797 - protein, 318 aa, Lactobacillus johnsonii
MATLEQPYLDLLSKIMSEGHDKEDRTGTGTRSLFGAQMRFDLNDGFPILTTKKIPFGLIKSELLWFLRGDTNIRFLLEHNNHIWDEWAFKNWVESNEYQGPDMTNFGLRSQQDPEFKRIYQEEMKKFDQKVLEDQTFAEKYGNLGDVYGAQWRHWQKREGGFIDQIQNVIDQIKKTPYSRRLIVSAWNPEDVPTSALPPCHVLFQFYVNDGCLSLQLYQRSGDMFLGVPFNIASYALLVNLVARETGLKPGEFIHTLGDAHIYKNHFNQVKELLNRSAYDAPMLWLNPDKKLVQDFEMKDIKLINYRHHGTIKAPVAV

SEQ ID NO: 17798 - DNA, 840 bp, Lactococcus lactis
  CDS (1)..(840): transl_table=11
atgacttacgcagacaagatttttaaacaaaatatccaaaatatccttgataacggtgttttttcagaaaatgcacgtcccaagtataaggatggtcaaaccgcaaatagtaagtatgtaacaggctctttcgttacttatgatttgcaaaaaggtgagtttccaattaccactttgcgtccaattccaattaaatcggcaattaaagaattgatgtggatttatcaagatcaaacaagtgaacttgctattcttgaagaaaaatatggagtcaaatactggggcgaatggggaattggcgacggtacgattggacaacgctatggggcaacagtcaaaaaatataatattattggaaaattattggatggtttagcaaaaaatccttggaatcgccgtaatatcattaatctttggcaatatgaagattttgaggaaactgaaggacttttgccttgtgctttccaaacaatgtttgatgttcgccgtgaacaagatggtcagatttacttggatgcgactcttattcaacgttcaaatgatatgcttgttgcgcatcatatcaatgccatgcaatatgttgctttacaaatgatgattgcaaaacatttttcttggaaagttggaaaatttttctatttcgtaaataatttgcatatttatgataatcagtttgaacaggcaaatgagttagttaagcgaacagcttctgacaaggagccccgtttggtgcttaatgttcctgacggaacaaactttttcgatattaaaccagaagattttgagcttgtggactatgaaccggtaaaacctcaattaaaatttgatttggcaatttag

SEQ ID NO: 17799 - protein, 279 aa, Lactococcus lactis
MTYADKIFKQNIQNILDNGVFSENARPKYKDGQTANSKYVTGSFVTYDLQKGEFPITTLRPIPIKSAIKELMWIYQDQTSELAILEEKYGVKYWGEWGIGDGTIGQRYGATVKKYNIIGKLLDGLAKNPWNRRNIINLWQYEDFEETEGLLPCAFQTMFDVRREQDGQIYLDATLIQRSNDMLVAHHINAMQYVALQMMIAKHFSWKVGKFFYFVNNLHIYDNQFEQANELVKRTASDKEPRLVLNVPDGTNFFDIKPEDFELVDYEPVKPQLKFDLAI

SEQ ID NO: 17800 - DNA, 951 bp, Lactobacillus plantarum
  CDS (1)..(951): transl_table=11
atgttagaagatagttatttacaactcgcgcgcaccattttagaacacggcacgtataaggatgaccgtaccggcacgggaacatacagtgtgtttggttaccagatgcgctttgacctgagtcaaggcttcccgttattgacgaccaaaaaagttccctttggactgatcaagagcgaattactatggtttttgcatggtgatacgaatattcagtatttattgcaacaccacaaccatatctgggacgaatgggcgttcaaaaattgggttacgagtgccgattatgacggccctgatatgacgaattttgaacaccgccggctagatgatcctgactttgcgccgatttatcaagctcagatgcagacctttgatgaccagatcttgacagacgacgcgtttgcggccaagtatggtaatttgggtgacgtttacggtgcgcaatggcgtcactggcaaacgcgtcagggaaagacgatcgatcaaattgccaatgtgattgaaatgatcaagacgcatccggattcgcggcggttaatcgtttccgcttggaatccagaagatgtgccgaacatggcgttaccaccgtgtcatactctgtttcaattctatgtcgcggatggtaagctctcttgccaactctaccaacgttcaggcgatgtcttcctaggtgtgccattcaatattgcgagttatgcgttactaacacatctgattgctaaggagacgggcctagcagtgggcgagttcgtgcatacgttgggtgacgcgcacatttatactaaccatgtggaacaagttaaaacgcagttgacccggcaacctcggccggcaccccagctgactttaagtggggctcatgacagtatttttgattaccaaatgagtgacattaagctcagtggctatgatcccgcaccggcaatcaaagcgccggtcgcgatttag

SEQ ID NO: 17801 - protein, 316 aa, Lactobacillus plantarum
MLEDSYLQLARTILEHGTYKDDRTGTGTYSVFGYQMRFDLSQGFPLLTTKKVPFGLIKSELLWFLHGDTNIQYLLQHHNHIWDEWAFKNWVTSADYDGPDMTNFEHRRLDDPDFAPIYQAQMQTFDDQILTDDAFAAKYGNLGDVYGAQWRHWQTRQGKTIDQIANVIEMIKTHPDSRRLIVSAWNPEDVPNMALPPCHTLFQFYVADGKLSCQLYQRSGDVFLGVPFNIASYALLTHLIAKETGLAVGEFVHTLGDAHIYTNHVEQVKTQLTRQPRPAPQLTLSGAHDSIFDYQMSDIKLSGYDPAPAIKAPVAI

SEQ ID NO: 17802 - DNA, 795 bp, Legionella pneumophila
  CDS (1)..(795): transl_table=11
atgaaaacatatttgcaattgttggagcatattttacaacaaggagtagaaaaatcggatagaacgggcactggaacattatctgtatttgggtatcaaatgcgttttgatttgaccaagggattcccgcttgtcactactaaaaaactacacacgagaagtattgttcatgaattactatggtttttgcgtggtgataccaatatttcttatcttaaggaaaacggggtaactatttgggatgaatgggcagataataatggtgatttggggcctgtctatggaaagcaatggagaagttggccaactgctgatggacacactattgatcaattaagtgatgtagtgcaacaaataaagagtaaccctgactctcgtcgcttgattgtaagcgcctggaatgtgggtgaattggataaaatggctttaatgccttgtcatgccttgtttcagttttatgttgcaaacaacaagttatcctgtcaattgtatcaacgctcagccgatgtatttttaggagttcctttcaatatcgcttcttattcgttgcttactcatatggtcgcccaacaatgtaatttggatgtggctgagttcatatggaccgggggagattgtcatttgtatcttaatcatttggagcaagcgcaaatccaattaacaagagaacctttgccattgccctccttaactattaagagaaaaccagcttctttatttgactatgcttatgaggattttgaatttttgaattatcaatcacatcccgcaattaaagcacctattgccgtttaa

SEQ ID NO: 17803 - protein, 264 aa, Legionella pneumophila
MKTYLQLLEHILQQGVEKSDRTGTGTLSVFGYQMRFDLTKGFPLVTTKKLHTRSIVHELLWFLRGDTNISYLKENGVTIWDEWADNNGDLGPVYGKQWRSWPTADGHTIDQLSDVVQQIKSNPDSRRLIVSAWNVGELDKMALMPCHALFQFYVANNKLSCQLYQRSADVFLGVPFNIASYSLLTHMVAQQCNLDVAEFIWTGGDCHLYLNHLEQAQIQLTREPLPLPSLTIKRKPASLFDYAYEDFEFLNYQSHPAIKAPIAV

SEQ ID NO: 17804 - DNA, 795 bp, Legionella pneumophila subsp
  CDS (1)..(795): transl_table=11
atgaaaacatatttgcaattgttggagcatattttacaacatggggtagaaaaatccgatagaacgggcactggaacattatctgtatttgggtatcaaatgcgttttgatttggcccagggattcccgcttgttaccactaaaaaactgcatacgagaagtattgttcatgaattactgtggttcttgcgtggtgataccaatatttcttatcttaaggaaaacggggtaactatttgggatgaatgggcagataataatggtgatttagggcctgtctatgggaagcaatggagaagttggccaactgctgatggacgcaccattgatcaattaagtgaagtagtgcaacaaataaagagcaaccctgactctcgtcgcttgattgtaagcgcctggaatgtgggtgaattggataaaatggctttaatgccttgtcatgccttgtttcagttttatgttgcaaacaacaagctatcctgtcaattatatcaacgctcagccgatgtatttttaggagttcctttcaatatcgcttcttattcgttgcttactcatatggttgctcagcaatgtaatttggatgtggctgaatttatatggaccgggggagattgtcatttgtatcttaatcatttggagcaagcgcaaatccaattaacaagagaacctttgccattgccctccttagctattaagagaaaaccggcttctttatttgactatgcttatgaggattttgaatttttgaattatcaatcacatcccgcaattaaagcgcctatcgccgtttaa

SEQ ID NO: 17805 - protein, 264 aa, Legionella pneumophila subsp
MKTYLQLLEHILQHGVEKSDRTGTGTLSVFGYQMRFDLAQGFPLVTTKKLHTRSIVHELLWFLRGDTNISYLKENGVTIWDEWADNNGDLGPVYGKQWRSWPTADGRTIDQLSEVVQQIKSNPDSRRLIVSAWNVGELDKMALMPCHALFQFYVANNKLSCQLYQRSADVFLGVPFNIASYSLLTHMVAQQCNLDVAEFIWTGGDCHLYLNHLEQAQIQLTREPLPLPSLAIKRKPASLFDYAYEDFEFLNYQSHPAIKAPIAV

SEQ ID NO: 17806 - DNA, 810 bp, Leifsonia xyli
  CDS (1)..(810): transl_table=11
atgaccacgccgatcccgaccccgtacgaagacctgctgcgcgacgtcctcgcgaacggcagccacaaatccgaccgcaccgggacgggcacgcgcagcgtcttcggacgccagctccggttcgacctcgcggacggcttcccgctgatcacgaccaagcgggtccacttcaagtcgatcgcgtacgaactgctctggttcctccgcggcgacagcaatgtcggctggctgcgcgagaatggcgtgagcatctgggacgagtgggccgacgagcggggcgaactcggccctgtctacggggttcagtggcgctcctggccgtccccggacggcacgcacatcgaccaaatccagcaggtcgtcgacacgctccgccgcgacccggactcgcgccgcatcatcgtctccgcctggaacgtcgcggacatcccggatatggcgctcgcgccctgccacgccttcttccagttctatgtcgccgacggcaagctctcctgccagctgtaccagcgcagcgccgacatgttcctcggcgttccgttcaacattgcgagctacgcgctcctcacgctcatggtcgcccagcaggtgggactcgaaccgggcgagttcgtctggacgggcggggacgtccacatctacgacaaccacatcgagcaggtgaacgagcagctgagccgtaacccgttcccagctcctgcgcttcgcttcgcgcgcagaccggaaagcgtcttcgactaccgctacgaggacttcgtgctcgagggctaccggcaccacccggccatccgcgccgccgtcgcggtatga

SEQ ID NO: 17807 - protein, 269 aa, Leifsonia xyli
MTTPIPTPYEDLLRDVLANGSHKSDRTGTGTRSVFGRQLRFDLADGFPLITTKRVHFKSIAYELLWFLRGDSNVGWLRENGVSIWDEWADERGELGPVYGVQWRSWPSPDGTHIDQIQQVVDTLRRDPDSRRIIVSAWNVADIPDMALAPCHAFFQFYVADGKLSCQLYQRSADMFLGVPFNIASYALLTLMVAQQVGLEPGEFVWTGGDVHIYDNHIEQVNEQLSRNPFPAPALRFARRPESVFDYRYEDFVLEGYRHHPAIRAAVAV

SEQ ID NO: 17808 - DNA, 945 bp, Listeria monocytogenes
  CDS (1)..(945): transl_table=11
atgaaacaatatttggatttagaaaagtacgttttagagaatggaacacaaaaaggagatcgcactggaactggaacaatcagcacatttggttatcaaatgcgttttgatttacaagagggctttccgattatgacaacaaaacgggtaccatttaaacttgtagtaagtgaactgctatggtttttacatggagatacgaatattcgctaccttttacagcataataataatatttggaatgaatgggcttttgagcgttttgtgaaaagcgatgattataaaggcgaagatatgactgactttggactgcgtgctgagcgtgattcagctttcaaagaagtgtatcaagcggagatggagaagtttaaagctcggattttagaagacgaagcgttcgcgaataaatacggtgagctaggtaatatttacggtaaacaatggcgcgaatggaagacttcacaaggagaaacaattgatcagttagcggatttgattgaaatgattaaaacgaatccgaactcgcgtcgtttgattgtgtctgcttggaaccctgaagatattccgaatatggctttaccgccatgtcattcgctattccaattttatgtagcggacggaaaattatcatgtcagctgtatcaacgtagtgccgatattttccttggtgtaccgtttaatattgcaagctatgcacttctaacacacctgattgcacgtgaagtagggctggaagttggcgagtttatccatactatgggtgatgcgcatctttataacaatcatattgagcaagtgaaagaacagctgtctagaacaccgcacaaacttccaaaattagtgctttcagataaaccagcaacgatttttgattttgatgtagcggatatttcactggatggttataatccagatccagcaattaaagcaccaatttcagtataa

SEQ ID NO: 17809 - protein, 314 aa, Listeria monocytogenes
MKQYLDLEKYVLENGTQKGDRTGTGTISTFGYQMRFDLQEGFPIMTTKRVPFKLVVSELLWFLHGDTNIRYLLQHNNNIWNEWAFERFVKSDDYKGEDMTDFGLRAERDSAFKEVYQAEMEKFKARILEDEAFANKYGELGNIYGKQWREWKTSQGETIDQLADLIEMIKTNPNSRRLIVSAWNPEDIPNMALPPCHSLFQFYVADGKLSCQLYQRSADIFLGVPFNIASYALLTHLIAREVGLEVGEFIHTMGDAHLYNNHIEQVKEQLSRTPHKLPKLVLSDKPATIFDFDVADISLDGYNPDPAIKAPISV

SEQ ID NO: 17810 - DNA, 852 bp, Mannheimia succiniciproducens
  CDS (1)..(852): transl_table=11
atgcgtcaatatttagatttatgccaacgtatcgtaaatgaaggctgctggattgaaaacaagcgtaccggaaaacgctgcttaaccgttatcaatgcggatttgacttatgatgtggcaaacaaccgatttccgattattactacacgtaaaagttattggaaagcggcgattgcggagtttctgggttatatccgcggctacgataatgcggcggatttccgtaaattaggagcaaaaacctgggatgccaacgctaatgaaaatcaggtatggctgaacaaccctcatcgcaaaggcaccgacgatatggggcgcgtttacggcgtacaaggcagagcctggcgtaagcctaacggcgaaaccgttgatcaattacgcaaaatagtcaacaatttaagtcgcggcattgatgatcgcggcgaaattctgacctttttaaacccgggtgaattcgatctcggttgtctgcgcccttgtatgtacaatcacacgttttctttgctgggcgatacgctttatttaaccagttatcaacgctcctgtgacgtacctttaggcttgaatttcaatcaaattcaagtatttacgttcttagctttaatggcgcagattaccggtaaaaaagccggtcaggcataccacaaaatcgtcaatgcgcatatttacgaagaccagctggaactaatgcgcgacgtgcagttaaaacgcgaaccgttcccgtcgccaaaactggaaattaatccggacattaaaacccttgaagatttagaaacctgggtaaccatggatgatttcaacgtcgttggttaccaatgccacgaaccgataaaatatccgttctcggtataa

SEQ ID NO: 17811 - protein, 283 aa, Mannheimia succiniciproducens
MRQYLDLCQRIVNEGCWIENKRTGKRCLTVINADLTYDVANNRFPIITTRKSYWKAAIAEFLGYIRGYDNAADFRKLGAKTWDANANENQVWLNNPHRKGTDDMGRVYGVQGRAWRKPNGETVDQLRKIVNNLSRGIDDRGEILTFLNPGEFDLGCLRPCMYNHTFSLLGDTLYLTSYQRSCDVPLGLNFNQIQVFTFLALMAQITGKKAGQAYHKIVNAHIYEDQLELMRDVQLKREPFPSPKLEINPDIKTLEDLETWVTMDDFNVVGYQCHEPIKYPFSV

SEQ ID NO: 17812 - DNA, 867 bp, Mesoplasma florum
  CDS (1)..(867): transl_table=4
atgaaacaatatttagaattagttaatgaaattttaaaagatggagaaaaaagagaagatcgtacaaacacaggaacaatatctaagtttggtgtacaaaaaagatatgatttacgtgaaggttttccattactaacaactaaaaaagttttttataaagcaatctttcatgagatgttatggtttataaaaggtgataccaatattaaatacttggttgagaataatgtaaaaatttgaaatgaatgaccatatgaaaattttaaaaaatcatctgagttcaataatgagactttacaagagtttgttgaaagattaaagaatgataatgagttctgtaataaatgaggagatttaggacctgtttatggaaaacaatgaagagactttggtggaattgatcaatttgcaaaactaattaatgatattaagaaaaatccattttcaagaagacatattgtttcagcatgaaatccagctgaagttgataacatgttgttaccaccatgtcattctttttgacaagtttatgtttcaaaagacggttgattagatttacaactataccaaagaagtggtgatgtgtttttaggagtgccatttaatatagcatcgtatgcgttactaatggaattaatcgcaaaagaatgtaacttaaaagcaagatactttgttcatacaattggggatgctcatatttatttaaaccatctagaacaaattaatgagcaattaaaaagaaaaccattgccactatgcaaaattaagattaattctgaaaaatcaatttttgatattgcatttgaggacattgaaattgaaggttatgaaagtcatgctaaaataacaggagaagttgcagtttag

SEQ ID NO: 17813 - protein, 288 aa, Mesoplasma florum
MKQYLELVNEILKDGEKREDRTNTGTISKFGVQKRYDLREGFPLLTTKKVFYKAIFHEMLWFIKGDTNIKYLVENNVKIWNEWPYENFKKSSEFNNETLQEFVERLKNDNEFCNKWGDLGPVYGKQWRDFGGIDQFAKLINDIKKNPFSRRHIVSAWNPAEVDNMLLPPCHSFWQVYVSKDGWLDLQLYQRSGDVFLGVPFNIASYALLMELIAKECNLKARYFVHTIGDAHIYLNHLEQINEQLKRKPLPLCKIKINSEKSIFDIAFEDIEIEGYESHAKITGEVAV

SEQ ID NO: 17814 - DNA, 783 bp, Methylococcus capsulatus
  CDS (1)..(783): transl_table=11
atgcgcccttatctcgacctgctgcgcgacatcctcgatcacggctgccccaaaggggaccggaccggcaccgggaccctgagcgtgttcggccgcatgatgcggttcgacctgtcgcgggggcttcccctcgtcaccaccaagaaactgcatctgccctcgatcatccatgaactgctctggttcgtctccggcagcaccaacgtgcgtgatctgcaacggcacggcgtcacgatctgggacgagtgggcggatgacaatggtgagttaggccccgtgtatggacgccaatggcggaattggaacggcgccatcgatcagcttgccggactggtcgagcaactgcgccggaatccgggctcccgccgcctgctggtgagcgcatggaacccctccgatctggatgccatggcgctgccgccctgccactacgcctttcagtgccatgtggcggatggaaggctgtcgctcatgttccagatgcgttcggcggacgtgttcctgggactgccgttcaatatcgccggctatgccctgctcacccatatgcttgcgcaacagaccggatacgaaccgggggagttgatatggtgcggcggtgacgtgcatctgtacctcaaccacctggagcaggcgcgcctgcaactcacgcgcgaaccctatccgccgcccacgctgaaactcgcccgcaagcccgggagcctgttcgattaccgctacgaggatttcgtggtcgaggactaccaggcgcatccacacatcaaagcggcggtggcggtgtga

SEQ ID NO: 17815 - protein, 260 aa, Methylococcus capsulatus
MRPYLDLLRDILDHGCPKGDRTGTGTLSVFGRMMRFDLSRGLPLVTTKKLHLPSIIHELLWFVSGSTNVRDLQRHGVTIWDEWADDNGELGPVYGRQWRNWNGAIDQLAGLVEQLRRNPGSRRLLVSAWNPSDLDAMALPPCHYAFQCHVADGRLSLMFQMRSADVFLGLPFNIAGYALLTHMLAQQTGYEPGELIWCGGDVHLYLNHLEQARLQLTREPYPPPTLKLARKPGSLFDYRYEDFVVEDYQAHPHIKAAVAV

SEQ ID NO: 17816 - DNA, 795 bp, Methylobacillus flagellatum
  CDS (1)..(795): transl_table=11
atgaaggtctatcacgacttgatgcgccacgtactggagcagggccacaagaaggaagaccgcaccggcaccggtacgctgtccgtattcggctaccagatgcgcttcgacctgtccgagggctttccgctgctgaccaccaagaaggttcacctgaatgccattattcatgagctgctctggtttttgcagggcagtaccaacattgcctacctcaaggaaaacggcgtgaccatctgggacgagtgggcggatgccgagggcaacctggggccagtgtacggctaccagtggcgcaattggcccaaaccggatggaggccatatcgatcagatcagcgaagtgatagcggccatcaagagtaatccggactctcgccgtctgattgtgtccgcatggaatgtcgccgatgttgacaagatggaattgccgccttgccatgcgttgttccagttctatgtggcggagggaaaactttcgtgccagttgtaccaacgtagtgcggatatctttctcggcgtaccgttcaatatcgcctcctatgccttgctcaccatgatggtggcgcgggtatgtgatctcgagcttggcgattttgtacatacactgggtgatgcgcatatctatctcaatcatctcgagcaggtgaaggagcaattgtcgcgtgagccttatcctctgcctgtaatgcggatcaatcccgaggtcaaggatatctttgctttccgtttcgaggatttcacactggagaattaccagtcgcatcccgctatcaaggcccccgttgcagtgtag

SEQ ID NO: 17817 - protein, 264 aa, Methylobacillus flagellatum
MKVYHDLMRHVLEQGHKKEDRTGTGTLSVFGYQMRFDLSEGFPLLTTKKVHLNAIIHELLWFLQGSTNIAYLKENGVTIWDEWADAEGNLGPVYGYQWRNWPKPDGGHIDQISEVIAAIKSNPDSRRLIVSAWNVADVDKMELPPCHALFQFYVAEGKLSCQLYQRSADIFLGVPFNIASYALLTMMVARVCDLELGDFVHTLGDAHIYLNHLEQVKEQLSREPYPLPVMRINPEVKDIFAFRFEDFTLENYQSHPAIKAPVAV

SEQ ID NO: 17818 - DNA, 924 bp, Mus musculus
  CDS (1)..(924)
atgctggtggttggctccgagctgcagtccgatgctcagcagctgagcgcggaagccccacggcatggagaactccagtacctgaggcaggtggagcacattttgcgctgcggcttcaagaaggaggaccgcacgggcactggcaccctgtcggtgttcggcatgcaggcacgatacagcctgagagatgaatttcctctgctcacaaccaaacgagtgttctggaagggtgttttggaggagttgttgtggtttatcaagggatccacaaatgctaaagaattgtcctcaaagggagtgagaatctgggatgccaatggatcccgagattttctggacagcttgggattttctgcccgacaggaaggggacctgggcccagtttatggtttccaatggaggcattttggagcagagtacaaagatatggattcagattactcgggacaaggagtagaccagctgcaaaaagtgattgacaccatcaaaaccaaccctgatgacagaagaatcatcatgtgtgcctggaacccaaaagatcttcccctgatggcactgcctccttgccatgccctctgtcagttctatgtggtgaatggggaactgtcttgccagctttaccagaggtcaggagatatgggtctgggcgtgcccttcaacattgccagctatgctctgctcacctacatgattgcacatatcacaggcctgcagccaggtgattttgtccacactttgggagatgcacatatttacctgaatcatatagagccgctgaaaattcagctacagcgagaaccaagacctttcccaaagctcaaaatccttcgaaaagttgagacaatcgatgatttcaaagttgaagactttcagattgaagggtataatccacatccaacgattaaaatggaaatggctgtttag

SEQ ID NO: 17819 - protein, 307 aa, Mus musculus
MLVVGSELQSDAQQLSAEAPRHGELQYLRQVEHILRCGFKKEDRTGTGTLSVFGMQARYSLRDEFPLLTTKRVFWKGVLEELLWFIKGSTNAKELSSKGVRIWDANGSRDFLDSLGFSARQEGDLGPVYGFQWRHFGAEYKDMDSDYSGQGVDQLQKVIDTIKTNPDDRRIIMCAWNPKDLPLMALPPCHALCQFYVVNGELSCQLYQRSGDMGLGVPFNIASYALLTYMIAHITGLQPGDFVHTLGDAHIYLNHIEPLKIQLQREPRPFPKLKILRKVETIDDFKVEDFQIEGYNPHPTIKMEMAV

SEQ ID NO: 17820 - DNA, 792 bp, Mycobacterium bovis
  CDS (1)..(792): transl_table=11
gtgacgccatacgaggacctgctgcgcttcgtgctcgaaacgggtacgcccaaatccgaccgcaccggcaccggaacccgcagcctgttcggccagcagatgcgctatgatttgtcggccggtttcccgctgctcactaccaagaaagtccatttcaaatcggtagcctacgagctgctgtggtttttgcgcggcgattccaatatcggttggctgcacgagcacggagtcaccatctgggacgaatgggcaagtgatacaggcgaactcgggccgatctacggtgtacaatggcgatcgtggccggctccatccggtgagcacatcgaccagatcagcgcggcgctggatttgctgcgcaccgatcccgattcccggcgcatcatcgtgtcggcctggaacgtcggcgaaatcgagcggatggcgctgccgccctgtcatgcgttcttccagttctacgtcgccgatggccggctgagctgtcagctctaccaacgcagcgccgacctgtttctgggtgtgccgttcaacatcgccagctatgcgttgctcacccacatgatggccgcccaggccggcttgtcggtcggcgagttcatctggaccggtggcgactgccacatctacgacaatcacgtcgagcaagtacggctgcagctcagccgcgagccgcggccatatccgaaactacttctagccgaccgggattcaatcttcgagtacacctatgaagacatcgttgtgaagaactacgatccgcatccggcgatcaaagctccagtcgcggtatga

SEQ ID NO: 17821 - protein, 263 aa, Mycobacterium bovis
MTPYEDLLRFVLETGTPKSDRTGTGTRSLFGQQMRYDLSAGFPLLTTKKVHFKSVAYELLWFLRGDSNIGWLHEHGVTIWDEWASDTGELGPIYGVQWRSWPAPSGEHIDQISAALDLLRTDPDSRRIIVSAWNVGEIERMALPPCHAFFQFYVADGRLSCQLYQRSADLFLGVPFNIASYALLTHMMAAQAGLSVGEFIWTGGDCHIYDNHVEQVRLQLSREPRPYPKLLLADRDSIFEYTYEDIVVKNYDPHPAIKAPVAV

SEQ ID NO: 17822 - DNA, 870 bp, Mycoplasma gallisepticum
  CDS (1)..(870): transl_table=4
atgaaaacatatttagatttgttagaaaaagttatgaccaaaggtgaggttaaaaaagatcgaactaacacaggtacgatctcttattttggcactcaaagtcgatatgatttacgtgaaggatttccattattaacaactaagaaaatggcttgaaaagcaatttgccatgaattattatgatttcttaaaggtgatacgaatatcaagtacttggttgatcataatgtgaacatttggaacgaatgaccttatgaagcttttaagaaatcaaatgactttaaaggagagagcttacaagacttcgttgagaaaattaaaactgataaccaatttgctcaacaatacggaaaactaggccctgtgtatggaaaacaatgacgtgactttaatggcgttgatcaaattgagtgagttatcaacgaaattaaaactaacccgttttcacgtcgtttaatagtaagtgcgtgaaatcctggtgaaataaaagagatggccctaccaccttgtcatagttttttccagttctttgttaatgaaaaatatgaaatttcactgcaactataccaaagaagtggggacctattcttaggcgtgccttttaatattgcttcttatagtttgttacttttaatggttgctcaagtaactgggttaaaacctgctgaatttatccatacaattggggatacccacatctattcaaaccaccttgaacaagtaaaaattcaactacaaagagaacctaaaaaacttcctaaagtaaccctaaaccctgatattaaaaatatctttgattttagattcgaagatatcagtttagaaaactatgaacaccatgacccaatcaaaggaaaggtagctgtttaa

SEQ ID NO: 17823 - protein, 289 aa, Mycoplasma gallisepticum
MKTYLDLLEKVMTKGEVKKDRTNTGTISYFGTQSRYDLREGFPLLTTKKMAWKAICHELLWFLKGDTNIKYLVDHNVNIWNEWPYEAFKKSNDFKGESLQDFVEKIKTDNQFAQQYGKLGPVYGKQWRDFNGVDQIEWVINEIKTNPFSRRLIVSAWNPGEIKEMALPPCHSFFQFFVNEKYEISLQLYQRSGDLFLGVPFNIASYSLLLLMVAQVTGLKPAEFIHTIGDTHIYSNHLEQVKIQLQREPKKLPKVTLNPDIKNIFDFRFEDISLENYEHHDPIKGKVAV

SEQ ID NO: 17824 - DNA, 864 bp, Mycoplasma genitalium
  CDS (1)..(864): transl_table=4
atgaaacagtatttagatttagctagttatgttttagcaaatggtaaaaaaagaaaaaaccgtacagatacagatactttaagtgtctttggttaccagatgaaatttgaccttactaatagttttcctttattgacaactaaaaaggttaattggaaggcaattgtccatgaattgttgtgatttattaagggtgataccaacattaagtacttagttgataatggggtgaacatctgaaatgaatgaccatatgaaaactttaaaaaatcaccaagttttcaaaacgaaacactccaagaatttatcttaaaggttaaaactgataatgagtttgctaaacaatttgctgatttgggtcctgtttatggcaagcaatgacgtaattttaatggtgttgatcaactcaaaaaagtcatccaagagattaaagaaaatcccaactcaagaaggctaattgtctcaagctgaaaccctagtgaattggaaaaaatggcattggctccttgtcattcactctttcagttctatgttgaagaagataaactaagcttacagctttaccagcgcagcggtgatatctttcttggtgtcccatttaacattgcatcttacgccttacttgtgtatttagttgctcatgaaactaagttaaaacctggttattttatccatacactaggagatgcacatatctatgaaaaccacattgaacaaattaaattacaactaacaagaacaaccctagacccccctcaagtggttttgaaaagtgataaatcaatctttgcttatagttttgatgatattgagttagttggttataattaccatccatttatctatgggagggttgcagtttaa

SEQ ID NO: 17825 - protein, 287 aa, Mycoplasma genitalium
MKQYLDLASYVLANGKKRKNRTDTDTLSVFGYQMKFDLTNSFPLLTTKKVNWKAIVHELLWFIKGDTNIKYLVDNGVNIWNEWPYENFKKSPSFQNETLQEFILKVKTDNEFAKQFADLGPVYGKQWRNFNGVDQLKKVIQEIKENPNSRRLIVSSWNPSELEKMALAPCHSLFQFYVEEDKLSLQLYQRSGDIFLGVPFNIASYALLVYLVAHETKLKPGYFIHTLGDAHIYENHIEQIKLQLTRTTLDPPQVVLKSDKSIFAYSFDDIELVGYNYHPFIYGRVAV

SEQ ID NO: 17826 - DNA, 801 bp, Mycobacterium leprae
  CDS (1)..(801): transl_table=11
gtgctgatagcgacgccatacgaggatttgctgcgtctcgtgcttgactgcggcgtagccaaaatggaccgcaccggcaccgggactcgcagtctgtttggtcagcagttgcgttacgacctgtcggttgggttcccgctagttacgacgaaaaaggtgcacttcaaatcggttgtctacgagttgttgtggttcttgcgcggcgactccaacgtcgcctggttgcatgagcatggagttaatatctgggatgagtgggctagcagcacaggcgacctcgggccgatttatggtgtgcagtggcgatcttggccgacctcttcgggtgattacatcgaccaaatcagcaccgcactggatttgctgcgtaccgaaccggattctcggcgcatcattgtgtcggcttggaatgtcggtgaaatcccgcagatggcgctgccaccatgtcacgcgtttttccaattctacgtcgctcaaggccggctgagttgccagctgtaccagcgcagcgccgacatgttccttggtgtgccgttcaacatcgccagttacgcgcttctgacccacatgatggccgcccagtccggtcttttggttggtgagttcgtctggacgggcggtgattgccacatctacgacaaccatgtcgagcaggtacagctgcagctcagccgcgaaccccgagcatatccagaactctttttagcgcagcgtgattctatcttcgactatgtctacgaggacgtcgtcgtcacgaattatgatccgcacccggcgatcaaagccccagtcgcgatatga

SEQ ID NO: 17827 - protein, 266 aa, Mycobacterium leprae
MLIATPYEDLLRLVLDCGVAKMDRTGTGTRSLFGQQLRYDLSVGFPLVTTKKVHFKSVVYELLWFLRGDSNVAWLHEHGVNIWDEWASSTGDLGPIYGVQWRSWPTSSGDYIDQISTALDLLRTEPDSRRIIVSAWNVGEIPQMALPPCHAFFQFYVAQGRLSCQLYQRSADMFLGVPFNIASYALLTHMMAAQSGLLVGEFVWTGGDCHIYDNHVEQVQLQLSREPRAYPELFLAQRDSIFDYVYEDVVVTNYDPHPAIKAPVAI

SEQ ID NO: 17828 - DNA, 867 bp, Mycoplasma mobile
  CDS (1)..(867): transl_table=4
atggaacaatatttatctttacttaaagaaattttagaaaaaggacaaaaaaaagaagatcgtactaatacaggcacaatttcttattttggaactcaaagaagatatgatctatctaaaggatttcctttagtaacaactaaaaaagttcatcttaaatcaattatttttgaactattatgatttattaaaggcgatacaaatattaagtatctagttgataatggagtaaatatttgaaatgaatggccttatgaaacttttaaaaaatcaaaagattttaatggtgaatctttagctgattttgttttaaaaatcaaaagtgatactctttttgctaaaaaatatggtgaattaggtcctgtttatggaaaacagtgaagaaattttaatggcacagaccaactttttgatgcaattgagacaattaaaaaaaatcctgattcaaggagaattattgtttcggcttgagctgcaaatgaaatttccaaaatggctcttcctccttgccatgctttttttcaattttatgtaaataataataaattatcattacagttatatcaaagatcaggagatacatttttaggtgtcccttttaatattgcttcttattcaattcttcttgcaatggttgctcaaataacaaattatgaagtaggtgaatttattcacacaataggtgatactcacatttatctaaatcatttagaacaagtagaagagcaattatcaagaaaacctttaaaattaccaaaattagttttgaacaaaaaaattaaaaatattgatgattttaaatatgaagatattgaaattattgattatgaatctcatcctgcaattaaagcaaaggtggctgtataa

SEQ ID NO: 17829 - protein, 288 aa, Mycoplasma mobile
MEQYLSLLKEILEKGQKKEDRTNTGTISYFGTQRRYDLSKGFPLVTTKKVHLKSIIFELLWFIKGDTNIKYLVDNGVNIWNEWPYETFKKSKDFNGESLADFVLKIKSDTLFAKKYGELGPVYGKQWRNFNGTDQLFDAIETIKKNPDSRRIIVSAWAANEISKMALPPCHAFFQFYVNNNKLSLQLYQRSGDTFLGVPFNIASYSILLAMVAQITNYEVGEFIHTIGDTHIYLNHLEQVEEQLSRKPLKLPKLVLNKKIKNIDDFKYEDIEIIDYESHPAIKAKVAV

SEQ ID NO: 17830 - DNA, 801 bp, Mycobacterium paratuberculosis
  CDS (1)..(801): transl_table=11
gtgcccatcccgacgccctacgaggaccttctgcgtctggtgctcgatcggggaacggccaaatccgaccgaaccggcaccgggacgcgcagcctgttcggccagcagctgcgctatgacctgtcggccggcttcccgctgatcaccaccaagaaggtgcatctgaaatcggtggtctatgagttgctgtggttcttgcgcggcgactccaacgtcgactggctgcaccggcacggcgtcaccatttgggacgaatgggcaagcgacacaggcgatctcggaccgatctacggcgtgcagtggcggtcctggccgacgccgtcgggtgagcacatcgaccagatcagcgccgcgctggatctgttgcgcaccgaccccgactcgcggcgcatcatcgtgtcggcgtggaacgtcggcgagatcccgcggatggcgctgccgccgtgtcacgcgttcttccagttctacgtggccgacgggcggctgagctgccagctctaccagcgcagcgccgacctgtttctgggcgtgccgttcaacatcgccagctacgccctgctcacccacatgatggccgcccaggccgggctgtcggtcggcgaattcgtgtggaccggtggcgactgccacatctacgacaaccacgtcgagcaggtccggctgcagctgagccgcgagccccggccctacccggaactcattctggcgcatagggattcgatcttcgactacacctacgacgacgtcgtggtgcacaactacgatccgcacccggccatcaaggcccccgtcgcggtatga

SEQ ID NO: 17831 - protein, 266 aa, Mycobacterium paratuberculosis
MPIPTPYEDLLRLVLDRGTAKSDRTGTGTRSLFGQQLRYDLSAGFPLITTKKVHLKSVVYELLWFLRGDSNVDWLHRHGVTIWDEWASDTGDLGPIYGVQWRSWPTPSGEHIDQISAALDLLRTDPDSRRIIVSAWNVGEIPRMALPPCHAFFQFYVADGRLSCQLYQRSADLFLGVPFNIASYALLTHMMAAQAGLSVGEFVWTGGDCHIYDNHVEQVRLQLSREPRPYPELILAHRDSIFDYTYDDVVVHNYDPHPAIKAPVAV

SEQ ID NO: 17832 - DNA, 870 bp, Mycoplasma penetrans
  CDS (1)..(870): transl_table=4
atgaaagaatataaagacttattaaaactggttttagataatgggataatgcaagagaacagaactgatactgatgctattgcatattttggaacacaatctagatatgatctaactaaaggttttccattattaacaactaagaaaatggcttataaagcaattttccatgaattattatgatttttaaaaggtgaaactaatattaaataccttgtggataataatgtaaaaatctgaaatgaatgaccttatgaaaactataaaaaatctccatatttcaaaaatgaatctattgatgaattcattttaaaaattaaagaagatgattcatttgctaaacaatttggtgaacttggaccagtatatggaagacaatgaagaaattttaatggggtagatcaaattactaatctaatagaagagatcaagaaaaataagtattctagaagattaattgtaagtgtttgaaatcctagtgaaattaaaaatatgttattaccaccttgtcattgtttatttcaattttttgttaattcaaaaaatgaattatcttgtcagttatatcaaagaagtgcagatctatttttaggagttccttttaatattgcttcatatagtttattaacttatatgattgctcaagttacaaatactactgcaaaagaatttgttcacactattggagtagctcatatttataacaatcatattgatcaagttaaagaacaactaactagagaaccattgcaattaccaacattagtattaaataaaaatattaaaaatatctttgattttaaaatagaagatattgaaattaaagattataattctcatccagctattaaagggaaggtagcagtataa

SEQ ID NO: 17833 - protein, 289 aa, Mycoplasma penetrans
MKEYKDLLKLVLDNGIMQENRTDTDAIAYFGTQSRYDLTKGFPLLTTKKMAYKAIFHELLWFLKGETNIKYLVDNNVKIWNEWPYENYKKSPYFKNESIDEFILKIKEDDSFAKQFGELGPVYGRQWRNFNGVDQITNLIEEIKKNKYSRRLIVSVWNPSEIKNMLLPPCHCLFQFFVNSKNELSCQLYQRSADLFLGVPFNIASYSLLTYMIAQVTNTTAKEFVHTIGVAHIYNNHIDQVKEQLTREPLQLPTLVLNKNIKNIFDFKIEDIEIKDYNSHPAIKGKVAV

SEQ ID NO: 17834 - DNA, 864 bp, Mycoplasma pneumoniae
  CDS (1)..(864): transl_table=4
atgcagcagtatctagatttagcccgttatgttttagagcacggaaaataccgtccaaatcgcactgatactgctggcattggtgtctttggttaccagatgcactttgatatttcaaaacactttccgctcttgactacgaagaaggtgcactgaaagtcgattgtgcacgaacttttgtggttcattaagggtgacaccaatattaagtacctagtcgacaataaggtcaacatttggaatgaatgaccttacgaaagctttaaaaagtcacctcactttaacggtgagagtcaaaaggagttcattgaacggattcgacaagacgcgaagtttgcccaacagtttggtaacctcggacccgtttatggaaagcaatggcgtgactttaacggagtcgatcaattgaaaaaggtaattgcgcaaattaaggtaaatccgttttcgcggcgcttaattgtgtctagttgaaatcccaatgaggtggatcaaatgttgctcccgccttgtcattcactgtaccagttttacgtacaggacgggcagttgagctgccagttgtaccagcgcagtggtgatatttttctaggtatccccttcaacattgcgtcctactctcttctggtgtacttagttgctaaggaaactaacctaaaaccagggagctttgtccacaccattggcgatgcccacatttacgaaaatcacttggaacaaattaagttgcaattaacacgtcaacccaaaccattgcccaaggtagttttaaagagtgataaatcaatttttgattatcaattcgatgatattgaactggtggattacgaccaccaccctacaattaaaggagaggtagcagtttaa

SEQ ID NO: 17835 - protein, 287 aa, Mycoplasma pneumoniae
MQQYLDLARYVLEHGKYRPNRTDTAGIGVFGYQMHFDISKHFPLLTTKKVHWKSIVHELLWFIKGDTNIKYLVDNKVNIWNEWPYESFKKSPHFNGESQKEFIERIRQDAKFAQQFGNLGPVYGKQWRDFNGVDQLKKVIAQIKVNPFSRRLIVSSWNPNEVDQMLLPPCHSLYQFYVQDGQLSCQLYQRSGDIFLGIPFNIASYSLLVYLVAKETNLKPGSFVHTIGDAHIYENHLEQIKLQLTRQPKPLPKVVLKSDKSIFDYQFDDIELVDYDHHPTIKGEVAV

SEQ ID NO: 17836 - DNA, 861 bp, Mycoplasma pulmonis
  CDS (1)..(861): transl_table=4
atgaaacaatatttagactttttaaaatgagtattagaaaagggaaaacataaggaaaatagaactagtgttgacacaattagtgcctttggttatcaaatgcgttttgatctatctaagggctttcctttggttacaacaaagaaaactaattttagtgctatagctcatgaattactgtgatttataaaaggtgatactaacattaaatatctagttgataacaaagttaacatttgaaatcaatgaccttatgagagttataaaaaaagtcaagattttcaaagcgagagcttaaaagagtttattcaaaaaatcaaagatgataatgaatttgctcaaaaacatggtaatttaggtccagtttatggaaagcaatgaagagactttttgggaatagatcaattaaaaaaagttattgaacaaataaaaaataatccaaactctagaagactaatagtttcttcatgaaatccaagtgaaatagatactatgcttttacctccttgtcatactttgtttcaattttatgtaaatgataataagctttcatgtcatctatatcaacgaagtgctgatgcttttttgggtattccttttaacatagcctcttatgcacttttgacttttttattagctcaagaaactaatttagaagttggtgattttgttcattcaattggagatgctcacatttatgtaaatcatcttgagcaagtaaaaactcaactaaaaagaaatccaaaagaactgccaaaattaataatcaaaaacaaaaatatttttgaaattaattttgaagatattgaattagttgactatgaatttgatccaattattaaaggggaagtggcggtttaa

SEQ ID NO: 17837 - protein, 286 aa, Mycoplasma pulmonis
MKQYLDFLKWVLEKGKHKENRTSVDTISAFGYQMRFDLSKGFPLVTTKKTNFSAIAHELLWFIKGDTNIKYLVDNKVNIWNQWPYESYKKSQDFQSESLKEFIQKIKDDNEFAQKHGNLGPVYGKQWRDFLGIDQLKKVIEQIKNNPNSRRLIVSSWNPSEIDTMLLPPCHTLFQFYVNDNKLSCHLYQRSADAFLGIPFNIASYALLTFLLAQETNLEVGDFVHSIGDAHIYVNHLEQVKTQLKRNPKELPKLIIKNKNIFEINFEDIELVDYEFDPIIKGEVAV

SEQ ID NO: 17838 - DNA, 1422 bp, Neisseria gonorrhoeae
  CDS (446)..(1243)
acagggtgttcaggtcagtcattcggatactccttttggttgatattgtactaatgggaaaacaaatttgtagttggcaatataaacctatttttttctgatgccaagcctaattttgcacaaattgttgacattatttttcccatattttcgatatatgatgtttattgccgataatcaaccaataatcataaattaatttctcaaataaaaaatattattggaattttattctaagtagttaaactagattttttgattccaatcaagataattttgttttcacgcctgcttttgctgtgaaaaagggctgaaattgccaacaatcctgcctgccttcatccgcgttttgagcgtccggcggggcggcctgcgcgtttgtccggactcgggtgttggccggaaatgttacaatatgtgccgtttaatttgatgaaagatgatgatgaaggcctatttggacttgatgcgccacgtcctcgacaacggtacggacaaatcagaccgcaccggtacgggtacgctgtccgtattcggttatcagatgcgttttgacttgggcaaaggttttccgctgctgacgaccaaaaagctgcatttgcgctcgataatccacgagctgctttggttcctcaaaggcgataccaatatcaaatacctcaaggataacaatgtttccatttgggacgacgagtgggcggacgaaaacggcgacttgggcccggtttacggctaccaatggcgcagctggcccgcgcccgacggcaggcatatcgaccaaatcgccaatgtggtggaacaaattaagaaaaaccccgactcgcgccgcctgattgtgtcggcgtggaatccggctttggtcgatgagatggccttaccgccctgccacgcgctgtttcagttttacgttgccgacggaaacctgtcctgccagctttaccagcgtagtgcagatattttccttggtgtgccgtttaatattgccagctacgcgctgttgacgatgatgatggcgcaagtgtgcgggctggaggcgggcgagtttgtccatacgtttggcgacgcgcatttgtaccgtaaccatttcgaacaggccgcattgcagttggaacgcgaaccgcgcgccttgcctgtgatgaaaatcaatcctgaagtcaaggatttgtttgccttcaagtttgaagatttcgagttggaaggctacgatccgcatccgcacatcaaggcggtagtgtcggtttaggaggcggtatgggcaggcatttcgggcgcagacgttttctgacggctgccgcgttgctgtggccggtgcggcggtttcttttttgccgaatccttttgccgccgcgcgaaaaacgcaacatggataaaaaacgcgatgaaaatgtgtttttctggaaaggtgtcgcgctgggttccggc

SEQ ID NO: 17839 - protein, 265 aa, Neisseria gonorrhoeae
MKAYLDLMRHVLDNGTDKSDRTGTGTLSVFGYQMRFDLGKGFPLLTTKKLHLRSIIHELLWFLKGDTNIKYLKDNNVSIWDDEWADENGDLGPVYGYQWRSWPAPDGRHIDQIANVVEQIKKNPDSRRLIVSAWNPALVDEMALPPCHALFQFYVADGNLSCQLYQRSADIFLGVPFNIASYALLTMMMAQVCGLEAGEFVHTFGDAHLYRNHFEQAALQLEREPRALPVMKINPEVKDLFAFKFEDFELEGYDPHPHIKAVVSV

SEQ ID NO: 17840 - DNA, 795 bp, Neisseria meningitidis
  CDS (1)..(795): transl_table=11
atgaaagcctatttggacttgatgcgccacgtcctcgacaacggtacggacaaatcagaccgcaccggtacgggtacgcgctccgtattcggttatcagatgcgttttgacttgggcaaaggttttccgctgctgacgaccaaaaagctgcatctgcgttcgattatccacgagctgctttggtttctcaaaggcgataccaatatcaaatacctaaaggacaacaatgtttccatttgggacgagtgggcggacgaaaacggcgacttaggcccggtttacggctaccagtggcgtaactggcccgcgcccgacggcaggcatatcgaccaaatcgccaatgtgctggaacaaatcaagaagaatcccgactcgcgccgcctgattgtatcggcgtggaatccggctttggtcgatgaaatggccttgccgccctgccacgcgctgtttcagttttacgttgccgacggcaaactgtcctgccagctttaccagcgtagtgcagatattttccttggtgtgccgtttaatattgccagctacgcattgttgaccatgatgatggcgcaagtgtgcggattggaggcgggcgagtttgtccatacgtttggcgacgcgcatttgtaccgcaaccatttcgagcaggccgcattgcagttggaacgcgaaccgcgcgccttgccagtgatgaaaatcaatcctgaagtcaaagatttgttttccttcaagtttgaagatttcgagttggaaggttacgaccctcatccgcatatcaaggcggcagtgtcggtttag

SEQ ID NO: 17841 - protein, 264 aa, Neisseria meningitidis
MKAYLDLMRHVLDNGTDKSDRTGTGTRSVFGYQMRFDLGKGFPLLTTKKLHLRSIIHELLWFLKGDTNIKYLKDNNVSIWDEWADENGDLGPVYGYQWRNWPAPDGRHIDQIANVLEQIKKNPDSRRLIVSAWNPALVDEMALPPCHALFQFYVADGKLSCQLYQRSADIFLGVPFNIASYALLTMMMAQVCGLEAGEFVHTFGDAHLYRNHFEQAALQLEREPRALPVMKINPEVKDLFSFKFEDFELEGYDPHPHIKAAVSV

SEQ ID NO: 17842 - DNA, 795 bp, Nitrosomonas europaea
  CDS (1)..(795): transl_table=11
atgtatcagtacctcgacctgatgcgacatgtgttgcaatacggccataaaaagagtgatcgcaccggcaccggcacactctccgtttttggctatcagatgcgctttgatctgcaaacgggttttccgctggtgacaaccaagaaatgtcatgtcaaatcgatcattcatgaactgctatggtttctgcgcggcgaaaccaacatcgattacctgaaaagaaacggggtttccatctgggatgaatgggcagatgaaaacggtgatctgggcccgatctacggccatcagtggcgatcctgggcagcttccgacggcactgtcattgaccagatatcgcaagtgatccagcaaatcaaagaaacaccggactcacgccggatgatcgtctccgcatggaatgtaggtgatctcgacaaaatgaagctcgccccctgtcacgtactgttccagttttacgtggcggatggcagactctcctgccagctttaccagcgcagtgccgatatctttctgggcgttcccttcaacattgcctcttattcactgctgacactgatgatcgcacaatgttgcgacctgcagcccggcgaattcgtccatacctttggtgatgcgcatctgtatctgaaccaccttgaacaggcgcggttgcaactggaacgcgaacccagagcactcccagccatgcaactgaattcaacagtcagaaatatctttgatttcggatacgaggattttaccttgcacgattatgatccttacccgcctatcaaggcaccggtggctgtatga

SEQ ID NO: 17843 - protein, 264 aa, Nitrosomonas europaea
MYQYLDLMRHVLQYGHKKSDRTGTGTLSVFGYQMRFDLQTGFPLVTTKKCHVKSIIHELLWFLRGETNIDYLKRNGVSIWDEWADENGDLGPIYGHQWRSWAASDGTVIDQISQVIQQIKETPDSRRMIVSAWNVGDLDKMKLAPCHVLFQFYVADGRLSCQLYQRSADIFLGVPFNIASYSLLTLMIAQCCDLQPGEFVHTFGDAHLYLNHLEQARLQLEREPRALPAMQLNSTVRNIFDFGYEDFTLHDYDPYPPIKAPVAV

SEQ ID NO: 17844 - DNA, 801 bp, Nocardia farcinica
  CDS (1)..(801): transl_table=11
gtggcgacggacaggcaatacgaggacctcctgcggctcgtgctcgacaccggcacggccaagggcgaccgcaccggcaccggaacccgcagcatcttcgggcaccagctgcgctacgacctgtccgcgggattcccgctgatcaccaccaagaaagtgcacctgaagtcgatcgtctacgagctgctgtggttcctgcgcggcgactccaacgtgggctggctgcgcgagcacggggtgaccatctgggacgaatgggccgacccgcagggcgagttgggcccggtgtacggcgtgcagtggcggtcgtggcccaccccggacggcacccacatcgaccagatctcccaggtgttgcagaccctgcgcaccgacccggactcgcggcggatgatcgtctcggcgtggaatgtggccgaactcgaccggatggcgctggcgccctgccacgcgttcttccagttctacgtggccgacggcaagctgtcctgccagctctaccagcgcagcgcggacctgttcctgggggtgccgttcaacatcgccagttacgcgctgctcacccacatggtggcccagcagaccgagctcgagcccggtgagttcatctggaccggcggtgactgccacatctacgacaaccacgtcgagcaggtcaccgagcagctcggccgcgagccctatccgttcccgcggctcgaattgcgcccggcgcccagcttgttcgactaccgcttcgaggacgtcacggtgaccgactaccggcatcacccggcgatcaaagctccggtggcggtgtga

SEQ ID NO: 17845 - protein, 266 aa, Nocardia farcinica
MATDRQYEDLLRLVLDTGTAKGDRTGTGTRSIFGHQLRYDLSAGFPLITTKKVHLKSIVYELLWFLRGDSNVGWLREHGVTIWDEWADPQGELGPVYGVQWRSWPTPDGTHIDQISQVLQTLRTDPDSRRMIVSAWNVAELDRMALAPCHAFFQFYVADGKLSCQLYQRSADLFLGVPFNIASYALLTHMVAQQTELEPGEFIWTGGDCHIYDNHVEQVTEQLGREPYPFPRLELRPAPSLFDYRFEDVTVTDYRHHPAIKAPVAV

SEQ ID NO: 17846 - DNA, 954 bp, Oceanobacillus iheyensis
  CDS (1)..(954): transl_table=11
atgttaggggaacaagcctacttagatttgtgtaaacaaatatttaaaactggagaacaacgtggagatcgaaccaatacaggaacacattctatattcggacatcaaattcgttttgatttaaataaaggatttcctcttctaacgacaaaacgtgttccattccgactagttgcgagtgaactactttggtttattaaaggggataccaatattcggtatttattaaaacataataataatatttggaatgaatgggcatttgaaaaatgggtaaatagcgctgattatcaaggtccagatatggcgaatttcggattacgcagtcaaaaagatgagaattttaataaacaatatcaagaacaaatggagctctttaaaacgcgaattcttgaagatgattcttttgctgacaaatacggggacttaggatctgtatacgggaaacaatggagaaattggaagactactcagaatgaaacaattgatcaattaaaagatgtgattcattccattaaaacgaatccaaattcaagaagacatattgtatctgcgtggaatccagaagatattccaacaatggctttacctccttgtcatacattattccaattttatgtttcaaatggaaagctttcttgtcagctataccaaagaagtgcagacgtattcctaggggtaccattcaatatagccagttatgccctactcacgcatttaattgcccatgagtgtggattagaagttggtgatttcgtacatacttttggagacgcacatatttactctaatcatgttgaacaagtcgaaacacaactggaaagggagatccgcgattttccacaactaataataaacaaagataaaaattctatttttgaaatggacttagatgatttagtgattgaaaattataatcctcatccaagtattaaagcaccgattgctgtatag

SEQ ID NO: 17847 - protein, 317 aa, Oceanobacillus iheyensis
MLGEQAYLDLCKQIFKTGEQRGDRTNTGTHSIFGHQIRFDLNKGFPLLTTKRVPFRLVASELLWFIKGDTNIRYLLKHNNNIWNEWAFEKWVNSADYQGPDMANFGLRSQKDENFNKQYQEQMELFKTRILEDDSFADKYGDLGSVYGKQWRNWKTTQNETIDQLKDVIHSIKTNPNSRRHIVSAWNPEDIPTMALPPCHTLFQFYVSNGKLSCQLYQRSADVFLGVPFNIASYALLTHLIAHECGLEVGDFVHTFGDAHIYSNHVEQVETQLEREIRDFPQLIINKDKNSIFEMDLDDLVIENYNPHPSIKAPIAV

SEQ ID NO: 17848 - DNA, 867 bp, Onion yellows phytoplasma
  CDS (1)..(867): transl_table=11
atgaatacttatttagatttatgtcgttttattttgcaaaaaggcagttttagaaacgaccgcactaatacaggtaccaaaagtgtttttggctaccaaatgcgctttaatcttgaagaaggttttcctttgttaactactaaaaaaatgaatcttagatcaattatccacgaacttttatggtttttaaaaggggatactaatatttgttatttggtacaaaacaatgttaatatttggaatgaatggccttatcaaaaatatcaacaatcagctttttttcaaaatgaaacattgaaagaatttttagaaaaaatcaaaaatgatcctctttttgccataaagcacggtaatttaggtcctgtttatggtaaacaatggcgcgattttaatggcgttgatcaaatcaaatttttaatttctgaaatcaaaaccaatcccaattccagacgtttgattcttaattcttggaatccgcccttattaaaccaaatggcattgccaccttgtcatgtcttaattcaattctacgttcatcaaggcaaactctccttgcaactatatcaacgtagtggagatgtttttttgggaataccttttaatatcgcttcttattctttattacttatgatggtcgcacaagtaactaacttacaaccttacgaatttatccatactttaggagatgcccacatttattccaatcaccttgcacaagttcagacccaaattcaaagaactcctaaaaaattacctcaaatgattttaaatcctgacatcaaaaatattgatgattttaaatttagtgattttactttgcaaaattatcaatgtgatggcattttgaaaggcgatattgctgtatga

SEQ ID NO: 17849 - protein, 288 aa, Onion yellows phytoplasma
MNTYLDLCRFILQKGSFRNDRTNTGTKSVFGYQMRFNLEEGFPLLTTKKMNLRSIIHELLWFLKGDTNICYLVQNNVNIWNEWPYQKYQQSAFFQNETLKEFLEKIKNDPLFAIKHGNLGPVYGKQWRDFNGVDQIKFLISEIKTNPNSRRLILNSWNPPLLNQMALPPCHVLIQFYVHQGKLSLQLYQRSGDVFLGIPFNIASYSLLLMMVAQVTNLQPYEFIHTLGDAHIYSNHLAQVQTQIQRTPKKLPQMILNPDIKNIDDFKFSDFTLQNYQCDGILKGDIAV

SEQ ID NO: 17850 - DNA, 852 bp, Pasteurella multocida
  CDS (1)..(852): transl_table=11
atgaaacactatttagaactttgccaacgtatcgttgatgaaggtgtttgggttgaaaatgcacggactggcaaacgttgtctgaccgtgattgatgcggatctcacctacgatgttgccaataaccaatttccgttgatcaccacacgcaaaagctattggaaagcggcaattgcagaatttttaggttatatccgtggctatgacaatgcggcagatttccgcaaactcggcaccaaaacctgggatgccaatgctaatgaaaacagtgcatggctcaataatccgcaccgcaaaggcaccgatgatatgggacgtgtttatggcgtacaagggcgtgcatggcgcaaaccgaacggtgaaaccgtcgatcaattgcgcaaaatcgtcaataatctgcgcaacggcattgatgaccgtggtgaaatcatgaccttcttcaaccccggtgaatttgaactgggttgcctacgtccttgcatgcacacccacaccttctcattactcggtgataccctctatctcaccagttatcagcgttcttgtgatgtgccgcttggcttgaatttcaaccaaattcaagtgttcacctttcttgccttgatggcacaaattacgggcaaaaaagcgggtaaggcgtaccacaaaatcatcaatgcacacatttatgaagatcaacttgatctcatgaaaaatgtgcaattaaaacgtgaccccttcccgttgccacaattacacattaaccccgagattaaaactctcgaagatttagaaacttgggtgactatggatgattttaaggtcacgggctatcaatgccacgatgccattaaatatcctttctctgtgtaa

SEQ ID NO: 17851 - protein, 283 aa, Pasteurella multocida
MKHYLELCQRIVDEGVWVENARTGKRCLTVIDADLTYDVANNQFPLITTRKSYWKAAIAEFLGYIRGYDNAADFRKLGTKTWDANANENSAWLNNPHRKGTDDMGRVYGVQGRAWRKPNGETVDQLRKIVNNLRNGIDDRGEIMTFFNPGEFELGCLRPCMHTHTFSLLGDTLYLTSYQRSCDVPLGLNFNQIQVFTFLALMAQITGKKAGKAYHKIINAHIYEDQLDLMKNVQLKRDPFPLPQLHINPEIKTLEDLETWVTMDDFKVTGYQCHDAIKYPFSV

SEQ ID NO: 17852 - DNA, 795 bp, Photorhabdus luminescens
  CDS (1)..(795): transl_table=11
atgaaacagtatctggacttaatgacaagagtgcttgcagagggcactccgaaagcagaccgcaccgggacggggacactctcgattttcgggcatcagatgcgtttcaatttacaggatggttttccactggtcacaactaaacgttgccatatccgctcaattattcatgaacttctctggttcttgaatggtgataccaatattaaatatctgcatgaaaatggggtgactatttgggatgaatgggcggatgaaaacggtgatttagggccggtatatggtaagcaatggcgcgcatggggtaccgcagatggccgccagattgaccaattgaaaactgtactggaacagcttaaaagcgatccagattcacgtagaattattgtttcggcttggaacgttggtgaattggataagatggcattagcgccatgccacgctttcttccagttttatgttgcggatggcaaactttcctgtcagctttaccagcgctcctgtgacgtattccttggcttaccgttcaatattgccagctatgcattgctagttcacatgatggcgcaacagtgtgatttggaagtaggcgattttgtctggaccggtggtgatacgcacctttatagcaaccatatggagcagacaaaattacaactcagccgtgaaccgcgttcactaccaaaactggtgataaagcgtaaaccggcatcactttttgattataaatttgatgactttgaaatagttgattatgacccacatccaggaataaaggccccggttgctatttag

SEQ ID NO: 17853 - protein, 264 aa, Photorhabdus luminescens
MKQYLDLMTRVLAEGTPKADRTGTGTLSIFGHQMRFNLQDGFPLVTTKRCHIRSIIHELLWFLNGDTNIKYLHENGVTIWDEWADENGDLGPVYGKQWRAWGTADGRQIDQLKTVLEQLKSDPDSRRIIVSAWNVGELDKMALAPCHAFFQFYVADGKLSCQLYQRSCDVFLGLPFNIASYALLVHMMAQQCDLEVGDFVWTGGDTHLYSNHMEQTKLQLSREPRSLPKLVIKRKPASLFDYKFDDFEIVDYDPHPGIKAPVAI

SEQ ID NO: 17854 - DNA, 852 bp, Photobacterium profundum
  CDS (1)..(852): transl_table=11
atgaaacagtatttagaactctgtcagcgtattgttgacgacggcgtttggattgaaaataaacgaaccaataaacggtgccttaccgttgttaatgccgatttaacgtttgatgtggctaataatcagtttccgcttataaccactcgtaaaagcttctggaaatctgctattgctgagttacttggttacatccgtggttatgataatgccgctgattttcgtgccttgggaacaaaaacgtgggacatgaatgcgaatgataatttagcatggttgaataacccgcaccgcaaaggtgaagatgacatggggcgagtgtacggtgttcaaggccgtagctggcagaaaccagatggtagtactatcgatcagttgcgaaaaattgtcgataacctgtctgaaggtattgatgaccgtggtgaaattctgacgttttataatccaggtgagtttgatctggggtgtttacgtccttgtatgcacacacatacgttttcattgcttggtgatacattgcatctaacaagttaccagcgttcatgtgatgtgccgctagggctaaattttaaccaagttcaggtctatacactgttggcactagtggcacagattactggcaagaagccaggactggcttaccataagatcattaatgcacatatttatgaagatcagctgtctttgctacgtgatgtgcaattaacgcgtaccccttttgctgcacctaaactcatcatcaacccaaagattaaatgccttgaagacttggaaacgtgggtaacaatggatgattttgacgtgattggctacgagcatcatgaagcgataaaatacccattttcggtgtaa

SEQ ID NO: 17855 - protein, 283 aa, Photobacterium profundum
MKQYLELCQRIVDDGVWIENKRTNKRCLTVVNADLTFDVANNQFPLITTRKSFWKSAIAELLGYIRGYDNAADFRALGTKTWDMNANDNLAWLNNPHRKGEDDMGRVYGVQGRSWQKPDGSTIDQLRKIVDNLSEGIDDRGEILTFYNPGEFDLGCLRPCMHTHTFSLLGDTLHLTSYQRSCDVPLGLNFNQVQVYTLLALVAQITGKKPGLAYHKIINAHIYEDQLSLLRDVQLTRTPFAAPKLIINPKIKCLEDLETWVTMDDFDVIGYEHHEAIKYPFSV

SEQ ID NO: 17856 - DNA, 795 bp, Porphyromonas gingivalis
  CDS (1)..(795)
atgaaacagtatttggatctgcttcgccgcatcctcgacgagggagtacgaaaagaagaccgcacgggtacgggtacgatcagcgtattcggccatcagatgtgctttgaccttgaagagggatttcccttgcttacgaccaagcgattgcacttgaagtccattatatacgaactgctttggttcctcagaggtgacacgaacgtgcattacctgcaggaacatggcgtacgcatttggaacgaatgggctgatgagaacggcgatttgggacctatatatggctaccagtggcgcagttggccggactatcggggagggcatatagaccaaatgcaggaggtgctgcgccagctgcgcgaagaaccggacagccggcgcattatcgtatgctcgtggaatgtaggccagcttgccgatatgcatctgcctccatgccactgtttcatgcagttctatgtcgctgacggccggctgagcctgcaactctatcagcgcagtgccgattcttttctgggcataccgttcaacatagcttcgtatgcactcctgctacaaatgatcgctcatgtcacagggctgaaacccgggcgattcgtacatacactgggcgacgcccatatctatcttaaccacctcgaacaggtacagctacaactgagtcgtgagccgagagcgttgccccgaatggtactgaatccggaggtgtccgatctcttcgacttccgatacgaagacttccgactcgaagggtatgatccgcatccgcacattgcgggcgttgtagcagtctga

SEQ ID NO: 17857 - protein, 264 aa, Porphyromonas gingivalis
MKQYLDLLRRILDEGVRKEDRTGTGTISVFGHQMCFDLEEGFPLLTTKRLHLKSIIYELLWFLRGDTNVHYLQEHGVRIWNEWADENGDLGPIYGYQWRSWPDYRGGHIDQMQEVLRQLREEPDSRRIIVCSWNVGQLADMHLPPCHCFMQFYVADGRLSLQLYQRSADSFLGIPFNIASYALLLQMIAHVTGLKPGRFVHTLGDAHIYLNHLEQVQLQLSREPRALPRMVLNPEVSDLFDFRYEDFRLEGYDPHPHIAGVVAV

SEQ ID NO: 17858 - DNA, 810 bp, Propionibacterium acnes
  CDS (1)..(810): transl_table=11
atgcagatctacctcgacttgttgcggcggatccttgacgagggcgtgcgccgcgaggaccgtaccggaacggggacggtcagcgtcttcggtcaccagatggtctttgatctgcgcgagggattcccgctggtaacgacgaagaagatttacacccgcagcgtgttcggggagttgctgtggtttctgcgcggggatacgaatgtcggctggctgcatgataataacatccacatttgggacgagtgggccgacgagaacggtgatttagggccggtctacgggcatcagtggcgttcttggcccgacgacgatggcacaattgatcagatcgccaacgtggttgagcagattcgcaccaatccgtggtcgcgtcgtcacatcgtctcggcatggaatgtggccgagatcaaggagatggccctgccgccgtgccacactttgttccagttttacgtcacgccggatgatcggggaaccccgacgtggttgagctgccagctgtaccagcgctccggtgacaccttcctcggagtgccgttcaatatcgcgtcatatgccctgctcacccatctggtggcctcggtgaccgggctcaagccgttgcggttcgtccacaccttgggtgatgcccatgtgtacctcaatcacctcgaccaggttcatgagcagttgaaacgtaagccgcggcaccggccaacgctcaccgtcaacccgggtatccgtgacattgacgggtttgagctgtccgatatcaccctgactggttatgacccgtatccggcgctgcctgctccgattgcggtctga

SEQ ID NO: 17859 - protein, 269 aa, Propionibacterium acnes
MQIYLDLLRRILDEGVRREDRTGTGTVSVFGHQMVFDLREGFPLVTTKKIYTRSVFGELLWFLRGDTNVGWLHDNNIHIWDEWADENGDLGPVYGHQWRSWPDDDGTIDQIANVVEQIRTNPWSRRHIVSAWNVAEIKEMALPPCHTLFQFYVTPDDRGTPTWLSCQLYQRSGDTFLGVPFNIASYALLTHLVASVTGLKPLRFVHTLGDAHVYLNHLDQVHEQLKRKPRHRPTLTVNPGIRDIDGFELSDITLTGYDPYPALPAPIAV

SEQ ID NO: 17860 - DNA, 795 bp, Pseudomonas aeruginosa
  CDS (1)..(795): transl_table=11
atgaaacagtacctcgacctgatgcgccacgtgcgcgagcacggcaccttcaagagcgaccgcaccggcaccggcacctatagcgtgttcggccaccagatgcgcttcgacctggccgcgggcttccccctggtgaccaccaagaagtgccacctcaagtcgatcgtccacgagctgctgtggttcctcaagggctccaccaatatcgcctacctcaaggagcacggcgtctcgatctgggacgaatgggccgacgagaacggcgacctcggcccggtgtatggctaccagtggcgctcctggccggcgccggacggccgccacatcgaccagatcgccaacctgatggcgatgctgaagaagaatccggactcgcgccggctgatcgtctccgcctggaacccggcgctgatcgacgagatggccctgccgccctgccacgcgctgttccagttctacgtcgccgacggcaagctcagctgccagctctaccaacgttcggcggacatcttcctcggcgtacccttcaatatcgccagctatgccctgctgaccctgatggtggcgcaggtcgccggcctgcagccgggcgagttcatctggaccggcggcgattgccacctgtacgccaaccacctggagcaggccgacctgcagctgacccgcgagccgctgccgttgccgagcatgaagctgaatcccgaggtgaaggatctgttcgactttcgcttcgaggacttcgagctggtcggctacgaggcccatccgcacatcaaggcaccggtcgcggtctga

SEQ ID NO: 17861 - protein, 264 aa, Pseudomonas aeruginosa
MKQYLDLMRHVREHGTFKSDRTGTGTYSVFGHQMRFDLAAGFPLVTTKKCHLKSIVHELLWFLKGSTNIAYLKEHGVSIWDEWADENGDLGPVYGYQWRSWPAPDGRHIDQIANLMAMLKKNPDSRRLIVSAWNPALIDEMALPPCHALFQFYVADGKLSCQLYQRSADIFLGVPFNIASYALLTLMVAQVAGLQPGEFIWTGGDCHLYANHLEQADLQLTREPLPLPSMKLNPEVKDLFDFRFEDFELVGYEAHPHIKAPVAV

SEQ ID NO: 17862 - DNA, 972 bp, Pseudomonas syringae
  CDS (1)..(972): transl_table=11
atgaagcaatatctggaactggtcgcccacgtgatcaagcacggcaccttgcaagccaaccgtaccggcgtgaacaccatcagctttccgggtgccatgctgcgttacgacttgcaggaaggttttccggcgatcaccacacggcgcatggcgttcaaatcggctattggcgagatggtcggtttcttgcgtggcgtgagcaatgccgccgaattccgcgaactgggctgcaaggtctgggaccagaacgccaacgaaaacgcccagtggctgaacaatccgttccgcaagggcgaagacgatctgggcgagatctacggcgtgcaatggcgcaaatggccagcgtacaagcgcatcgacacgggcaacgtcgccgccatcgaactggcactcggtcagggttatcgccagattgccgaatcggaagaagacggccagtcgttcgtggtgctgtacaaggccatcgaccagattcgccagtgcatcgacaccatcatcaatgacccaggcagccgccgcatcctgttccacggctggaactgcgcccagctcgatgaaatggccctgccgccatgccatctgctgtaccagctgcaccccaacccgcagacccgcgaaatctccctgaccctgtacatccgctccaacgacctgggcctcggcacgccgttcaacctgaccgaaggcgccgcgctgctgagcctcatcggccgcctgaccggctacacgccgcgctggttcacctacttcatcggcgatgcccatgtgtacgagaaccacctggacatgctcaacgagcaaatgacccgcgagccgtacccgatgccaaaactggtgatctccgaccgcgtgccggagtttgccaagaccggcgtttatcagcctgaatggctggagctgatcgagccgtcggacttttcgctggaaggctatcagcatcacccggcgatgactgcgccgatggcggtctga

SEQ ID NO: 17863 - protein, 323 aa, Pseudomonas syringae
MKQYLELVAHVIKHGTLQANRTGVNTISFPGAMLRYDLQEGFPAITTRRMAFKSAIGEMVGFLRGVSNAAEFRELGCKVWDQNANENAQWLNNPFRKGEDDLGEIYGVQWRKWPAYKRIDTGNVAAIELALGQGYRQIAESEEDGQSFVVLYKAIDQIRQCIDTIINDPGSRRILFHGWNCAQLDEMALPPCHLLYQLHPNPQTREISLTLYIRSNDLGLGTPFNLTEGAALLSLIGRLTGYTPRWFTYFIGDAHVYENHLDMLNEQMTREPYPMPKLVISDRVPEFAKTGVYQPEWLELIEPSDFSLEGYQHHPAMTAPMAV

SEQ ID NO: 17864 - DNA, 795 bp, Ralstonia solanacearum
  CDS (1)..(795): transl_table=11
atgcagccctatctcgacctgatgcgccatgtccacgagcatggcaccgacaaagccgaccgcaccggcactggcacgcgctccgtgttcggccatcagatgcgcttcgacctgcagcagggctttccgctggtgaccaccaagaaggtccacatcaagtccatcgtctatgagctgctgtggttcctgcagggcgcgaccaacgtgcgctggctgcgggagaacggcgtcaccatctgggacgaatgggccgatgcggaaggtgaactgggcccgatctacggctaccagtggcgctcgtggccgacgccgtccggcgagcacatcgaccagatcgccgaactgatcgcgcagatcaagcgcaatccggactcgcgccggctgatcgtctcggcctggaacgtggccgacattccgcgcatgaagctgccgccctgccacgcgttcttccagttctatgtggccgacggcaagctgtcgtgccagctctaccagcgcagcgcggacatcttcctcggcgtgccgttcaacatcgccagctacgcgctgctcacgcacatgatcgcgcagcagaccggcctggacgtgggcgacttcgtctggaccggcggcgactgccatctctacaacaaccacttcgaacaggtcgagacgcaactcgcgcgcacgccgctgccgctgccgaagctgcacatcaagcgcaagccggacagcatcttcgattaccggtacgaagacttcgagatcgtcggctacgaaagccatcccgcgatcaaggcgcccgtggccgtatga

SEQ ID NO: 17865 - protein, 264 aa, Ralstonia solanacearum
MQPYLDLMRHVHEHGTDKADRTGTGTRSVFGHQMRFDLQQGFPLVTTKKVHIKSIVYELLWFLQGATNVRWLRENGVTIWDEWADAEGELGPIYGYQWRSWPTPSGEHIDQIAELIAQIKRNPDSRRLIVSAWNVADIPRMKLPPCHAFFQFYVADGKLSCQLYQRSADIFLGVPFNIASYALLTHMIAQQTGLDVGDFVWTGGDCHLYNNHFEQVETQLARTPLPLPKLHIKRKPDSIFDYRYEDFEIVGYESHPAIKAPVAV

SEQ ID NO: 17866 - DNA, 924 bp, Rattus norvegicus
  CDS (1)..(924)
atgctggttgaaggctctgagctgcagtccggtgctcaacagccacgcacggaagccccgcagcatggagaactccagtacctgaggcaggtggagcacattatgcgctgcggcttcaagaaggaggaccgcacgggcactggcaccctgtcggtgttcggcatgcaggcacggtacagcctgagagatgaatttcctctgctcacaaccaaacgagtattctggaagggtgttttggaggagttgttgtggtttattaagggctccacaaatgctaaagaactgtcctccaagggagtgagaatttgggatgccaatgggtcccgagactttttggacagcttgggattctctgcccgacaggaaggagacctgggcccagtttatggattccagtggagacattttggagcagactacaaagatatggattcagattactcgggtcaaggagtagaccagctgcaaaaagtgattgacaccatcaaaaccaaccccgatgacagaagaatcatcatgtgtgcctggaacccaaaagatcttcccctgatggcactgcctccttgccatgccctctgtcaattttatgtggtgaatggggagctgtcttgccagctttaccagcggtcaggagatatgggtctgggtgtgcccttcaacattgccagctatgctctgctgacctacatgattgcacatatcacgggcctgcagccgggtgattttgtccatactttgggagatgcacacatttatctgaatcatattgagccactgaaaattcagctacagcgagaaccaagacctttcccaaagctcagaatcctccgaaaagttgagacaatcgatgatttcaaagttgaagactttcagattgaagggtataatccacatccaacgattaaaatggaaatggctgtttag

SEQ ID NO: 17867 - protein, 307 aa, Rattus norvegicus
MLVEGSELQSGAQQPRTEAPQHGELQYLRQVEHIMRCGFKKEDRTGTGTLSVFGMQARYSLRDEFPLLTTKRVFWKGVLEELLWFIKGSTNAKELSSKGVRIWDANGSRDFLDSLGFSARQEGDLGPVYGFQWRHFGADYKDMDSDYSGQGVDQLQKVIDTIKTNPDDRRIIMCAWNPKDLPLMALPPCHALCQFYVVNGELSCQLYQRSGDMGLGVPFNIASYALLTYMIAHITGLQPGDFVHTLGDAHIYLNHIEPLKIQLQREPRPFPKLRILRKVETIDDFKVEDFQIEGYNPHPTIKMEMAV

SEQ ID NO: 17868 - DNA, 795 bp, Rhizobium loti
  CDS (1)..(795): transl_table=11
atgcgccaatatctcgacctcttgcagcatgtgctggacaacggtgccgaccgtagcgaccgcaccggcaccggcacgcgctccgtctttggctaccagatgcgtttcgacctggcgcgcggttttccggtcactacgaccaagaagctgcacctgaagtcgatcatccatgaactcctgtggttcctggccggcgacaccaacatcaaatacctgactgaccatggcgtcacgatctgggacgaatgggccgacgagaatggcgaccttggtcccgtctacggcaggcagtggcgctcctggccggacggtcatggcggctcgatcgaccagatcgcgggccttctcaaggagatacgccgcaatcctcaatcgcggcggctgatcgtttcggcgtggaacccggccgaggtggaggcgatggcgctgccgccctgccactgcctgttccagttctacgtgtccgagggccggctgtcctgccagctctaccagcggtcggccgatattttcctcggcgtgcccttcaacatcgcgtcctacgcgctgctgacgctgatggtggcgcaggtgaccgggctgaagccgggcgatttcgtccacacgctgggcgacgcgcatctctattcgaaccatttcgaacaggcgcgcgagcagttgcagcgcacgccaagggcattgccgacgatgtggatcaatccggaggtgaaggacctgttcgccttccgcttcgaggatttccggctggaaaactacgtcgccgacgcatcgatccaggcgccgatcgccgtttga

SEQ ID NO: 17869 - protein, 264 aa, Rhizobium loti
MRQYLDLLQHVLDNGADRSDRTGTGTRSVFGYQMRFDLARGFPVTTTKKLHLKSIIHELLWFLAGDTNIKYLTDHGVTIWDEWADENGDLGPVYGRQWRSWPDGHGGSIDQIAGLLKEIRRNPQSRRLIVSAWNPAEVEAMALPPCHCLFQFYVSEGRLSCQLYQRSADIFLGVPFNIASYALLTLMVAQVTGLKPGDFVHTLGDAHLYSNHFEQAREQLQRTPRALPTMWINPEVKDLFAFRFEDFRLENYVADASIQAPIAV

SEQ ID NO: 17870 - DNA, 795 bp, Rhizobium meliloti
  CDS (1)..(795): transl_table=11
atgcgacaatatctcgatctcctcgaacatgtgatcacaacgggtaccgaccggggcgaccgtacgggtacgggcacgcgctcggtgttcggctaccagatgcgcttcgacctgtcgcagggtttcccggtgctgaccaccaagaagctgcatctgcgttcgatcattcacgagcttctgtggttcctcaggggcgacacgaacgtcgcctatctcaaggacaacggggtgagcatctgggacgaatgggcggacgaaaacggcgagctcggaccggtctacggctaccaatggcgctcctggccgacgcccgatggccgacatatcgaccagatcgcggcgctggtcgaaggcctgaagaccaatccgaattcccgccgccacatcgtttcggcctggaacccggcgcttgtggacgaaatggcgctgccgccatgccactgtctgttccagttctacgtggcggacgggaagctctcctgccagctctaccagcgctcggccgatatctttctcggcgtacccttcaatatcgcttcctacgctctgctgacgatgatggtggcgcaggtgactgggctcgaagccggcgatttcgttcatacgcttggtgacgcgcatatctaccgcaaccacttcgagcaggcgcagctgcagctgacgagaacgccgaagccgctgcccaaaatggaaataaatccggcggtgaaggatatattttcgtttagattcgaagactttgagctcgtcggctacgaagccgattcacatatcaaggcgccggtcgcggtctag

SEQ ID NO: 17871 - protein, 264 aa, Rhizobium meliloti
MRQYLDLLEHVITTGTDRGDRTGTGTRSVFGYQMRFDLSQGFPVLTTKKLHLRSIIHELLWFLRGDTNVAYLKDNGVSIWDEWADENGELGPVYGYQWRSWPTPDGRHIDQIAALVEGLKTNPNSRRHIVSAWNPALVDEMALPPCHCLFQFYVADGKLSCQLYQRSADIFLGVPFNIASYALLTMMVAQVTGLEAGDFVHTLGDAHIYRNHFEQAQLQLTRTPKPLPKMEINPAVKDIFSFRFEDFELVGYEADSHIKAPVAV

SEQ ID NO: 17872 - DNA, 795 bp, Rhodopirellula baltica
  CDS (1)..(795): transl_table=11
atgcaaggctatttgcaactattagacgaagtcctgcatgacgggattgatcgagacgaccggacgggcgtcggcactcgcagtctgtttggacgccaaatgcggtttgatttggcggagggttttcctctgttgacgactaagaagctgcatatccggtcgattttgcacgaattgctgtggttccttcgcggggacaccaacatcggttacctaaaagagaacaaggtttcgatttgggacgagtgggccgatgaggccggcgatctgggcccggtctacggtcaccaatggcgaagctgggaaggtgccaacggcgacacggtcgaccaaatcgcttgggtcgaaaacgaaattcgcaccaacccgagatcacgccgtttggtcgtttcggcttggaacgtggccgatgtgccgaagatggctttgccgccgtgtcatttgctgtttcagttttatgtttctggcggacggctgtcttgtcagttgtatcaacgcagcgcggatttgtttttgggagtgccgttcaatatcgccagctacgcgatgttgacgtcgatgatggcccatgtcacgggtctgaagccgggcgaatttgttcacacgcttggcgacgttcatctctatagcaaccacttcgaccaagctcgcgaacaactcagccgaacgcctcggccgttgccgacgtttcatatcaagcgagacgtcgcatcggtcacggatttccagttcgatgatttcgagctgacaaactacgacccccatccccacatcaaggctccggtggcagtttaa

SEQ ID NO: 17873 - protein, 264 aa, Rhodopirellula baltica
MQGYLQLLDEVLHDGIDRDDRTGVGTRSLFGRQMRFDLAEGFPLLTTKKLHIRSILHELLWFLRGDTNIGYLKENKVSIWDEWADEAGDLGPVYGHQWRSWEGANGDTVDQIAWVENEIRTNPRSRRLVVSAWNVADVPKMALPPCHLLFQFYVSGGRLSCQLYQRSADLFLGVPFNIASYAMLTSMMAHVTGLKPGEFVHTLGDVHLYSNHFDQAREQLSRTPRPLPTFHIKRDVASVTDFQFDDFELTNYDPHPHIKAPVAV

SEQ ID NO: 17874 - DNA, 795 bp, Rhodopseudomonas palustris
  CDS (1)..(795): transl_table=11
atgatccaatatcaggacctgctcgaacgcatcttgagcgacggggccgaaaagcacgaccgcactggcaccggcacgctgtcggtattcgggcatcagatgcggttcgacctcgccgccggctttccgatgctgaccaccaagcggctgccgctgaaggcgattgtgcacgagctgctatggttcctgcagggcgataccaacatcaaatacctgcacgatcacggcgtcacgatctgggacgagtgggcggacgccaacggcgatctcggcccagtgtacggcgcacagtggcgctcgtggccgaccgcggatggtggctcgatcgatcagatcgccaatgtggtcgagatgatcaagcgtaatccggattcgcggcggctgatggtgacggcgtggaatccggccgacgtcgagaagatggcgctgccgccgtgccactgcctgttccagttctatgtcgcgaacggcaagctgtcgtgtcagctgtatcagcgctcggccgacgtgtttctcggcgtgccgttcaacatcgcatcgtacgcgctgctgacgctgatggtggcgcaagtcactggtctaaagcccggcgagttcgtccacactcttggcgacgcgcacctgtattccaatcacctggagcaggcgcggctgcaactgacccgtgccccgcgcgcgctgccggtgatgacgatcaatccggcggtgaaggacatcttcggcttccgctacgaggatttcaccctgaccggctacgatccgcaccctcacatcaaggccgaggtggcggtgtga

SEQ ID NO: 17875 - protein, 264 aa, Rhodopseudomonas palustris
MIQYQDLLERILSDGAEKHDRTGTGTLSVFGHQMRFDLAAGFPMLTTKRLPLKAIVHELLWFLQGDTNIKYLHDHGVTIWDEWADANGDLGPVYGAQWRSWPTADGGSIDQIANVVEMIKRNPDSRRLMVTAWNPADVEKMALPPCHCLFQFYVANGKLSCQLYQRSADVFLGVPFNIASYALLTLMVAQVTGLKPGEFVHTLGDAHLYSNHLEQARLQLTRAPRALPVMTINPAVKDIFGFRYEDFTLTGYDPHPHIKAEVAV

SEQ ID NO: 17876 - DNA, 795 bp, Salmonella paratyphi
  CDS (1)..(795): transl_table=11
atgaaacagtatttagaactgatgcaaaaagtgctggatgaaggcacacagaaaaacgaccgtaccggcaccggcacgctttccatttttggccatcagatgcgttttaacctgcaggaaggctttcctctggtgacgacgaaacgctgccatttacgttcaattattcacgaactgctatggtttttgcagggcgataccaacatcgcttacctgcacgaaaataatgtcaccatctgggacgaatgggccgatgagaacggcgatttaggcccggtttatggtaagcagtggcgtgcatggccaacaccggatggccgccatatcgatcagatcgccacggtcttaagccagcttaaaaacgacccggactctcgccgtattatcgtttctgcgtggaacgtcggcgagctggataagatggcgctggcgccgtgtcacgcctttttccagttttatgtcgcagatggaaaactctcctgtcagctttatcagcgctcctgcgatgtgttcctcggtctgccgttcaacattgccagctacgcgttactggtgcatatgatggcgcaacagtgcgacctggacgttggcgattttgtctggaccggcggcgacacgcacctgtacagcaaccatatggagcagacgcacctgcaattaagccgtgaaccgcgcgcgctgccgaaattggtcattaagcgtaaacccgattcgctttttgactaccggttcgatgatttcgaaattgaaggctatgatccgcaccccggtattaaagcgccggtcgctatctaa

SEQ ID NO: 17877 - protein, 264 aa, Salmonella paratyphi
MKQYLELMQKVLDEGTQKNDRTGTGTLSIFGHQMRFNLQEGFPLVTTKRCHLRSIIHELLWFLQGDTNIAYLHENNVTIWDEWADENGDLGPVYGKQWRAWPTPDGRHIDQIATVLSQLKNDPDSRRIIVSAWNVGELDKMALAPCHAFFQFYVADGKLSCQLYQRSCDVFLGLPFNIASYALLVHMMAQQCDLDVGDFVWTGGDTHLYSNHMEQTHLQLSREPRALPKLVIKRKPDSLFDYRFDDFEIEGYDPHPGIKAPVAI

SEQ ID NO: 17878 - DNA, 795 bp, Salmonella typhi
  CDS (1)..(795): transl_table=11
atgaaacagtatttagaactgatacaaaaagtgctggatgaaggcacacagaaaaacgaccgtaccggcaccggcacgctttccatttttggccatcagatgcgttttaacctgctggaaggctttcctctggtgacgacgaaacgctgccatttacgttcaattattcacgaactgctatggtttttgcagggcgataccaacatcgcttacctacacgaaaataatgtcaccatctgggacgaatgggccgatgagaacggcgatttaggcccggtttatggtaagcagtggcgtgcatggccaacaccggatggccgccatatcgatcagatcgccacggtcttgagccagcttaaaaacgacccggactctcgtcgtattatcgtttctgcgtggaacgtcggcgagctggataagatggcgctggcgccgtgtcacgcctttttccagttttatgtcgcagatggaaaactctcctgtcagctttatcagcgctcctgcgatgtgttcctcggtctgccgttcaacattgccagctacgcgttactggtgcatatgatggcgcaacagtgcgacctggacgtcggcgattttgtctggaccggcggcgacacgcacctgtacagcaaccatatggagcagacgcacctgcaattaagccgtgaaccgcgcgcgctgccgaaattggtcattaagcgtaaacccgattcgctttttgactaccggttcgatgatttcgaaattgaaggctatgatccgcaccccggtattaaagcgccggtcgctatctaa

SEQ ID NO: 17879 - protein, 264 aa, Salmonella typhi
MKQYLELIQKVLDEGTQKNDRTGTGTLSIFGHQMRFNLLEGFPLVTTKRCHLRSIIHELLWFLQGDTNIAYLHENNVTIWDEWADENGDLGPVYGKQWRAWPTPDGRHIDQIATVLSQLKNDPDSRRIIVSAWNVGELDKMALAPCHAFFQFYVADGKLSCQLYQRSCDVFLGLPFNIASYALLVHMMAQQCDLDVGDFVWTGGDTHLYSNHMEQTHLQLSREPRALPKLVIKRKPDSLFDYRFDDFEIEGYDPHPGIKAPVAI

SEQ ID NO: 17880 - DNA, 795 bp, Shewanella oneidensis
  CDS (1)..(795): transl_table=11
atgcaacagtatttagacttaatgaaacacatcttagccgaaggtgtggataaatcagaccgaacaggtacgggtactcgctcggtttttggttatcaaatgcgtttcgatttgagtaagggttttcctttagtcaccacgaaaaagtgccatatgcgctccatcattcatgagctgttgtggttcctaaagggcgataccaatattgcttatctgcgtgacaataaagtcagtatttgggatgaatgggccgatgaaaacggcgatttgggccctgtgtatggtgcgcaatggcgcagctggccgacccaaagtggtgaggctatcgatcaaatttcgcaggttattgcgcaaattaaatcgcaacctgactcgcgtcgtttgatcgtatcggcttggaacgttggtgagttggataaaatggctctggctccttgccatgcgtttttccaattctatgttgctgatggcaaattatcctgtcagctgtaccagcgtagttgtgatgtgtttttagggttgccctttaatatcgccagctatgcactattgaccatgatggtggcgcaacaatgcgacttagctttaggtgactttgtttggacggggggggatacccacttgtattccaaccacatggagcaaacagcgttgcagttgagccgcgagcctagacccttaccgacgatgaccattctgcgtaaacctgcctcgatttttgattatcaattcgacgattttgcattgagcaactacgatcctcacccacatatcaaagcgcctgtcgccgtttaa

SEQ ID NO: 17881 - protein, 264 aa, Shewanella oneidensis
MQQYLDLMKHILAEGVDKSDRTGTGTRSVFGYQMRFDLSKGFPLVTTKKCHMRSIIHELLWFLKGDTNIAYLRDNKVSIWDEWADENGDLGPVYGAQWRSWPTQSGEAIDQISQVIAQIKSQPDSRRLIVSAWNVGELDKMALAPCHAFFQFYVADGKLSCQLYQRSCDVFLGLPFNIASYALLTMMVAQQCDLALGDFVWTGGDTHLYSNHMEQTALQLSREPRPLPTMTILRKPASIFDYQFDDFALSNYDPHPHIKAPVAV

SEQ ID NO: 17882 - DNA, 885 bp, Saimiriine herpesvirus 2
  CDS (1)..(885)
atgtcaacacacacagaagaacagcatggagaacaccagtacctctcacaggtacagcacattttaaattatgggtcatttaaaaatgacagaacagggactggaacactgagtatttttggaacacagtctaggtttagtttagaaaatgaatttccacttttaactactaagagagtattttggagaggtgttgttgaagaactgttgtggtttatcagaggatctactgacagcaaagagctatcagcagctggcgtgcacatttgggatgcgaatggatctagatcatttttagataaacttggtttttatgacagagatgaaggagatcttggacctgtgtatggatttcagtggaggcatttcggagcagaatataaaggtgttgggcgcgattataaaggagaaggagttgaccaattaaaacagttgattgatactataaaaacaaaccctacagatagaaggatgttaatgtgtgcttggaatgtttcagacattcctaaaatggtgttgccgccttgtcatgtattaagtcaattttatgtctgtgatggaaagctttcctgtcaactgtatcaaagatcagctgatatggggttaggagtgccatttaacattgctagctattctcttttaacttgcatgattgctcatgtcactaatctagtgcctggagagtttatccatactataggagatgctcacatctatgtagatcacattgatgctcttaaaatgcagttgacgcgaactcctagaccgtttccaacacttagatttgctagaaatgtttcatgcattgatgactttaaagcagatgacattatattagaaaactataacccacaccctataattaaaatgcatatggctgtttaa

SEQ ID NO: 17883 - protein, 294 aa, Saimiriine herpesvirus 2
MSTHTEEQHGEHQYLSQVQHILNYGSFKNDRTGTGTLSIFGTQSRFSLENEFPLLTTKRVFWRGVVEELLWFIRGSTDSKELSAAGVHIWDANGSRSFLDKLGFYDRDEGDLGPVYGFQWRHFGAEYKGVGRDYKGEGVDQLKQLIDTIKTNPTDRRMLMCAWNVSDIPKMVLPPCHVLSQFYVCDGKLSCQLYQRSADMGLGVPFNIASYSLLTCMIAHVTNLVPGEFIHTIGDAHIYVDHIDALKMQLTRTPRPFPTLRFARNVSCIDDFKADDIILENYNPHPIIKMHMAV

SEQ ID NO: 17884 - DNA, 957 bp, Staphylococcus aureus
  CDS (1)..(957): transl_table=11
atgttgaattcatttgatgcagcatatcacagtctttgtgaagaggttttagaaataggaaatacacgaaatgatcgcacaaatacaggtacgatttcgaaatttggtcatcaacttcgctttgacttatctaaaggatttccactattaacgacaaagaaagtttcttttaaattagtagcaaccgaattattatggttcattaaaggagatacaaacatccaatacttattaaaatataataataatatttggaacgaatgggcttttgaaaattatataaaatcagacgagtataacggtccagatatgacagatttcgggcatcgtgcattgagtgatcctgaatttaacgaacaatataaagaacaaatgaaacaatttaagcaacgtattcttgaagatgatacttttgcgaagcaattcggtgatttaggaaatgtttatggtaaacaatggcgagattgggttgataaagatggtaatcattttgatcaacttaaaacagtaattgaacaaattaagcataatccagattcaagacgacacatcgtatctgcatggaatccaacagaaattgatacaatggcacttccgccttgtcataccatgttccagttttatgtccaagatggtaagttaagttgccagttataccaacgtagcgcagatatctttttaggtgtgccatttaatatcgcaagctacgctttattgacacaccttattgccaaagaatgtggacttgaagtaggagaatttgtgcatacatttggagatgcacatatttattcaaatcatattgatgcgattcaaacacaattagcacgtgaaagcttcaatcctccaacattaaaaattaacagtgacaagtctattttcgacataaattatgaagatttggaaattgttgactatgaatcacatccagcaataaaagctccaatagcagtgtag

SEQ ID NO: 17885 - protein, 318 aa, Staphylococcus aureus
MLNSFDAAYHSLCEEVLEIGNTRNDRTNTGTISKFGHQLRFDLSKGFPLLTTKKVSFKLVATELLWFIKGDTNIQYLLKYNNNIWNEWAFENYIKSDEYNGPDMTDFGHRALSDPEFNEQYKEQMKQFKQRILEDDTFAKQFGDLGNVYGKQWRDWVDKDGNHFDQLKTVIEQIKHNPDSRRHIVSAWNPTEIDTMALPPCHTMFQFYVQDGKLSCQLYQRSADIFLGVPFNIASYALLTHLIAKECGLEVGEFVHTFGDAHIYSNHIDAIQTQLARESFNPPTLKINSDKSIFDINYEDLEIVDYESHPAIKAPIAV

SEQ ID NO: 17886 - DNA, 840 bp, Streptococcus agalactiae
  CDS (1)..(840): transl_table=11
atgacaaaagccgatttattatttaaagacaatatcacgaaaattatgtctgaaggtgtatttagcgagcaagccagacctagatataaaaatggggaaatggctaattctaagtatattacaggtgcctttgcagagtatgatttatcaaagggtgaatttcctattacaactctacgtccaattccaataaaatctgctattaaagaaattttctggatttatcaagatcagacaaatgatttagtagttttgaatgataaatatggtgtgacatactggaatgattgggaagttggccatactggcacgataggtcagcgctacggtgcagttgttaaaaaacataatattatatcaaaactcttaaaacagcttgaagataacccttggaatcgtcgtaatgttatttcattatgggactatgaagcatttgaagaaacagaaggcctactaccttgtgcttttcaaacgatgtttgatgtgagacgcgttaatggtgagctttatttggatgccacattaacacaacgttctaatgacatgttagttgcacatcatattaatgctatgcagtatgtagcacttcagatgatgattgcaaagcattttggttggagagttgggaagtttttctattttatcaataatcttcatatttatgataaccagtttgaacaagctcaggaactcttaaaacgccaaccgtctgagtgtaaccccaaactagtattgaatgttccagatggaacagacttttttgatattaaaccagatgattttgcgttagttgattatgacccaattaaacctcaattacgttttgatttagcaatctaa

SEQ ID NO: 17887 - protein, 279 aa, Streptococcus agalactiae
MTKADLLFKDNITKIMSEGVFSEQARPRYKNGEMANSKYITGAFAEYDLSKGEFPITTLRPIPIKSAIKEIFWIYQDQTNDLVVLNDKYGVTYWNDWEVGHTGTIGQRYGAVVKKHNIISKLLKQLEDNPWNRRNVISLWDYEAFEETEGLLPCAFQTMFDVRRVNGELYLDATLTQRSNDMLVAHHINAMQYVALQMMIAKHFGWRVGKFFYFINNLHIYDNQFEQAQELLKRQPSECNPKLVLNVPDGTDFFDIKPDDFALVDYDPIKPQLRFDLAI

SEQ ID NO: 17888 - DNA, 840 bp, Streptococcus agalactiae
  CDS (1)..(840): transl_table=11
atgacaaaagccgatttattatttaaagacaatatcacgaaaattatgtctgaaggtgtatttagcgagcaagccagacctagatataaaaatggggaaatggctaattctaagtatattacaggtgcctttgcagagtatgatttatcaaagggtgaatttcctattacaactctacgtccaattccaataaaatctgctattaaagaaattttctggatttatcaagatcagacaaatgatttagcagttttgaatgataaatatggtgtgacatactggaatgattgggaagttggccatactggcacgataggtcagcgctacggtgcagttgttaaaaaacataatattatatcaaaactcttaaaacagcttgaagataacccttggaatcgtcgtaatgttatttcattatgggactatgaagcatttgaagaaacagaaggcctactaccttgtgcttttcaaacgatgtttgatgtgagacgcgttaatggtgagctttatttggatgccacattaacacaacgttctaatgacatgttagttgcacatcatattaatgctatgcagtatgtagcacttcagatgatgattgcaaagcattttggttggagagttgggaagtttttctattttatcaataatcttcatatttatgataaccagtttgaacaagctcaggaactcttaaaacgccaaccgtctgagtgtaaccccaaactagtattgaatgttccagatggaacagacttttttgatattaaaccagatgattttgcgttagttgattatgacccaattaaacctcaattacgttttgatttagcaatctaa

SEQ ID NO: 17889 - protein, 279 aa, Streptococcus agalactiae
MTKADLLFKDNITKIMSEGVFSEQARPRYKNGEMANSKYITGAFAEYDLSKGEFPITTLRPIPIKSAIKEIFWIYQDQTNDLAVLNDKYGVTYWNDWEVGHTGTIGQRYGAVVKKHNIISKLLKQLEDNPWNRRNVISLWDYEAFEETEGLLPCAFQTMFDVRRVNGELYLDATLTQRSNDMLVAHHINAMQYVALQMMIAKHFGWRVGKFFYFINNLHIYDNQFEQAQELLKRQPSECNPKLVLNVPDGTDFFDIKPDDFALVDYDPIKPQLRFDLAI

SEQ ID NO: 17890 - DNA, 840 bp, Streptococcus mutans
  CDS (1)..(840): transl_table=11
atgtctaaggcagattttattttcaaaaaaaatataaaaaaaatcttaactgatggtgtctggagcgaacaggctcgtcctaaatataaaaatggcaagacagccaattctaaatatattacaggcgcttttgcagaatatgaccttgcaaaaggagaatttcctatcacaacccttcgtccgattgctatcaagtcagctatcaaggaagtattctggatctatcaggatcagaccaacgaattagccatcttaaatgataagtacggtgttaggtattggaatgattgggaagtcaagcaaacaggaaccatcggagaacgttatggtgccattgttaagaaacatgatattatgaataaaattctcaaacaattggaagaaaatccttggaatcgacgcaatgtcatctctctttgggattatgaagcctttgaaaaaacagaaggtctcctaccttgtgcctttcaaatcatgttcgatgttcgtcgtgtgaaaggcgaaatttatttagatgctaccttaacacagcgctccaacgatatgctggttgctcaccatatcaacgccatgcaatatgtcgctttgcagatgatgatcgccaaacactttggttggaaggttggtaaattcttctattttgtcaataatctccatatttatgataatcaatttgaacaagcagaggaattattgcggagagagccagtggtttgtcaaccgcatttggtattgaatgtcccaaataaaactaatttctttgatattaaacctgaagattttgaattattggattatgaaccggttaaaccacaattaaaatttgatttagctatttaa

SEQ ID NO: 17891 - protein, 279 aa, Streptococcus mutans
MSKADFIFKKNIKKILTDGVWSEQARPKYKNGKTANSKYITGAFAEYDLAKGEFPITTLRPIAIKSAIKEVFWIYQDQTNELAILNDKYGVRYWNDWEVKQTGTIGERYGAIVKKHDIMNKILKQLEENPWNRRNVISLWDYEAFEKTEGLLPCAFQIMFDVRRVKGEIYLDATLTQRSNDMLVAHHINAMQYVALQMMIAKHFGWKVGKFFYFVNNLHIYDNQFEQAEELLRREPVVCQPHLVLNVPNKTNFFDIKPEDFELLDYEPVKPQLKFDLAI

SEQ ID NO: 17892 - DNA, 840 bp, Streptococcus pyogenes
  CDS (1)..(840): transl_table=11
atgacaaaagctgaccagatttttaaagctaatattcaaaaaattataaacgaaggatcattgagtgagcaagcacgtcctaaatataaagatggtcgaacagctcattctaagtatattactggggcgtttgctgaatatgatttagctaaaggagagtttcccatcacaactttacgacccattccaattaaatctgctataaaggaattattttggatatatcaagatcagtctaacagtttagatgtgctagaagctaaatataatgttcattattggaatgaatgggaagttgaccagacacgtactattgggcaacgttatggtgctgtagtcaaaaaacatgatatcatctcaaaaatactaaagcaattagcagaaaatccttggaatcgtcgtaatgtcatttctctctgggactatgaagcatttgaggagacaaaagggttgttgccatgtgcctttcaaatcatgtttgatgttagacgtgtaggggaagatctttatttagatgctagtttgacgcaacgttctaatgacatattagttgctcatcacatcaatgccatgcaatacgttgccttgcagatgatgattgctaaacattttggatggaaaataggtaagttcttttattttgttaacaatttacatatttatgacaaccaatttgatcaggctcaagaattgctaaaacgacagccagttgctagtcagcctaagcttgttttaaatgttccagataggactaatttctttgatattaaaccagatgattttgaattacaaaattatgatccagtgaagcctcagttgcactttgaccttgctatttaa

SEQ ID NO: 17893 - protein, 279 aa, Streptococcus pyogenes
MTKADQIFKANIQKIINEGSLSEQARPKYKDGRTAHSKYITGAFAEYDLAKGEFPITTLRPIPIKSAIKELFWIYQDQSNSLDVLEAKYNVHYWNEWEVDQTRTIGQRYGAVVKKHDIISKILKQLAENPWNRRNVISLWDYEAFEETKGLLPCAFQIMFDVRRVGEDLYLDASLTQRSNDILVAHHINAMQYVALQMMIAKHFGWKIGKFFYFVNNLHIYDNQFDQAQELLKRQPVASQPKLVLNVPDRTNFFDIKPDDFELQNYDPVKPQLHFDLAI

SEQ ID NO: 17894 - DNA, 840 bp, Streptococcus pyogenes
  CDS (1)..(840)
atgacaaaagctgaccagatttttaaagctaatattcaaaaaattataaatgaaggatcattgagtgagcaagcacgtcctaaatataaagatggtcgaacagctcattctaagtatattactggggcgtttgctgaatatgatttagctaaaggagagtttcccatcacaactttacgacctattccaattaaatctgctataaaggaattattttggatatatcaagatcagtctaacagtttagatgtgctagaagctaaatataatgttcattattggaatgaatgggaagttgaccagacacgtactattgggcaacgttatggtgctgtagtcaaaaaacatgatatcatttcaaaaatactaaagcaattagcagaaaatccttggaatcgtcgtaatgtcatttctctctgggactatgaagcatttgaggagacaaaagggttgttgccatgtgcctttcaaatcatgtttgatgttagacgtgtaggggaagatctttatttagatgctagtttgacgcaacgttctaatgacatattagttgctcatcacatcaatgccatgcaatacgttgccttgcagatgatgattgctaaacattttggatggaaaataggtaagttcttttattttgttaacaatttacatatttatgacaaccaatttgatcaggctcaagaattactaaaacgacagccagttgctagtcagcctaagcttgttttaaatgttccagatgggactaatttctttgatattaaaccagatgattttgaattacaaaattatgatccagtgaagcctcagttgcactttgaccttgctatttaa

SEQ ID NO: 17895 - protein, 279 aa, Streptococcus pyogenes
MTKADQIFKANIQKIINEGSLSEQARPKYKDGRTAHSKYITGAFAEYDLAKGEFPITTLRPIPIKSAIKELFWIYQDQSNSLDVLEAKYNVHYWNEWEVDQTRTIGQRYGAVVKKHDIISKILKQLAENPWNRRNVISLWDYEAFEETKGLLPCAFQIMFDVRRVGEDLYLDASLTQRSNDILVAHHINAMQYVALQMMIAKHFGWKIGKFFYFVNNLHIYDNQFDQAQELLKRQPVASQPKLVLNVPDGTNFFDIKPDDFELQNYDPVKPQLHFDLAI

SEQ ID NO: 17896 - DNA, 840 bp, Streptococcus pneumoniae
  CDS (1)..(840): transl_table=11
atgacaaaagcagatacgatttttaaagagaatattgaacgcattctaaaggaaggtgttttctcagagcaggctcgtcctaagtacaaggatgggactgttgctaattccaagtatgtaactggtgccttttccgagtacgacttatctaaaggagaatttcctatcacaaccttgcgtcccattgcaatcaaatccgccatcaaagaagttctctggatttaccaagaccagtcaaatagcttagaagtgcttaatgacaagtacaatgttcactactggaatgactgggaagttggagacacgggaaccattggtgagcgctatggtgccgttgttaagaaacacgacattatcaataagcttctcaaacagttggaaaccaatccttggaaccgccgcaatattatttcgctctgggattaccaagctttcgaagaaacagatgggctgctcccgtgcgcctttcagaccatgtttgatgttcggcgtgttgatggggaaatctatctggatgcgaccttgacccagcgctccaatgatatgctggtggcccaccacatcaacgctatgcagtatgtggctttgcagatgatgattgccaaacattttggctggaaggttgggaagttcttctacttcatcaacaacctccatatctatgataatcaatttgaacaagctcaggaattgctccgtcgggagccgtcaaactgccaaccacgcttggttttaaatgttcctgatgggactaatttctttgatatcaaagcagaagattttgagttggtggattatgaccctgttaagccacagttgaagtttgacctagctatttaa

SEQ ID NO: 17897 - protein, 279 aa, Streptococcus pneumoniae
MTKADTIFKENIERILKEGVFSEQARPKYKDGTVANSKYVTGAFSEYDLSKGEFPITTLRPIAIKSAIKEVLWIYQDQSNSLEVLNDKYNVHYWNDWEVGDTGTIGERYGAVVKKHDIINKLLKQLETNPWNRRNIISLWDYQAFEETDGLLPCAFQTMFDVRRVDGEIYLDATLTQRSNDMLVAHHINAMQYVALQMMIAKHFGWKVGKFFYFINNLHIYDNQFEQAQELLRREPSNCQPRLVLNVPDGTNFFDIKAEDFELVDYDPVKPQLKFDLAI

SEQ ID NO: 17898 - DNA, 861 bp, Streptococcus thermophilus
  CDS (1)..(861): transl_table=11
atgacgaaagcagacactatttttaaagaaaatatcactaaaatcatggaagagggagtttggtcagagcaagcacgtcctaaatacaaggatggcacaacagccaattccaaatacatcacagggtcttttgcagaatatgatttgagcaagggagagtttccaattacgactctgcgtcccattgctatcaaatctgccatcaaagaagtgttctggatctatcaagaccagacaaatagcctagatgtgcttgaagataagtataatgttcattattggaatgactgggaagttgaaggcgtccctgctaataatggggacaagcgttcaatcggtcagcgttatggggcagtcgttaagaagcacgatattattaatcgtttgttagcacagttagaagccaatccttggaatcgccgtaatgtcatttccctttgggattacgaggccttcgaggagacagctggacttcagccttgcgccttccagaccatgtttgatgttcgtcgtgtgggtgaggacgtttatttggatgccactttgacgcagcgctcaaacgatatgttggtggcccatcacattaatgctatgcagtatgtggcacttcagatgatgattgccaagcattttggttggaaaattggtaaattcttttatttcatcaacaacctccatatctatgacaatcaatttgaacaagctgaggaactcctcaagcgtcagccgtctgattgtcaaccacgcttggtcctcaatgttcctgatgaaactaatttctttgatatcaaaccagaagattttgaattggtggactatgatcctgttaaacctcaactcaaatttgacttagcaatttaa

SEQ ID NO: 17899 - protein, 286 aa, Streptococcus thermophilus
MTKADTIFKENITKIMEEGVWSEQARPKYKDGTTANSKYITGSFAEYDLSKGEFPITTLRPIAIKSAIKEVFWIYQDQTNSLDVLEDKYNVHYWNDWEVEGVPANNGDKRSIGQRYGAVVKKHDIINRLLAQLEANPWNRRNVISLWDYEAFEETAGLQPCAFQTMFDVRRVGEDVYLDATLTQRSNDMLVAHHINAMQYVALQMMIAKHFGWKIGKFFYFINNLHIYDNQFEQAEELLKRQPSDCQPRLVLNVPDETNFFDIKPEDFELVDYDPVKPQLKFDLAI

SEQ ID NO: 17900 - DNA, 861 bp, Streptococcus thermophilus
  CDS (1)..(861): transl_table=11
atgacgaaagcagacactatttttaaagaaaatatcactaaaatcatggaagagggagtttggtcagagcaagcacgtcctaaatacaaggatggcacaacagccaattccaaatacatcacagggtcttttgcagaatatgatttgagcaagggagagtttccaattacgactctgcgtcccattgctatcaaatctgccatcaaagaagtgttctggatctatcaagaccagacaaatagcctagatgtgcttgaagataagtataatgttcattattggaatgactgggaagttgaaggcgtccctgctaataatggggacaagcgttcaatcggtcagcgttatggggcagtcgttaagaagcacgatattattaatcgtttgttagcacagttagaagccaatccttggaatcgccgtaatgtcatttccctttgggattacgaggccttcgaggagacagctggacttcagccttgcgccttccagaccatgtttgatgttcgtcgtgtgggtgaggacgtttatttggatggcactttgacgcagcgctcaaacgatatgttggtggcccatcacattaatgctatgcagtatgtggcacttcagatgatgattgccaagcattttggttggaaagttggtaaattcttttatttcatcaacaacctccatatctatgacaatcaatttgaacaagctgaggaactcctcaagcgtcagccgtctgattgtcaaccacgcttggtcctcaatgttcctgatgaaactaatttctttgatatcaaaccagaagattttgaattggtggactatgatcctgttaaacctcaactcaaatttgacttagcaatttaa

SEQ ID NO: 17901 - protein, 286 aa, Streptococcus thermophilus
MTKADTIFKENITKIMEEGVWSEQARPKYKDGTTANSKYITGSFAEYDLSKGEFPITTLRPIAIKSAIKEVFWIYQDQTNSLDVLEDKYNVHYWNDWEVEGVPANNGDKRSIGQRYGAVVKKHDIINRLLAQLEANPWNRRNVISLWDYEAFEETAGLQPCAFQTMFDVRRVGEDVYLDGTLTQRSNDMLVAHHINAMQYVALQMMIAKHFGWKVGKFFYFINNLHIYDNQFEQAEELLKRQPSDCQPRLVLNVPDETNFFDIKPEDFELVDYDPVKPQLKFDLAI

SEQ ID NO: 17902 - DNA, 852 bp, Symbiobacterium thermophilum
  CDS (1)..(852): transl_table=11
ttgaacatcgagatccagtacctggaactctgccgggagatcctggcggagaacgagcaggagatcgccgagggccgctggacgcccaaccggaccggcatggggacggtgggcgtcttcggccgcatgctgaagcacgacttcaaggaagggtttcccgccctgaccaccaagaagctgttcttcaactccgtgaaggccgagttgctctggttcctcgcgggccggaccgacctggagttcctgcacgagcggggatgccacatctgggacaaggacgcggcccgcaacggcgggaagctcgggccgatctacggcaagcagtggcgggcgtgggagggcgcggacggcaggacctacgaccagatcgcctgggtcatccagcagatccgggagatcgccgccgacccggagcggccccatcccaactccaggcggctggtcgtcagcccctggaacgtcgccgacctggaggagatggccctgccgccctgccacgggccgttccagttccacgtgaaggacggcaggctgcacctggccgtgtggcagcgcagcgccgacctgttcctgggagtgcccttcaacatcgccagctactcgctgctgctgcacatggtggcgcaggtgaccgggctggcggtgggcacgtacacgcattacctgaacgacgtgcacatctaccgcaacctcctggaccaggtacggctgcagctcacgcgggagccgtacccgctgcccaggctctggctgaaccccgaggtcagggagatcgaccagttcacgatggacgacatccagctggtggactacaagcaccacccgccgatccgcggggagctgtcgacatga

SEQ ID NO: 17903 - protein, 283 aa, Symbiobacterium thermophilum
MNIEIQYLELCREILAENEQEIAEGRWTPNRTGMGTVGVFGRMLKHDFKEGFPALTTKKLFFNSVKAELLWFLAGRTDLEFLHERGCHIWDKDAARNGGKLGPIYGKQWRAWEGADGRTYDQIAWVIQQIREIAADPERPHPNSRRLVVSPWNVADLEEMALPPCHGPFQFHVKDGRLHLAVWQRSADLFLGVPFNIASYSLLLHMVAQVTGLAVGTYTHYLNDVHIYRNLLDQVRLQLTREPYPLPRLWLNPEVREIDQFTMDDIQLVDYKHHPPIRGELST

SEQ ID NO: 17904 - DNA, 852 bp, Vibrio cholerae
  CDS (1)..(852): transl_table=11
gtgagacagtatttagatctttgtcagcgcatcgtcgatcaaggtgtttgggttgaaaatgaacgaacgggcaagcgttgtttgactgtgattaatgccgatttgacctacgatgtgggcaacaatcagtttcctctagtcactacacgcaagagtttttggaaagccgccgtggccgagttgctcggctatattcgtggttacgataatgcggcggattttcgccaattaggtaccaaaacctgggatgctaatgccaatttaaaccaagcatggctcaacaatccttaccgtaaaggtgaggatgacatgggacgcgtgtatggagttcagggtagagcttgggctaagcctgatggtggtcatattgaccagttgaaaaagattgttgatgatttgagccgtggcgttgatgaccgaggtgaaattcttaacttctacaatccgggtgaatttcacatggggtgtttgcgcccttgcatgtacagccatcatttttcattgctgggtgataccttgtatctcaacagtactcagcgttcatgtgatgtgcccttggggttgaatttcaacatggtgcaggtttatgtgttccttgcgctgatggcacagatcacagggaaaaagccgggcttggcgtatcacaagatcgtcaatgcgcacatttaccaagatcaactcgaattgatgcgcgatgtgcagctaaaacgtgagccattcccagcgcctcagttccatatcaatccaaagattaaaacactgcaggatttggaaacttgggtcactttggatgattttgacgtcaccggatatcagttccacgatcctattcaatacccgttttcagtctaa

SEQ ID NO: 17905 - protein, 283 aa, Vibrio cholerae
MRQYLDLCQRIVDQGVWVENERTGKRCLTVINADLTYDVGNNQFPLVTTRKSFWKAAVAELLGYIRGYDNAADFRQLGTKTWDANANLNQAWLNNPYRKGEDDMGRVYGVQGRAWAKPDGGHIDQLKKIVDDLSRGVDDRGEILNFYNPGEFHMGCLRPCMYSHHFSLLGDTLYLNSTQRSCDVPLGLNFNMVQVYVFLALMAQITGKKPGLAYHKIVNAHIYQDQLELMRDVQLKREPFPAPQFHINPKIKTLQDLETWVTLDDFDVTGYQFHDPIQYPFSV

SEQ ID NO: 17906 - DNA, 852 bp, Vibrio fischeri
  CDS (1)..(852)
atgaagcagtatttagatttatgccaacgcattgtagatgaaggaacttggatcgaaaacgagcgcacaggaaagcgttgtttaacggtgattaatgcggatttaacttatgatgtagaaaatggtgttttccctcttgtgacaacgcgtaaaagcttttggaaagcggcagtagctgaaatgattggttatattcgtggttacgatagcgcagaagacttccgtaaaattggaacaaaaacatgggatgcgaatgctaaccttaacgatgcatggctaaacaaccctcatcgtaaaggtgatgatgacatgggccgagtatatggtgtgcaaggtcgttcatgggcaaaaccaaatggtgagtttgtcgatcaactgaaaaaaatcattgatgatttaagtcagggaattgatgatcgtggtgagattttaaatttttataacccaggtgagtttgatatgggatgtttgcgtccgtgtatgtactcacaccatttttcattacttggtgatacgttatatttaaacagtacgcaacgttcatgtgatgttccgctagggcttaatttcaatatggttcaagtgtatttcttattagcgatagtggcacaaattacagggcataaagcaggtaaggcgtaccataagattgtaaatgcacatatttatgaagaccaacttgaactaatgcaaagtgtgcagctaaagcgtgaaccgttacaagccccaatctttaaaataaaccctgaaattaagtcactagaagatttagaaacatgggtaactatggatgactttgaagtgattggctatgaaagccacgaagcaattaagtatcctttttctgtttaa

SEQ ID NO: 17907 - protein, 283 aa, Vibrio fischeri
MKQYLDLCQRIVDEGTWIENERTGKRCLTVINADLTYDVENGVFPLVTTRKSFWKAAVAEMIGYIRGYDSAEDFRKIGTKTWDANANLNDAWLNNPHRKGDDDMGRVYGVQGRSWAKPNGEFVDQLKKIIDDLSQGIDDRGEILNFYNPGEFDMGCLRPCMYSHHFSLLGDTLYLNSTQRSCDVPLGLNFNMVQVYFLLAIVAQITGHKAGKAYHKIVNAHIYEDQLELMQSVQLKREPLQAPIFKINPEIKSLEDLETWVTMDDFEVIGYESHEAIKYPFSV

SEQ ID NO: 17908 - DNA, 852 bp, Vibrio parahaemolyticus
  CDS (1)..(852): transl_table=11
gtgaaacagtatttagatttgtgtcaacgcatcgttgatcaaggtgtttgggttgaaaatgaacgtacaggtaagcgttgcctgacggtaatcaacgcggatttaacctacgatgttgcgaacaatcaattcccattggtaacgacgcgtaaaagtttttggaaagcagcagtggctgagctacttggctacattcgtggttatgataatgctgaagatttccgtaaattaggcaccaaaacgtgggatgcgaacgccaacctaaacgacgcttggttgaataacccataccgtaagggtgaagacgacatgggccgtgtgtacggcgttcaaggtcgtgcatgggcaaagcctgatggtggtcatatcgaccagctacgcaagattgtggatgatttgactcgcggtgttgatgaccgtggtgaaatcttgaacttctacaaccctggtgagttccatatggggtgcttgcgaccttgtatgtacagtcatcatttctcactactggatgacactttgtatctcaacagtacacagcgttcgtgcgatgtgccgcttggattgaacttcaacatggttcaagtttatgtgttcttagcgatcatggcgcaaattacgggcaagaagccaggccaggcattccataaaatcgttaacgcgcacatttatgaagatcagcttgagttgatgcgtgatgttcagttgaagcgtgaaccgttacaagccccaacattccatatcaatccggagattaaatctctagaagatttggaaacttgggtgacactggatgacttttgggtagaagggtacgaacaccacgatccaattcgttatccattctcagtgtaa

SEQ ID NO: 17909 - protein, 283 aa, Vibrio parahaemolyticus
MKQYLDLCQRIVDQGVWVENERTGKRCLTVINADLTYDVANNQFPLVTTRKSFWKAAVAELLGYIRGYDNAEDFRKLGTKTWDANANLNDAWLNNPYRKGEDDMGRVYGVQGRAWAKPDGGHIDQLRKIVDDLTRGVDDRGEILNFYNPGEFHMGCLRPCMYSHHFSLLDDTLYLNSTQRSCDVPLGLNFNMVQVYVFLAIMAQITGKKPGQAFHKIVNAHIYEDQLELMRDVQLKREPLQAPTFHINPEIKSLEDLETWVTLDDFWVEGYEHHDPIRYPFSV

SEQ ID NO: 17910 - DNA, 852 bp, Vibrio vulnificus
  CDS (1)..(852): transl_table=11
gtgaaacaatatttagaattgtgccgtcgcatcgttgatgaagggcactgggttgaaaatgaacgtaccggtaagcgctgccttactgtgatcaacgcggatttaacctacgatgttgccaacaatcagtttcctttggttaccacgcgtaagagtttctggaaggcggcggttgcagagttgcttggctacattcgaggttatgacaatgcggaagattttcgcaagttaggtacgaaaacctgggatgcgaacgccaatctcaatgatgcttggttgaataacccatatcgcaaaggcgaagatgacatgggccgtgtctacggcgtacaaggtcgagcttgggcgaagcctgatggtggtcatatcgaccaattgcgtaaaattgtcgatgacctgacgcgcggagtagacgatcgcggggagatcctcaatttctacaacccaggtgaatttcatatgggttgtttgcgcccttgtatgtacagtcatcacttctcattgctgggtgatacgttatacctcaatagcacacaacgttcgtgtgacgtgccactggggctgaatttcaacatggtccaggtgtatgtgttcttggcgatcatggcacagattacgggcaagaaaccgggccaagcattccataagattgttaatgcacatatctatgaagatcagttagcactgatgcgtgatgtgcaactcaagcgagaaccgttacaagcgccaacgttccacatcaaccctgagatcaaatctttggaagatctggaaacttgggtcactttggatgatttctgggtagaagggtatgaacatcatgacccaatccagtacccattctcggtataa

SEQ ID NO: 17911 - protein, 283 aa, Vibrio vulnificus
MKQYLELCRRIVDEGHWVENERTGKRCLTVINADLTYDVANNQFPLVTTRKSFWKAAVAELLGYIRGYDNAEDFRKLGTKTWDANANLNDAWLNNPYRKGEDDMGRVYGVQGRAWAKPDGGHIDQLRKIVDDLTRGVDDRGEILNFYNPGEFHMGCLRPCMYSHHFSLLGDTLYLNSTQRSCDVPLGLNFNMVQVYVFLAIMAQITGKKPGQAFHKIVNAHIYEDQLALMRDVQLKREPLQAPTFHINPEIKSLEDLETWVTLDDFWVEGYEHHDPIQYPFSV

SEQ ID NO: 17912 - DNA, 852 bp, Vibrio vulnificus
  CDS (1)..(852): transl_table=11
gtgaaacaatatttagaattgtgccgtcgcatcgttgatgaagggcactgggttgaaaatgaacgtaccggtaagcgctgccttactgtgatcaacgcggatttaacctacgatgttgccaacaatcagtttcctttggttaccacgcgtaagagtttctggaaggcggcggttgcagagttgcttggctacattcgaggctatgacaatgcggaagattttcgcaagttaggtacgaaaacctgggatgcgaacgccaatctcaatgatgcttggttgaataacccatatcgcaaaggcgatgatgacatgggccgtgtctacggcgtacaaggtcgagcttgggcgaagcctgatggtggtcatatcgaccaattgcgtaaaattgtcgatgacctgacgcgcggagtagacgatcgcggggagatcctcaatttctacaacccaggtgaatttcatatgggctgtttacgcccttgtatgtacagtcatcacttctcattgctgggtgatacgttatacctcaatagcacacaacgttcgtgtgacgtaccgctggggctgaatttcaacatggtccaggtgtatgtgttcttggcgatcatggcacagattacgggcaagaaaccgggccaagcattccataagattgttaatgcacatatctatgaagatcagttagcactgatgcgtgatgtgcaactcaagcgagaaccgttacaagcgccaacgttccacatcaaccctgagatcaaatctttggaagatctggaaacttgggtcactttggatgatttctgggtagaagggtatgaacatcatgacccaatccagtacccattctcggtataa

SEQ ID NO: 17913 - protein, 283 aa, Vibrio vulnificus
MKQYLELCRRIVDEGHWVENERTGKRCLTVINADLTYDVANNQFPLVTTRKSFWKAAVAELLGYIRGYDNAEDFRKLGTKTWDANANLNDAWLNNPYRKGDDDMGRVYGVQGRAWAKPDGGHIDQLRKIVDDLTRGVDDRGEILNFYNPGEFHMGCLRPCMYSHHFSLLGDTLYLNSTQRSCDVPLGLNFNMVQVYVFLAIMAQITGKKPGQAFHKIVNAHIYEDQLALMRDVQLKREPLQAPTFHINPEIKSLEDLETWVTLDDFWVEGYEHHDPIQYPFSV

SEQ ID NO: 17914 - DNA, 906 bp, Varicella
  CDS (1)..(906)
atgggagacttgtcatgttggacaaaggtgccgggttttacgttaaccggcgaacttcagtacttaaaacaagtggatgatattttaaggtatggagttcggaaacgcgatcgaacaggaatcggaacgttatctttatttggaatgcaagctcgatacaatttgcgaaatgaatttcctcttttaactacaaagcgtgttttttggagggccgtcgtggaagagttgttatggtttatccgcgggtcaaccgattccaaagaactcgccgctaaagatatacacatatgggatatatacggatcgagcaaatttctaaataggaatggcttccataaaagacacacgggggaccttggccccatttacggcttccagtggagacattttggagcggaatataaagactgtcaatcaaactatttacagcaaggaatcgatcagctgcaaactgttatagatacaattaaaacaaacccagaaagccgacgaatgattatatcgtcttggaatccaaaggatatccccttaatggtactacctccatgtcacacgttatgtcagttttacgttgcaaacggtgaattatcctgccaagtataccagagatcgggggatatgggccttggggtaccgttcaacattgctggatatgcacttcttacctacatagtagcgcatgttacaggacttaaaaccggagatttaattcatacaatgggggatgcacatatttacttgaatcatatagatgctttaaaagtgcagctagctcgatccccaaaaccttttccttgccttaaaattattcgaaatgtaacagatataaacgactttaaatgggacgattttcagcttgatggatataatccacacccccccctaaaaatggaaatggctctttaa

SEQ ID NO: 17915 - protein, 301 aa, Varicella
MGDLSCWTKVPGFTLTGELQYLKQVDDILRYGVRKRDRTGIGTLSLFGMQARYNLRNEFPLLTTKRVFWRAVVEELLWFIRGSTDSKELAAKDIHIWDIYGSSKFLNRNGFHKRHTGDLGPIYGFQWRHFGAEYKDCQSNYLQQGIDQLQTVIDTIKTNPESRRMIISSWNPKDIPLMVLPPCHTLCQFYVANGELSCQVYQRSGDMGLGVPFNIAGYALLTYIVAHVTGLKTGDLIHTMGDAHIYLNHIDALKVQLARSPKPFPCLKIIRNVTDINDFKWDDFQLDGYNPHPPLKMEMAL

SEQ ID NO: 17916 - DNA, 795 bp, Wigglesworthia glossinidia brevipalpis
  CDS (1)..(795): transl_table=11
atgaaagaatatttagatttgttaaatttgattttaaaaaatggatatccaaaaatagatagaacaaaaactggaactttatctatgtttggatatcaaataagaattaatttaaatgaaggatttccgttattaacaacaaaatattgtcattttaaatcaatagtatatgaattgctttggtttttaagaggggacacaaatatatcatttttaaaaaaaaataatatttctatttggaataaatgggcagataaaaatggaaacctaggtccaatatatggaaaacaatggcgtgcttgggaagataaaaaaaataacactattgatcaaattgaaatagctttaaataaattaaaaaaagaaccttcttctagaagaatactagtttcttcatggaatgttggagagttagatttgatgtccatacctccatgtcacgttttatttcaactatatgtaataaataataaattgtcttgtcaagtatatcaaagatcttgcgatatttttttaggattaccttttaacataggaagttatgctttgttgactcatatttttgctaatcaatgcgatttgctagttgaagatttaatatggacaggaggagacattcatttatacaaaaatcatttaaatcaagcaaaattacaattaacaagatcccctttaccattaccaaaaatttttattaaaaaaaaacctaaaaatttatttaattatgcatttaatgattttttacttattgattataatcatcatccaaaaataaaagctccaatatcaatttaa

SEQ ID NO: 17917 - protein, 264 aa, Wigglesworthia glossinidia brevipalpis
MKEYLDLLNLILKNGYPKIDRTKTGTLSMFGYQIRINLNEGFPLLTTKYCHFKSIVYELLWFLRGDTNISFLKKNNISIWNKWADKNGNLGPIYGKQWRAWEDKKNNTIDQIEIALNKLKKEPSSRRILVSSWNVGELDLMSIPPCHVLFQLYVINNKLSCQVYQRSCDIFLGLPFNIGSYALLTHIFANQCDLLVEDLIWTGGDIHLYKNHLNQAKLQLTRSPLPLPKIFIKKKPKNLFNYAFNDFLLIDYNHHPKIKAPISI

SEQ ID NO: 17918 - DNA, 795 bp, Xanthomonas axonopodis
  CDS (1)..(795): transl_table=11
gtgaagccgtacctggagttgttgcagcacgtgctggaccacggcgcagagaagtccgaccgcaccggtaccggcacgcgcagcgtgttcggctggcagatgcgcttcgatctcaacgacggctttccgttggtgaccaccaagaagctgcacctgcgctcgatcatccatgagttgctgtggttcctgaagggcgacaccaatatcggctacctcagcgaccaccaggtgcgcatctgggacgaatgggccgacgacaacggcgatctcggtccggtgtacggcaagcagtggcggcgctggaccggcccggacggtgtcgagatcgaccagatgcagtggctggtggatgagatcaagcgcaatccggattcgcgtcgtctggtgatcagcgcctggaatgtcggcgagctgccgcagatggcgctgatgccttgccacagcctgttccagttctacgtggtgaacggcaagctcagttgccagctctatcagcgcagcggcgatatctttctgggcgtgccgttcaatatcgccagctatgcgctgctgacgcacatggtggcccaggccaccggcctgggcgttggcgatttcgtgcacacgctgggcgatgcgcacctgtattccaatcacttcgagcaggcacgcgagcagctgacgcgcacaccgcgtgcgctgcccagcttgcgtctgaatcccgaggtcaccgacctgttcgcgttccgcttcgaagacatcgccatcgaaggctacgacccgcatccggcaatcaaggccccggtggcggtgtga

SEQ ID NO: 17919 - protein, 264 aa, Xanthomonas axonopodis
MKPYLELLQHVLDHGAEKSDRTGTGTRSVFGWQMRFDLNDGFPLVTTKKLHLRSIIHELLWFLKGDTNIGYLSDHQVRIWDEWADDNGDLGPVYGKQWRRWTGPDGVEIDQMQWLVDEIKRNPDSRRLVISAWNVGELPQMALMPCHSLFQFYVVNGKLSCQLYQRSGDIFLGVPFNIASYALLTHMVAQATGLGVGDFVHTLGDAHLYSNHFEQAREQLTRTPRALPSLRLNPEVTDLFAFRFEDIAIEGYDPHPAIKAPVAV

SEQ ID NO: 17920 - DNA, 795 bp, Xanthomonas campestris
  CDS (1)..(795): transl_table=11
gtgaagccgtacctggagttgctgcagcacgtgctcgagtacggcgccgagaagtccgatcgcaccggcaccggcacgcgcagcgtgttcggctggcagatgcgcttcgacctcaatgccgggtttccgctggtcaccaccaagaagctgcacctgcgctcgatcatccatgagctgctgtggttcctgcagggcgataccaacatcgcgtacctgaaagacaaccaggtccgcatctgggacgagtgggccgatgccaacggcgacctcggcccggtctacggcaagcagtggcgacgctggaccggtccggacggcgtcgagatcgatcagatgcagtggctggtggacgagatcaagcgcaacccggactcgcgccggctggtgatcagtgcctggaatgtcggcgagttgccgcaaatggccttgatgccctgccatagcctgttccagttctacgtggtggacggcaagctcagctgccagctctaccagcgcagcggcgacatcttcctgggggtgccgttcaacatcgccagctatgcgttgctgacccacatggtggcgcaggccaccggcctgggcgtgggcgacttcgtacacacactgggcgatgcgcacctgtattcaaaccatttcgaacaagcccgcgagcagctcacgcgcacgccgcgtccgctgccaaccttgcgcctgaacccggatgtcaccgacctgttcgcgttccgtttcgaggacatcgcgatcgacggctacgacccgcatccggcgatcaaggcgccggtggcggtgtga

SEQ ID NO: 17921 - protein, 264 aa, Xanthomonas campestris
MKPYLELLQHVLEYGAEKSDRTGTGTRSVFGWQMRFDLNAGFPLVTTKKLHLRSIIHELLWFLQGDTNIAYLKDNQVRIWDEWADANGDLGPVYGKQWRRWTGPDGVEIDQMQWLVDEIKRNPDSRRLVISAWNVGELPQMALMPCHSLFQFYVVDGKLSCQLYQRSGDIFLGVPFNIASYALLTHMVAQATGLGVGDFVHTLGDAHLYSNHFEQAREQLTRTPRPLPTLRLNPDVTDLFAFRFEDIAIDGYDPHPAIKAPVAV

SEQ ID NO: 17922 - DNA, 795 bp, Xanthomonas oryzae
  CDS (1)..(795): transl_table=11
gtgaagccgtatcttgatctgctgcagcatgtgctggaacacggtgcggagaagtccgaccgtaccggcaccggcacgcgcagcgtgttcggctggcagatgcgcttcgatctcaacgacggctttccgttggtgactaccaagaagctgcatctgcgctcgatcatccacgagttgctgtggttcctgcagggcgacaccaatatcggctatctgagcgacaaccaggtgcgcatctgggacgagtgggccgacgacaacggcgatctcggtccggtctatggcaagcagtggcggcgctggaccggcccggatggtgtcgagatcgaccagatgcaatggctggtggacgagatcaagcgcaacccggattcgcgccggctggtgatcagcgcctggaatgtcggcgagctgccgcagatggcgctgatgccgtgccacagcctgttccagttctacgtggtgaacggcaagctcagttgccagctctaccagcgcagcggcgacatctttctgggcgtgccgttcaatatcgccagctacgcgttgctcacgcacatggtggcgcaggccaccggcctgggcgtgggcgatttcgtgcatacgttgggcgatgcgcacctgtattcgaatcacttcgatcaagcgcgtaagcaactgacgcgtacaccgcgcgcgctgcccaccctgcgcttgaatcccgaggtcaccgacctgttcgcgttccgcttcgaagacatcgccatcgaaggttacgatccgcatccggcgatcaaggcgccggtggcggtctga

SEQ ID NO: 17923 - protein, 264 aa, Xanthomonas oryzae
MKPYLDLLQHVLEHGAEKSDRTGTGTRSVFGWQMRFDLNDGFPLVTTKKLHLRSIIHELLWFLQGDTNIGYLSDNQVRIWDEWADDNGDLGPVYGKQWRRWTGPDGVEIDQMQWLVDEIKRNPDSRRLVISAWNVGELPQMALMPCHSLFQFYVVNGKLSCQLYQRSGDIFLGVPFNIASYALLTHMVAQATGLGVGDFVHTLGDAHLYSNHFDQARKQLTRTPRALPTLRLNPEVTDLFAFRFEDIAIEGYDPHPAIKAPVAV

SEQ ID NO: 17924 - DNA, 795 bp, Xenorhabdus nematophilus
  CDS (1)..(795): transl_table=11
atgaaacagtatctcgatttaatgaaaaaagtgctggaagaaggcacggcaaaagatgaccgtacgggaacgggaacacgctctatttttggtcatcagatgcgtttcaatttgcaggaaggttttccattagtcacaaccaagcgttgtcatcttcgctccatcatccatgaactgctttggttcctgaatggtgataccaatatcaagtacttgcatgataatggcgtgagcatctgggatgagtgggctgatgaaaacggggatttgggaccggtttatggtaagcaatggcgcgcctggggttcagcggatggtcgtcacatcgatcagttgacccaggttcttgagcagttgaaaggtgaccctgattcacgccggattattgtttctgcatggaatgtgggggaattggataaaatggcgctggcaccatgccatgcttttttccagttctatgtcgcagacggcaaactttcctgccaactttaccaacgttcctgtgatgtgtttttaggcttaccattcaatattgcaagttatgccttattggtacatatgatggctcaacagtgcaatcttgatgtaggcgattttgtctggacagggggcgacacccatctttacaacaatcacttggaacagacccatcttcagttgagccgtgagccgcgcgcattacccaaattggtgattaaacgcaagccggattctctgtttgactaccgttttgaagactttgagattgtggattacgatccatatccgggtattaaagctccagttgcaatttaa

SEQ ID NO: 17925 - protein, 264 aa, Xenorhabdus nematophilus
MKQYLDLMKKVLEEGTAKDDRTGTGTRSIFGHQMRFNLQEGFPLVTTKRCHLRSIIHELLWFLNGDTNIKYLHDNGVSIWDEWADENGDLGPVYGKQWRAWGSADGRHIDQLTQVLEQLKGDPDSRRIIVSAWNVGELDKMALAPCHAFFQFYVADGKLSCQLYQRSCDVFLGLPFNIASYALLVHMMAQQCNLDVGDFVWTGGDTHLYNNHLEQTHLQLSREPRALPKLVIKRKPDSLFDYRFEDFEIVDYDPYPGIKAPVAI

SEQ ID NO: 17926 - DNA, 795 bp, Xylella fastidiosa
  CDS (1)..(795): transl_table=11
gtgaagcagtaccttgaattactgaatgatgtgcttgtgcatggcatacaaaagcctgaccgcactggcacggggacacgcagtgtgttcggttggcagatgcgatttgacttgagccaaggttttccactcgttacgactaaaaagctgcatttgcgttcgatcattcacgagttgctatggtttctcaggggggaaaccaatattgcttatcttaagaagcatcaggtacacatctgggacgagtgggccgatgctacgggtgagttgggacctgtttacggcaagcaatggcgccgttgggctggcgcggatggtcacgagatcgaccagatccgttggttgctggaggagatcaagcgtaatccagattcgcgccgcttggtgattagtgcttggaatgtggctgatcttccacagatggctttggtgccgtgccatgcactatttcaattctatgttgccaatggcaaattgagttgccagctctatcaacgtagcgctgatatttttcttggtgtccctttcaatatcgctagttatgcactgctcacccatatgttggctcaggtgactgggctagcggtcggtgattttgtgcatacgttgggtgatgcgcatttgtatgcgaatcatgtcgagcaagcatccgtgcaactggagcgtgtgccgcgaccgcaacctgtattaatgcttaatccggcagtgactgacttgtttgactttacctacgatgacatcgtgattgaaggttacgatccatatccggctatcaaggcaccggtggctgtgtga

SEQ ID NO: 17927 - protein, 264 aa, Xylella fastidiosa
MKQYLELLNDVLVHGIQKPDRTGTGTRSVFGWQMRFDLSQGFPLVTTKKLHLRSIIHELLWFLRGETNIAYLKKHQVHIWDEWADATGELGPVYGKQWRRWAGADGHEIDQIRWLLEEIKRNPDSRRLVISAWNVADLPQMALVPCHALFQFYVANGKLSCQLYQRSADIFLGVPFNIASYALLTHMLAQVTGLAVGDFVHTLGDAHLYANHVEQASVQLERVPRPQPVLMLNPAVTDLFDFTYDDIVIEGYDPYPAIKAPVAV

SEQ ID NO: 17928 - DNA, 795 bp, Xylella fastidiosa
  CDS (1)..(795): transl_table=11
gtgaagcagtaccttgaattactgaatgatgtgcttgtgcatggcataaaaaagcctgaccgcactggcacggggacacgcagtgtgttcggttggcagatgcgatttgacttgagccaaggttttccactcgttacgactaaaaagctgcatttgcgttcgatcattcacgagttgctatggtttctcaggggggaaaccaatattgcttatcttaagaagcatcaggtacacatctgggacgagtgggccgatgccacgggtgagttgggacctgtttacggcaagcaatggcgccgttgggctggtgcggatggtcacgagatcgaccagatccgttggttggtggaggagatcaagcgtaatccagattcgcgccgcttggtgattagtgcttggaatgtggctgatcttccacagatggctttggtgccgtgccatgcactgtttcaattctatgttgccaatggcaaattgagctgtcagctctatcaacgtagcgctgatatttttcttggcgtccctttcaatatcgctagttatgcactgctcacccatatgttggctcaggtgactgggctcgtggtcggtgattttgtgcatacgttgggtgatgcacatttgtatgctaatcatgtcgagcaagcatccgtgcaactggggcgtgtgccgcgaccgcaaccggtattaaggcttaatcaggcagtgactgacttgttcgactttacctacgatgacattgtgattgaaggttacgatccatatccggctatcaaggcaccggtggctgtgtga

SEQ ID NO: 17929 - protein, 264 aa, Xylella fastidiosa
MKQYLELLNDVLVHGIKKPDRTGTGTRSVFGWQMRFDLSQGFPLVTTKKLHLRSIIHELLWFLRGETNIAYLKKHQVHIWDEWADATGELGPVYGKQWRRWAGADGHEIDQIRWLVEEIKRNPDSRRLVISAWNVADLPQMALVPCHALFQFYVANGKLSCQLYQRSADIFLGVPFNIASYALLTHMLAQVTGLVVGDFVHTLGDAHLYANHVEQASVQLGRVPRPQPVLRLNQAVTDLFDFTYDDIVIEGYDPYPAIKAPVAV

SEQ ID NO: 17930 - DNA, 915 bp, Saccharomyces cerevisiae
  CDS (1)..(915)
atgactatggacggaaaaaacaaagaagaagagcaatatcttgatctatgcaaaagaatcattgatgaaggtgaatttaggccagatagaacaggcactggtacgttgagtctttttgcaccaccccagctgcgttttagtttacgtgatgataccttcccactactaacgaccaagaaggtttttactagaggtatcatacttgaactattgtggtttttggccggtgatacagacgctaacctattgtctgagcaaggtgttaagatttgggacggtaatggatctcgtgaatatttagataagatggggttcaaagataggaaagtaggagatctggggcccgtttacggatttcaatggaggcattttggtgctaaatacaagacgtgcgatgacgactatactggacaaggtattgatcaattgaaacaggttatacataaactaaagacaaatccctacgatagaagaatcattatgagtgcctggaacccagctgattttgacaaaatggctttgccgccatgccatattttttcacagttctatgtcagtttccccaaagaaggagaaggatccggtaagccccgcctttcatgcttattgtaccaacgttcttgtgatatggggttgggagtaccatttaacattgcatcatatgctttgttgactagaatgattgctaaagttgtcgacatggagccaggtgagttcattcatactttgggggatgcacatgtttataaagaccacattgatgccttgaaagaacaaatcaccagaaatccaagaccattcccgaaactaaagattaaaagggacgttaaagacattgatgatttcaagttgacagactttgaaattgaagattataatcctcatccaagaattcaaatgaaaatgagtgtataa

SEQ ID NO: 17931 - protein, 304 aa, Saccharomyces cerevisiae
MTMDGKNKEEEQYLDLCKRIIDEGEFRPDRTGTGTLSLFAPPQLRFSLRDDTFPLLTTKKVFTRGIILELLWFLAGDTDANLLSEQGVKIWDGNGSREYLDKMGFKDRKVGDLGPVYGFQWRHFGAKYKTCDDDYTGQGIDQLKQVIHKLKTNPYDRRIIMSAWNPADFDKMALPPCHIFSQFYVSFPKEGEGSGKPRLSCLLYQRSCDMGLGVPFNIASYALLTRMIAKVVDMEPGEFIHTLGDAHVYKDHIDALKEQITRNPRPFPKLKIKRDVKDIDDFKLTDFEIEDYNPHPRIQMKMSV

SEQ ID NO: 17932 - DNA, 795 bp, Yersinia pestis
  CDS (1)..(795): transl_table=11
atgaaacagtatctggatttgatgaaaaaagtgctggaagaaggcacacctaaagctgaccgtaccggtaccggcactctgtcaatttttgggcatcagatgcgtttcaatttacaagacggtttcccattggtcaccaccaagcgttgccacctacgttcgattatccatgagttgttatggttcctgaatggcgataccaacattgcttatctgaaggaaaataatgtctcaatctgggatgaatgggcagatgaaaacggcgatcttggtccgatttatggtaaacaatggcgtgcttggggggctgctgatggccgaaaaattgaccagttgagtaacgtagtcaatcaactgaagcaggaccctgattcgcgccggattattgtttctgcgtggaatgtgggcgaactggatcaaatggcgttggcaccatgccatgcctttttccagttctacgtggctgatggcaaactttcttgccaactgtaccaacgctcttgcgatgtgttccttggcttgccatttaacattgccagctatgcgttattagttcacatgatggcgcagcagtgtgatctggccgtaggcgattttgtctggactggcggggatactcacttgtatagcaaccatattgaccaggcgcatctgcaattgagccgtgagccacgagtattaccgaaactggtgatcaaacgtaaacctgattcattgtttgactaccatttcgatgattttgatattgagggctacgatcctcaccctggtattaaagcccctatcgcgatttaa

SEQ ID NO: 17933 - protein, 264 aa, Yersinia pestis
MKQYLDLMKKVLEEGTPKADRTGTGTLSIFGHQMRFNLQDGFPLVTTKRCHLRSIIHELLWFLNGDTNIAYLKENNVSIWDEWADENGDLGPIYGKQWRAWGAADGRKIDQLSNVVNQLKQDPDSRRIIVSAWNVGELDQMALAPCHAFFQFYVADGKLSCQLYQRSCDVFLGLPFNIASYALLVHMMAQQCDLAVGDFVWTGGDTHLYSNHIDQAHLQLSREPRVLPKLVIKRKPDSLFDYHFDDFDIEGYDPHPGIKAPIAI

SEQ ID NO: 17934 - DNA, 795 bp, Yersinia pseudotuberculosis
  CDS (1)..(795): transl_table=11
atgaaacagtatctggatttgatgaaaaaagtgctggaagaaggcacacctaaagctgaccgtaccggtaccggcactctgtcaatttttgggcatcagatgcgtttcaatttacaagacggtttcccattggtcaccaccaagcgttgccacctacgttcgattatccatgagttgttatggttcctgaatggcgataccaacattgcttatctgaaggaaaataatgtctcaatctgggatgaatgggcagatgaaaacggcgatcttggtccgatttatggtaaacaatggcgtgcttggggggctgctgatggccgaaaaattgaccagttgagtaacgtagtcaatcaactgaagcaggaccctgattcgcgccggattattgtttctgcgtggaatgtgggcgaactggatcaaatggcgttggcaccatgccatgcctttttccagttctacgtggctgatggcaaactttcttgccaactgtaccaacgctcttgcgatgtgttccttggcttgccatttaacattgccagctatgcgttattagttcacatgatggcgcagcagtgtgatctggccgtaggcgattttgtctggactggcggggatactcacttgtatagcaaccatattgaccagacgcatctgcaattgagccgtgagccacgagcattaccgaaactggtgatcaaacgtaaacctgattcattgtttgactaccatttcgatgattttgatattgagggctacgatcctcaccctggtattaaagcccctatcgcgatttaa

SEQ ID NO: 17935 - protein, 264 aa, Yersinia pseudotuberculosis
MKQYLDLMKKVLEEGTPKADRTGTGTLSIFGHQMRFNLQDGFPLVTTKRCHLRSIIHELLWFLNGDTNIAYLKENNVSIWDEWADENGDLGPIYGKQWRAWGAADGRKIDQLSNVVNQLKQDPDSRRIIVSAWNVGELDQMALAPCHAFFQFYVADGKLSCQLYQRSCDVFLGLPFNIASYALLVHMMAQQCDLAVGDFVWTGGDTHLYSNHIDQTHLQLSREPRALPKLVIKRKPDSLFDYHFDDFDIEGYDPHPGIKAPIAI

SEQ ID NO: 17936 - DNA, 24 bp, Artificial sequence
  Primer sequence
atgaaacagtatttagaactgatg

SEQ ID NO: 17937 - DNA, 23 bp, Artificial sequence
  Primer sequence
ttagatagccaccggcgctttaa

SEQ ID NO: 17938 - protein, 579 aa, Artificial sequence
  Consensus
  Variant (2)..(4): Xaa in position 2 to 4 is any amino acid
  Variant (6)..(7): Xaa in position 6 to 7 is any amino acid
  Variant (10)..(11): Xaa in position 10 to 11 is any amino acid
  Variant (13)..(17): Xaa in position 13 to 17 is any amino acid
  Variant (19)..(26): Xaa in position 19 to 26 is any or no amino acid
  Variant (29)..(29): Xaa in position 29 is any or no amino acid
  Variant (31)..(32): Xaa in position 31 to 32 is any amino acid
  Variant (34)..(34): Xaa in position 34 is any amino acid
  Variant (37)..(37): Xaa in position 37 is any amino acid
  Variant (38)..(41): Xaa in position 38 to 41 is any or no amino acid
  Variant (44)..(44): Xaa in position 44 is any or no amino acid
  Variant (46)..(141): Xaa in position 46 to 141 is any or no amino acid
  Variant (151)..(151): Xaa in position 151 is any amino acid
  Variant (152)..(155): Xaa in position 152 to 155 is any or no amino acid
  Variant (157)..(158): Xaa in position 157 to 158 is any or no amino acid
  Variant (160)..(160): Xaa in position 160 is any or no amino acid
  Variant (167)..(167): Xaa in position 167 is any amino acid
  Variant (169)..(169): Xaa in position 169 is any amino acid
  Variant (171)..(171): Xaa in position 171 is any amino acid
  Variant (172)..(175): Xaa in position 172 to 175 is any or no amino acid
  Variant (177)..(182): Xaa in position 177 to 182 is any amino acid
  Variant (185)..(188): Xaa in position 185 to 188 is any amino acid
  Variant (189)..(243): Xaa in position 189 to 243 is any or no amino acid
  Variant (246)..(246): Xaa in position 246 is any amino acid
  Variant (250)..(250): Xaa in position 250 is any amino acid
  Variant (254)..(254): Xaa in position 254 is any amino acid
  Variant (256)..(257): Xaa in position 256 to 257 is any amino acid
  Variant (258)..(296): Xaa in position 258 to 296 is any or no amino acid
  Variant (301)..(302): Xaa in position 301 to 302 is any or no amino acid
  Variant (305)..(306): Xaa in position 305 to 306 is any amino acid
  Variant (308)..(318): Xaa in position 308 to 318 is any or no amino acid
  Variant (320)..(321): Xaa in position 320 to 321 is any or no amino acid
  Variant (324)..(324): Xaa in position 324 is any or no amino acid
  Variant (327)..(328): Xaa in position 327 to 328 is any or no amino acid
  Variant (331)..(331): Xaa in position 331 is any amino acid
  Variant (332)..(333): Xaa in position 332 to 333 is any or no amino acid
  Variant (335)..(335): Xaa in position 335 is any amino acid
  Variant (336)..(349): Xaa in position 336 to 349 is any or no amino acid
  Variant (351)..(351): Xaa in position 351 is any amino acid
  Variant (353)..(353): Xaa in position 353 is any amino acid
  Variant (357)..(359): Xaa in position 357 to 359 is any amino acid
  Variant (362)..(362): Xaa in position 362 is any amino acid
  Variant (364)..(367): Xaa in position 364 to 367 is any amino acid
  Variant (368)..(418): Xaa in position 368 to 418 is any or no amino acid
  Variant (420)..(422): Xaa in position 420 to 422 is any amino acid
  Variant (428)..(428): Xaa in position 428 is any amino acid
  Variant (431)..(431): Xaa in position 431 is any amino acid
  Variant (439)..(440): Xaa in position 439 to 440 is any amino acid
  Variant (445)..(446): Xaa in position 445 to 446 is any amino acid
  Variant (450)..(456): Xaa in position 450 to 456 is any amino acid
  Variant (457)..(463): Xaa in position 457 to 463 is any or no amino acid
  Variant (465)..(470): Xaa in position 465 to 470 is any amino acid
  Variant (472)..(473): Xaa in position 472 to 473 is any amino acid
  Variant (477)..(478): Xaa in position 477 to 478 is any amino acid
  Variant (480)..(485): Xaa in position 480 to 485 is any amino acid
  Variant (486)..(521): Xaa in position 486 to 521 is any or no amino acid
  Variant (524)..(524): Xaa in position 524 is any amino acid
  Variant (526)..(526): Xaa in position 526 is any amino acid
  Variant (528)..(530): Xaa in position 528 to 530 is any amino acid
  Variant (532)..(532): Xaa in position 532 is any amino acid
  Variant (534)..(534): Xaa in position 534 is any amino acid
  Variant (536)..(539): Xaa in position 536 to 539 is any amino acid
  Variant (540)..(553): Xaa in position 540 to 553 is any or no amino acid
  Variant (555)..(560): Xaa in position 555 to 560 is any amino acid
  Variant (562)..(563): Xaa in position 562 to 563 is any amino acid
  Variant (565)..(566): Xaa in position 565 to 566 is any amino acid
  Variant (568)..(572): Xaa in position 568 to 572 is any amino acid
  Variant (574)..(576): Xaa in position 574 to 576 is any amino acid
YXXXLXXILXXGXXXXXRXXXXXXXXTGXGXXSXFGXXXXXRFXLXXXXXXXXXXXXXXXXXXXXXXXXXXXXXXXXXXXXXXXXXXXXXXXXXXXXXXXXXXXXXXXXXXXXXXXXXXXXXXXXXXXXXXXXXXXXXXXXFPLLTTKKVXXXXXKXXIXELLWFLXGXTXXXXXLXXXXXXIWXXXXXXXXXXXXXXXXXXXXXXXXXXXXXXXXXXXXXXXXXXXXXXXXXXXXXXXXXXXLGXVYGXQWRXWXXXXXXXXXXXXXXXXXXXXXXXXXXXXXXXXXXXXXXXXXIDQLXXVIXXIXXXXXXXXXXXPXXRRXIVXXWNXXXLXXXXXXXXXXXXXXXMXLXPCHXXXQFXVXXXXXXXXXXXXXXXXXXXXXXXXXXXXXXXXXXXXXXXXXXXXXXXXXXXXXXXLXXXLYQRSXDMXLGVPFNIXXYALLXXMIAXXXXXXXXXXXXXXGXXXXXXGXXHIYXXHXXXXXXXXXXXXXXXXXXXXXXXXXXXXXXXXXXXXXXXXXXQLXRXPXXXPXLXIXXXXXXXXXXXXXXXXXXIXXXXXXDXXLXXYXXXXXIXXXVAV

SEQ ID NO: 17939 - protein, 27 aa, Artificial sequence
  Consensus
  Variant (2)..(8): Xaa in position 2 to 8 is any amino acid
  Variant (9)..(10): Xaa in position 9 to 10 is any or no amino acid
  Variant (12)..(15): Xaa in position 12 to 15 is any amino acid
  Variant (16)..(16): Xaa in position 16 is Asp or Asn
  Variant (19)..(21): Xaa in position 19 to 21 is any amino acid
  Variant (22)..(22): Xaa in position 22 is Ala, Cys, Gly, Thr or Val
  Variant (23)..(26): Xaa in position 23 to 26 is any amino acid
  Variant (27)..(27): Xaa in position 27 is Ala, Asp, Glu, Gly or Ser
LXXXXXXXXXGXXXXXRTXXXXXXXXX

SEQ ID NO: 17940 - protein, 21 aa, Artificial sequence
  Consensus
  Variant (2)..(2): Xaa in position 2 is any amino acid
  Variant (3)..(3): Xaa in position 3 is Ile, Leu, Met or Val
  Variant (7)..(15): Xaa in position 7 to 15 is any amino acid
  Variant (17)..(17): Xaa in position 17 is any or no amino acid
  Variant (19)..(20): Xaa in position 19 to 20 is any amino acid
  Variant (21)..(21): Xaa in position 21 is Phe, Ile, Leu, Met or Val
PXXTTKXXXXXXXXXEXLXXX

SEQ ID NO: 17941 - protein, 37 aa, Artificial sequence
  Consensus
  Variant (2)..(2): Xaa in position 2 is Ile, Leu, Met or Val
  Variant (3)..(5): Xaa in position 3 to 5 is any amino acid
  Variant (6)..(6): Xaa in position 6 is Ile, Leu or Val
  Variant (7)..(8): Xaa in position 7 to 8 is any amino acid
  Variant (9)..(9): Xaa in position 9 is Ile, Leu or Val
  Variant (10)..(12): Xaa in position 10 to 12 is any amino acid
  Variant (14)..(14): Xaa in position 14 is any amino acid
  Variant (15)..(15): Xaa in position 15 is Cys, Asp, Gly, Asn or Ser
  Variant (18)..(18): Xaa in position 18 is any amino acid
  Variant (19)..(19): Xaa in position 19 is Ile, Leu, Met or Val
  Variant (20)..(22): Xaa in position 20 to 22 is any amino acid
  Variant (23)..(23): Xaa in position 23 is Phe, Trp or Tyr
  Variant (25)..(32): Xaa in position 25 to 32 is any amino acid
  Variant (34)..(34): Xaa in position 34 is any or no amino acid
  Variant (36)..(36): Xaa in position 36 is any or no amino acid
QXXXXXXXXXXXPXXRRXXXXXXNXXXXXXXXLXPXC

SEQ ID NO: 17942 - protein, 32 aa, Artificial sequence
  Consensus
  Variant (2)..(3): Xaa in position 2 to 3 is any amino acid
  Variant (4)..(6): Xaa in position 4 to 6 is any or no amino acid
  Variant (8)..(8): Xaa in position 8 is any or no amino acid
  Variant (11)..(11): Xaa in position 11 is Ala, Cys, Gly or Val
  Variant (13)..(14): Xaa in position 13 to 14 is any amino acid
  Variant (17)..(17): Xaa in position 17 is Ile, Leu or Val
  Variant (18)..(18): Xaa in position 18 is Asn or Pro
  Variant (21)..(21): Xaa in position 21 is any amino acid
  Variant (22)..(22): Xaa in position 22 is Ala, Gly, Ile or Val
  Variant (23)..(23): Xaa in position 23 is Ala, Gly, Gln or Ser
  Variant (24)..(26): Xaa in position 24 to 26 is any amino acid
  Variant (27)..(27): Xaa in position 27 is Phe or Leu
  Variant (28)..(29): Xaa in position 28 to 29 is any amino acid
  Variant (30)..(30): Xaa in position 30 is Ile, Leu, Met or Val
  Variant (31)..(31): Xaa in position 31 is any amino acid
LXXXXXQXRSXDXXLGXXFNXXXXXXXXXXXA

SEQ ID NO: 17943 - DNA, 1434 bp, Escherichia coli K12; identical to SEQ ID NO: 4679
  CDS (1)..(1434)

SEQ ID NO: 17944 - protein, 477 aa, Escherichia coli K12 [sequence omitted]

SEQ ID NO: 17945 - DNA, 1314 bp, Pyrococcus abyssi; identical to SEQ ID NO: 4681
  CDS (1)..(1314)

SEQ ID NO: 17946 - protein, 437 aa, Pyrococcus abyssi; identical to SEQ ID NO: 4682

SEQ ID NO: 17947 - DNA, 1425 bp, Chlamydia muridarum, Chlamydia trachomatis MoPn; identical to SEQ ID NO: 4683
  CDS (1)..(1425)

SEQ ID NO: 17948 - protein, 474 aa, Chlamydia muridarum, Chlamydia trachomatis MoPn; identical to SEQ ID NO: 4684

SEQ ID NO: 17949 - DNA, 1434 bp, Clostridium acetobutylicum; identical to SEQ ID NO: 4685
  CDS (1)..(1434)

SEQ ID NO: 17950 - protein, 477 aa, Clostridium acetobutylicum; identical to SEQ ID NO: 4686

SEQ ID NO: 17951 - DNA, 1431 bp, Yersinia pestis; identical to SEQ ID NO: 4687
  CDS (1)..(1431)

SEQ ID NO: 17952 - protein, 476 aa, Yersinia pestis; identical to SEQ ID NO: 4688

SEQ ID NO: 17953 - DNA, 1443 bp, Agrobacterium tumefaciens; identical to SEQ ID NO: 4689
  CDS (1)..(1443)

SEQ ID NO: 17954 - protein, 480 aa, Agrobacterium tumefaciens; identical to SEQ ID NO: 4690

SEQ ID NO: 17955 - DNA, 1479 bp, Nostoc sp. PCC 7120; identical to SEQ ID NO: 4691
  CDS (1)..(1479)

SEQ ID NO: 17956 - protein, 492 aa, Nostoc sp. PCC 7120; identical to SEQ ID NO: 4692

SEQ ID NO: 17957 - DNA, 1419 bp, Nostoc sp. PCC 7120; identical to SEQ ID NO: 4693
  CDS (1)..(1419)

SEQ ID NO: 17958 - protein, 472 aa, Nostoc sp. PCC 7120; identical to SEQ ID NO: 4694

SEQ ID NO: 17959 - DNA, 1431 bp, Haemophilus influenzae; identical to SEQ ID NO: 4695
  CDS (1)..(1431)

SEQ ID NO: 17960 - protein, 476 aa, Haemophilus influenzae; identical to SEQ ID NO: 4696

SEQ ID NO: 17961 - DNA, 1392 bp, Aquifex aeolicus; identical to SEQ ID NO: 4697
  CDS (1)..(1392)

SEQ ID NO: 17962 - protein, 463 aa, Aquifex aeolicus; identical to SEQ ID NO: 4698

SEQ ID NO: 17963 - DNA, 1371 bp, Pyrococcus horikoshii; identical to SEQ ID NO: 4699
  CDS (1)..(1371)

SEQ ID NO: 17964 - protein, 456 aa, Pyrococcus horikoshii; identical to SEQ ID NO: 4700

SEQ ID NO: 17965 - DNA, 1431 bp, Chlamydophila pneumoniae, Chlamydia pneumoniae; identical to SEQ ID NO: 4701
  CDS (1)..(1431)

SEQ ID NO: 17966 - protein, 476 aa, Chlamydophila pneumoniae, Chlamydia pneumoniae; identical to SEQ ID NO: 4702

SEQ ID NO: 17967 - DNA, 1452 bp, Lactococcus lactis subsp. lactis; identical to SEQ ID NO: 4703
  CDS (1)..(1452)

SEQ ID NO: 17968 - protein, 483 aa, Lactococcus lactis subsp. lactis; identical to SEQ ID NO: 4704

SEQ ID NO: 17969 - DNA, 1461 bp, Sinorhizobium meliloti; identical to SEQ ID NO: 4705
  CDS (1)..(1461)

SEQ ID NO: 17970 - protein, 486 aa, Sinorhizobium meliloti; identical to SEQ ID NO: 4706

SEQ ID NO: 17971 - DNA, 1425 bp, Chlamydia trachomatis; identical to SEQ ID NO: 4707
  CDS (1)..(1425)

SEQ ID NO: 17972 - protein, 474 aa, Chlamydia trachomatis; identical to SEQ ID NO: 4708

SEQ ID NO: 17973 - DNA, 1701 bp, Sulfolobus solfataricus; identical to SEQ ID NO: 4709
  CDS (1)..(1701)

SEQ ID NO: 17974 - protein, 566 aa, Sulfolobus solfataricus; identical to SEQ ID NO: 4710

SEQ ID NO: 17975 - DNA, 1566 bp, Methanococcus jannaschii; identical to SEQ ID NO: 4711
  CDS (1)..(1566)

SEQ ID NO: 17976 - protein, 521 aa, Methanococcus jannaschii; identical to SEQ ID NO: 4712

SEQ ID NO: 17977 - DNA, 1431 bp, Bacillus halodurans; identical to SEQ ID NO: 4713
  CDS (1)..(1431)

SEQ ID NO: 17978 - protein, 476 aa, Bacillus halodurans; identical to SEQ ID NO: 4714

SEQ ID NO: 17979 - DNA, 1455 bp, Vibrio cholerae; identical to SEQ ID NO: 4715
  CDS (1)..(1455)

SEQ ID NO: 17980 - protein, 484 aa, Vibrio cholerae; identical to SEQ ID NO: 4716

SEQ ID NO: 17981 - DNA, 1833 bp, Arabidopsis thaliana (mouse-ear cress); identical to SEQ ID NO: 4717
  CDS (1)..(1833)

SEQ ID NO: 17982 - protein, 610 aa, Arabidopsis thaliana (mouse-ear cress); identical to SEQ ID NO: 4718

SEQ ID NO: 17983 - DNA, 1461 bp, Thermotoga maritima; identical to SEQ ID NO: 4719
  CDS (1)..(1461)

SEQ ID NO: 17984 - protein, 486 aa, Thermotoga maritima; identical to SEQ ID NO: 4720

SEQ ID NO: 17985 - DNA, 1542 bp, Pseudomonas aeruginosa; identical to SEQ ID NO: 4721
  CDS (1)..(1542)

SEQ ID NO: 17986 - protein, 513 aa, Pseudomonas aeruginosa; identical to SEQ ID NO: 4722

SEQ ID NO: 17987 - DNA, 3078 bp, Arabidopsis thaliana (mouse-ear cress); identical to SEQ ID NO: 4723
  CDS (1)..(3078)

SEQ ID NO: 17988 - protein, 1025 aa, Arabidopsis thaliana (mouse-ear cress); identical to SEQ ID NO: 4724

SEQ ID NO: 17989 - DNA, 1434 bp, Streptococcus pneumoniae; identical to SEQ ID NO: 4725
  CDS (1)..(1434)

SEQ ID NO: 17990 - protein, 477 aa, Streptococcus pneumoniae; identical to SEQ ID NO: 4726

SEQ ID NO: 17991 - DNA, 2533 bp, Oryza sativa (rice); identical to SEQ ID NO: 4727
  CDS (114)..(1994)

SEQ ID NO: 17992 - protein, 626 aa, Oryza sativa (rice); identical to SEQ ID NO: 4728

SEQ ID NO: 17993 - DNA, 1818 bp, Zea mays (maize); identical to SEQ ID NO: 4729
  CDS (1)..(1818)

SEQ ID NO: 17994 - protein, 605 aa, Zea mays (maize); identical to SEQ ID NO: 4730

SEQ ID NO: 17995 - DNA, 1455 bp, Bacillus subtilis; identical to SEQ ID NO: 4731
  CDS (1)..(1455)

SEQ ID NO: 17996 - protein, 484 aa, Bacillus subtilis; identical to SEQ ID NO: 4732

SEQ ID NO: 17997 - DNA, 2168 bp, Manihot esculenta (cassava); identical to SEQ ID NO: 4733
  CDS (75)..(1901)

SEQ ID NO: 17998 - protein, 608 aa, Manihot esculenta (cassava); identical to SEQ ID NO: 4734

SEQ ID NO: 17999 - DNA, 2035 bp, Pisum sativum (garden pea); identical to SEQ ID NO: 4735
  CDS (82)..(1893)

SEQ ID NO: 18000 - protein, 603 aa, Pisum sativum (garden pea); identical to SEQ ID NO: 4736

SEQ ID NO: 18001 - DNA, 1476 bp, Synechocystis sp; identical to SEQ ID NO: 4737
  CDS (1)..(1476)

SEQ ID NO: 18002 - protein, 491 aa, Synechocystis sp; identical to SEQ ID NO: 4738

SEQ ID NO: 18003 - DNA, 1434 bp, Synechocystis sp; identical to SEQ ID NO: 4739
  CDS (1)..(1434)

SEQ ID NO: 18004 - protein, 477 aa, Synechocystis sp; identical to SEQ ID NO: 4740

SEQ ID NO: 18005 - DNA, 2868 bp, Zea mays (maize); identical to SEQ ID NO: 4741
  CDS (670)..(2868)

SEQ ID NO: 18006 - protein, 732 aa, Zea mays (maize); identical to SEQ ID NO: 4742

SEQ ID NO: 18007 - DNA, 2480 bp, Zea mays (maize); identical to SEQ ID NO: 4743
  CDS (58)..(2154)

SEQ ID NO: 18008 - protein, 698 aa, Zea mays (maize); identical to SEQ ID NO: 4744

SEQ ID NO: 18009 - DNA, 6027 bp, Zea mays (maize); identical to SEQ ID NO: 4745
  CDS (120)..(5144)

SEQ ID NO: 18010 - protein, 1674 aa, Zea mays (maize); identical to SEQ ID NO: 4746

SEQ ID NO: 18011 - DNA, 2991 bp, Zea mays (maize); identical to SEQ ID NO: 4747
  misc_feature (2709)..(2709): n is a, c, g, or t
  CDS (602)..(2470)

SEQ ID NO: 18012 - protein, 622 aa, Zea mays (maize); identical to SEQ ID NO: 4748

SEQ ID NO: 18013 - DNA, 2360 bp, Solanum tuberosum (potato); identical to SEQ ID NO: 4749
  CDS (68)..(1993)

SEQ ID NO: 18014 - protein, 641 aa, Solanum tuberosum (potato); identical to SEQ ID NO: 4750

SEQ ID NO: 18015 - DNA, 2124 bp, Ipomoea batatas (sweet potato); identical to SEQ ID NO: 4751
  CDS (23)..(1849)

SEQ ID NO: 18016 - protein, 608 aa, Ipomoea batatas (sweet potato); identical to SEQ ID NO: 4752

SEQ ID NO: 18017 - DNA, 2287 bp, Sorghum bicolor (sorghum); identical to SEQ ID NO: 4753
  CDS (207)..(2033)

SEQ ID NO: 18018 - protein, 608 aa, Sorghum bicolor (sorghum); identical to SEQ ID NO: 4754

SEQ ID NO: 18019 - DNA, 4110 bp, Schizosaccharomyces pombe; identical to SEQ ID NO: 4755
  CDS (1)..(4110)

SEQ ID NO: 18020 - protein, 1369 aa, Schizosaccharomyces pombe; identical to SEQ ID NO: 4756

SEQ ID NO: 18021 - DNA, 1812 bp, Hordeum vulgare (barley); identical to SEQ ID NO: 4757
  CDS (1)..(1812)

SEQ ID NO: 18022 - protein, 603 aa, Hordeum vulgare (barley); identical to SEQ ID NO: 4758

SEQ ID NO: 18023 - DNA, 2161 bp, Solanum tuberosum (potato); identical to SEQ ID NO: 4759
  CDS (37)..(1860)

SEQ ID NO: 18024 - protein, 607 aa, Solanum tuberosum (potato); identical to SEQ ID NO: 4760

SEQ ID NO: 18025 - DNA, 2825 bp, Triticum aestivum; identical to SEQ ID NO: 4761
  CDS (162)..(2561)

SEQ ID NO: 18026 - protein, 799 aa, Triticum aestivum; identical to SEQ ID NO: 4762

SEQ ID NO: 18027 - DNA, 2771 bp, Triticum aestivum; identical to SEQ ID NO: 4763
  CDS (280)..(2550)

SEQ ID NO: 18028 - protein, 756 aa, Triticum aestivum; identical to SEQ ID NO: 4764

SEQ ID NO: 18029 - DNA, 4121 bp, Zea mays; identical to SEQ ID NO: 4765
  CDS (442)..(3954)

SEQ ID NO: 18030 - protein, 1170 aa, Zea mays; identical to SEQ ID NO: 4766

SEQ ID NO: 18031 - DNA, 3240 bp, Chlamydomonas reinhardtii; identical to SEQ ID NO: 4767
  CDS (138)..(2264)

SEQ ID NO: 18032 - protein, 708 aa, Chlamydomonas reinhardtii; identical to SEQ ID NO: 4768

SEQ ID NO: 18033 - DNA, 3049 bp, Chlamydomonas reinhardtii; identical to SEQ ID NO: 4769
  CDS (190)..(1920)

SEQ ID NO: 18034 - protein, 576 aa, Chlamydomonas reinhardtii; identical to SEQ ID NO: 4770

SEQ ID NO: 18035 - DNA, 2716 bp, Chlamydomonas reinhardtii; identical to SEQ ID NO: 4771
  CDS (93)..(2048)

SEQ ID NO: 18036 - protein, 651 aa, Chlamydomonas reinhardtii; identical to SEQ ID NO: 4772

SEQ ID NO: 18037 - DNA, 2325 bp, Ipomoea batatas; identical to SEQ ID NO: 4773
  CDS (155)..(2047)

SEQ ID NO: 18038 - protein, 630 aa, Ipomoea batatas; identical to SEQ ID NO: 4774

SEQ ID NO: 18039 - DNA, 1440 bp, Erwinia carotovora subsp; identical to SEQ ID NO: 4775
  CDS (1)..(1440)

SEQ ID NO: 18040 - protein, 479 aa, Erwinia carotovora subsp; identical to SEQ ID NO: 4776

SEQ ID NO: 18041 - DNA, 1497 bp, Bacillus thuringiensis serovar konkukian str; identical to SEQ ID NO: 4777
  CDS (1)..(1497)

SEQ ID NO: 18042 - protein, 498 aa, Bacillus thuringiensis serovar konkukian str; identical to SEQ ID NO: 4778

SEQ ID NO: 18043 - DNA, 1431 bp, Mycoplasma mobile; identical to SEQ ID NO: 4779
  CDS (1)..(1431): transl-table=4

SEQ ID NO: 18044 - protein, 476 aa, Mycoplasma mobile; identical to SEQ ID NO: 4780

SEQ ID NO: 18045 - DNA, 1815 bp, Hordeum bulbosum; identical to SEQ ID NO: 4781
  CDS (1)..(1815)

SEQ ID NO: 18046 - protein, 604 aa, Hordeum bulbosum; identical to SEQ ID NO: 4782

SEQ ID NO: 18047 - DNA, 1527 bp, Photobacterium profundum; identical to SEQ ID NO: 4783
  CDS (1)..(1527)

SEQ ID NO: 18048 - protein, 508 aa, Photobacterium profundum; identical to SEQ ID NO: 4784

SEQ ID NO: 18049 - DNA, 1569 bp, Methanococcus maripaludis; identical to SEQ ID NO: 4785
  CDS (1)..(1569)

SEQ ID NO: 18050 - protein, 522 aa, Methanococcus maripaludis; identical to SEQ ID NO: 4786

SEQ ID NO: 18051 - DNA, 1503 bp, Parachlamydia sp; identical to SEQ ID NO: 4787
  CDS (1)..(1503)

SEQ ID NO: 18052 - protein, 500 aa, Parachlamydia sp; identical to SEQ ID NO: 4788

SEQ ID NO: 18053 - DNA, 1452 bp, Rhodopseudomonas palustris; identical to SEQ ID NO: 4789
  CDS (1)..(1452)

SEQ ID NO: 18054 - protein, 483 aa, Rhodopseudomonas palustris; identical to SEQ ID NO: 4790

SEQ ID NO: 18055 - DNA, 1173 bp, Corynebacterium diphtheriae; identical to SEQ ID NO: 4791
  CDS (1)..(1173)

SEQ ID NO: 18056 - protein, 390 aa, Corynebacterium diphtheriae; identical to SEQ ID NO: 4792

SEQ ID NO: 18057 - DNA, 1578 bp, Ostreococcus tauri; identical to SEQ ID NO: 4793
  CDS (1)..(1578)

SEQ ID NO: 18058 - protein, 525 aa, Ostreococcus tauri; identical to SEQ ID NO: 4794

SEQ ID NO: 18059 - DNA, 1725 bp, Ostreococcus tauri; identical to SEQ ID NO: 4795
  CDS (1)..(1725)

SEQ ID NO: 18060 - protein, 574 aa, Ostreococcus tauri; identical to SEQ ID NO: 4796

SEQ ID NO: 18061 - DNA, 2022 bp, Ostreococcus tauri; identical to SEQ ID NO: 4797
  CDS (1)..(2022)

SEQ ID NO: 18062 - protein, 673 aa, Ostreococcus tauri; identical to SEQ ID NO: 4798

SEQ ID NO: 18063 - DNA, 2939 bp, Colocasia esculenta; identical to SEQ ID NO: 4799
  CDS (220)..(2634)

SEQ ID NO: 18064 - protein, 804 aa, Colocasia esculenta; identical to SEQ ID NO: 4800

SEQ ID NO: 18065 - DNA, 1554 bp, Thermoproteus tenax; identical to SEQ ID NO: 4801
  CDS (1)..(1554)

SEQ ID NO: 18066 - protein, 517 aa, Thermoproteus tenax; identical to SEQ ID NO: 4802

SEQ ID NO: 18067 - DNA, 1470 bp, Desulfovibrio vulgaris; identical to SEQ ID NO: 4803
  CDS (1)..(1470)

SEQ ID NO: 18068 - protein, 489 aa, Desulfovibrio vulgaris; identical to SEQ ID NO: 4804

SEQ ID NO: 18069 - DNA, 1323 bp, Thermus thermophilus; identical to SEQ ID NO: 4805
  CDS (1)..(1323)

SEQ ID NO: 18070 - protein, 440 aa, Thermus thermophilus; identical to SEQ ID NO: 4806

SEQ ID NO: 18071 - DNA, 1431 bp, Bacillus cereus; identical to SEQ ID NO: 4807
  CDS (1)..(1431)

SEQ ID NO: 18072 - protein, 476 aa, Bacillus cereus; identical to SEQ ID NO: 4808

SEQ ID NO: 18073 - DNA, 1476 bp, Treponema denticola; identical to SEQ ID NO: 4809
  CDS (1)..(1476)

SEQ ID NO: 18074 - protein, 491 aa, Treponema denticola; identical to SEQ ID NO: 4810

SEQ ID NO: 18075 - DNA, 1173 bp, Mycobacterium paratuberculosis; identical to SEQ ID NO: 4811
  CDS (1)..(1173)

SEQ ID NO: 18076 - protein, 390 aa, Mycobacterium paratuberculosis; identical to SEQ ID NO: 4812

SEQ ID NO: 18077 - DNA, 2486 bp, Phaseolus vulgaris; identical to SEQ ID NO: 4813
  CDS (39)..(2255)

SEQ ID NO: 18078 - protein, 738 aa, Phaseolus vulgaris; identical to SEQ ID NO: 4814

SEQ ID NO: 18079 - DNA, 2570 bp, Phaseolus vulgaris; identical to SEQ ID NO: 4815
  CDS (135)..(2309)

SEQ ID NO: 18080 - protein, 724 aa, Phaseolus vulgaris; identical to SEQ ID NO: 4816

SEQ ID NO: 18081 - DNA, 2444 bp, Phaseolus vulgaris; identical to SEQ ID NO: 4817
  CDS (78)..(2015)

SEQ ID NO: 18082 - protein, 645 aa, Phaseolus vulgaris; identical to SEQ ID NO: 4818

SEQ ID NO: 18083 - DNA, 1827 bp, Hordeum spontaneum; identical to SEQ ID NO: 4819
  CDS (1)..(1827)

SEQ ID NO: 18084 - protein, 608 aa, Hordeum spontaneum; identical to SEQ ID NO: 4820

SEQ ID NO: 18085 - DNA, 1248 bp, Gloeobacter violaceus; identical to SEQ ID NO: 4821
  CDS (1)..(1248)

SEQ ID NO: 18086 - protein, 415 aa, Gloeobacter violaceus; identical to SEQ ID NO: 4822

SEQ ID NO: 18087 - DNA, 3219 bp, Oryza sativa; identical to SEQ ID NO: 4823
  CDS (1)..(3219)

SEQ ID NO: 18088 - protein, 1072 aa, Oryza sativa; identical to SEQ ID NO: 4824

SEQ ID NO: 18089 - DNA, 2547 bp, Oryza sativa; identical to SEQ ID NO: 4825
  CDS (97)..(2022)

SEQ ID NO: 18090 - protein, 641 aa, Oryza sativa; identical to SEQ ID NO: 4826

SEQ ID NO: 18091 - DNA, 1242 bp, Streptomyces avermitilis; identical to SEQ ID NO: 4827
  CDS (1)..(1242)

SEQ ID NO: 18092 - protein, 413 aa, Streptomyces avermitilis; identical to SEQ ID NO: 4828

SEQ ID NO: 18093 - DNA, 2208 bp, Phaseolus vulgaris; identical to SEQ ID NO: 4829
  CDS (144)..(1991)

SEQ ID NO: 18094 - protein, 615 aa, Phaseolus vulgaris; identical to SEQ ID NO: 4830

SEQ ID NO: 18095 - DNA, 2748 bp, Oryza sativa; identical to SEQ ID NO: 4831
  CDS (1)..(2748)

SEQ ID NO: 18096 - protein, 915 aa, Oryza sativa; identical to SEQ ID NO: 4832

SEQ ID NO: 18097 - DNA, 1605 bp, Shewanella oneidensis; identical to SEQ ID NO: 4833
  CDS (1)..(1605)

SEQ ID NO: 18098 - protein, 534 aa, Shewanella oneidensis; identical to SEQ ID NO: 4834

SEQ ID NO: 18099 - DNA, 1173 bp, Corynebacterium efficiens; identical to SEQ ID NO: 4835
  CDS (1)..(1173)

SEQ ID NO: 18100 - protein, 390 aa, Corynebacterium efficiens; identical to SEQ ID NO: 4836

SEQ ID NO: 18101 - DNA, 2340 bp, Colocasia esculenta; identical to SEQ ID NO: 4837
  CDS (155)..(2086)

SEQ ID NO: 18102 - protein, 643 aa, Colocasia esculenta; identical to SEQ ID NO: 4838

SEQ ID NO: 18103 - DNA, 2409 bp, Hordeum vulgare; identical to SEQ ID NO: 4839
  CDS (1)..(2409)

SEQ ID NO: 18104 - protein, 802 aa, Hordeum vulgare; identical to SEQ ID NO: 4840

SEQ ID NO: 18105 - DNA, 2115 bp, Setaria italica; identical to SEQ ID NO: 4841
  CDS (142)..(1959)

SEQ ID NO: 18106 - protein, 605 aa, Setaria italica; identical to SEQ ID NO: 4842

SEQ ID NO: 18107 - DNA, 2081 bp, Triticum aestivum; identical to SEQ ID NO: 4843
  CDS (1)..(1800)

SEQ ID NO: 18108 - protein, 599 aa, Triticum aestivum; identical to SEQ ID NO: 4844

SEQ ID NO: 18109 - DNA, 1230 bp, Corynebacterium glutamicum; identical to SEQ ID NO: 4845
  CDS (1)..(1230)

SEQ ID NO: 18110 - protein, 409 aa, Corynebacterium glutamicum; identical to SEQ ID NO: 4846

SEQ ID NO: 18111 - DNA, 1356 bp, Pyrococcus furiosus; identical to SEQ ID NO: 4847
  CDS (1)..(1356)

SEQ ID NO: 18112 - protein, 451 aa, Pyrococcus furiosus; identical to SEQ ID NO: 4848

SEQ ID NO: 18113 - DNA, 2112 bp, Oryza sativa; identical to SEQ ID NO: 4849
  CDS (61)..(1887)

SEQ ID NO: 18114 - protein, 608 aa, Oryza sativa; identical to SEQ ID NO: 4850

SEQ ID NO: 18115 - DNA, 2496 bp, Oryza sativa; identical to SEQ ID NO: 4851
  CDS (1)..(2496)

SEQ ID NO: 18116 - protein, 831 aa, Oryza sativa; identical to SEQ ID NO: 4852

SEQ ID NO: 18117 - DNA, 1443 bp, Rhizobium loti; identical to SEQ ID NO: 4853
  CDS (1)..(1443)

SEQ ID NO: 18118 - protein, 480 aa, Rhizobium loti; identical to SEQ ID NO: 4854

SEQ ID NO: 18119 - DNA, 2100 bp, Pisum sativum; identical to SEQ ID NO: 4855
  CDS (6)..(1847)

SEQ ID NO: 18120 - protein, 613 aa, Pisum sativum; identical to SEQ ID NO: 4856

SEQ ID NO: 18121 - DNA, 3386 bp, Triticum aestivum; identical to SEQ ID NO: 4857
  CDS (251)..(2995)

SEQ ID NO: 18122 - protein, 914 aa, Triticum aestivum; identical to SEQ ID NO: 4858

SEQ ID NO: 18123 - DNA, 2919 bp, Oryza sativa; identical to SEQ ID NO: 4859
  CDS (165)..(2597)

SEQ ID NO: 18124 - protein, 810 aa, Oryza sativa; identical to SEQ ID NO: 4860

SEQ ID NO: 18125 - DNA, 2394 bp, Oryza sativa; identical to SEQ ID NO: 4861
  CDS (34)..(2118)

SEQ ID NO: 18126 - protein, 694 aa, Oryza sativa; identical to SEQ ID NO: 4862

SEQ ID NO: 18127 - DNA, 2903 bp, Oryza sativa; identical to SEQ ID NO: 4863
  CDS (86)..(2335)

SEQ ID NO: 18128 - protein, 749 aa, Oryza sativa; identical to SEQ ID NO: 4864

SEQ ID NO: 18129 - DNA, 1719 bp, Sulfolobus tokodaii; identical to SEQ ID NO: 4865
  CDS (1)..(1719)

SEQ ID NO: 18130 - protein, 572 aa, Sulfolobus tokodaii; identical to SEQ ID NO: 4866

SEQ ID NO: 18131 - DNA, 2270 bp, Perilla frutescens; identical to SEQ ID NO: 4867
  CDS (172)..(1986)

SEQ ID NO: 18132 - protein, 604 aa, Perilla frutescens; identical to SEQ ID NO: 4868

SEQ ID NO: 18133 - DNA, 1701 bp, Sulfolobus acidocaldarius; identical to SEQ ID NO: 4869
  CDS (1)..(1701)

SEQ ID NO: 18134 - protein, 566 aa, Sulfolobus acidocaldarius; identical to SEQ ID NO: 4870

SEQ ID NO: 18135 - DNA, 2793 bp, Triticum aestivum; identical to SEQ ID NO: 4871
  CDS (135)..(2531)

SEQ ID NO: 18136 - protein, 798 aa, Triticum aestivum; identical to SEQ ID NO: 4872

SEQ ID NO: 18137 - DNA, 5346 bp, Triticum aestivum; identical to SEQ ID NO: 4873
  CDS (29)..(4915)

SEQ ID NO: 18138 - protein, 1628 aa, Triticum aestivum; identical to SEQ ID NO: 4874

SEQ ID NO: 18139 - DNA, 2502 bp, Arabidopsis thaliana; identical to SEQ ID NO: 4875
  CDS (1)..(2379)

SEQ ID NO: 18140 - protein, 792 aa, Arabidopsis thaliana; identical to SEQ ID NO: 4876

SEQ ID NO: 18141 - DNA, 2592 bp, Sorghum bicolor; identical to SEQ ID NO: 4877
  CDS (59)..(1948)

SEQ ID NO: 18142 - protein, 629 aa, Sorghum bicolor; identical to SEQ ID NO: 4878

SEQ ID NO: 18143 - DNA, 1815 bp, Triticum turgidum subsp; identical to SEQ ID NO: 4879
  CDS (1)..(1815)

SEQ ID NO: 18144 - protein, 604 aa, Triticum turgidum subsp; identical to SEQ ID NO: 4880

SEQ ID NO: 18145 - DNA, 2575 bp, Manihot esculenta; identical to SEQ ID NO: 4881
  CDS (50)..(2305)

SEQ ID NO: 18146 - protein, 751 aa, Manihot esculenta; identical to SEQ ID NO: 4882

SEQ ID NO: 18147 - DNA, 2842 bp, Triticum aestivum; identical to SEQ ID NO: 4883
  CDS (89)..(2488)

SEQ ID NO: 18148 - protein, 799 aa, Triticum aestivum; identical to SEQ ID NO: 4884

SEQ ID NO: 18149 - DNA, 1818 bp, Triticum monococcum; identical to SEQ ID NO: 4885
  CDS (1)..(1818)

SEQ ID NO: 18150 - protein, 605 aa, Triticum monococcum; identical to SEQ ID NO: 4886

SEQ ID NO: 18151 - DNA, 2081 bp, Triticum aestivum; identical to SEQ ID NO: 4887
  CDS (120)..(1919)

SEQ ID NO: 18152 - protein, 599 aa, Triticum aestivum; identical to SEQ ID NO: 4888

SEQ ID NO: 18153 - DNA, 2591 bp, Triticum aestivum; identical to SEQ ID NO: 4889
  CDS (256)..(2199)

SEQ ID NO: 18154 - protein, 647 aa, Triticum aestivum; identical to SEQ ID NO: 4890

SEQ ID NO: 18155 - DNA, 1872 bp, Oryza sativa; identical to SEQ ID NO: 4891
  CDS (1)..(1872)

SEQ ID NO: 18156 - protein, 623 aa, Oryza sativa; identical to SEQ ID NO: 4892

SEQ ID NO: 18157 - DNA, 2028 bp, Triticum aestivum; identical to SEQ ID NO: 4893
  CDS (30)..(1754)

SEQ ID NO: 18158 - protein, 574 aa, Triticum aestivum; identical to SEQ ID NO: 4894

SEQ ID NO: 18159 - DNA, 3901 bp, Vigna unguiculata; identical to SEQ ID NO: 4895
  CDS (161)..(3604)

SEQ ID NO: 18160 - protein, 1147 aa, Vigna unguiculata; identical to SEQ ID NO: 4896

SEQ ID NO: 18161 - DNA, 3519 bp, Vigna unguiculata; identical to SEQ ID NO: 4897
  CDS (386)..(3010)

SEQ ID NO: 18162 - protein, 874 aa, Vigna unguiculata; identical to SEQ ID NO: 4898

SEQ ID NO: 18163 - DNA, 2221 bp, Phaseolus vulgaris; identical to SEQ ID NO: 4899
  CDS (30)..(1850)

SEQ ID NO: 18164 - protein, 606 aa, Phaseolus vulgaris; identical to SEQ ID NO: 4900

SEQ ID NO: 18165 - DNA, 2107 bp, Astragalus membranaceus; identical to SEQ ID NO: 4901
  CDS (96)..(1919)

SEQ ID NO: 18166 - protein, 607 aa, Astragalus membranaceus; identical to SEQ ID NO: 4902

SEQ ID NO: 18167 - DNA, 1389 bp, Bradyrhizobium japonicum; identical to SEQ ID NO: 4903
  CDS (1)..(1389)

SEQ ID NO: 18168 - protein, 462 aa, Bradyrhizobium japonicum; identical to SEQ ID NO: 4904

SEQ ID NO: 18169 - DNA, 1530 bp, Agrobacterium tumefaciens; identical to SEQ ID NO: 4905
  CDS (1)..(1530)

SEQ ID NO: 18170 - protein, 509 aa, Agrobacterium tumefaciens; identical to SEQ ID NO: 4906

SEQ ID NO: 18171 - DNA, 1449 bp, Bradyrhizobium japonicum; identical to SEQ ID NO: 4907
  CDS (1)..(1449)

SEQ ID NO: 18172 - protein, 482 aa, Bradyrhizobium japonicum; identical to SEQ ID NO: 4908

SEQ ID NO: 18173 - DNA, 1431 bp, Bacillus cereus; identical to SEQ ID NO: 4909
  CDS (1)..(1431)

SEQ ID NO: 18174 - protein, 476 aa, Bacillus cereus; identical to SEQ ID NO: 4910

SEQ ID NO: 18175 - DNA, 1458 bp, Bacillus stearothermophilus; identical to SEQ ID NO: 4911
  CDS (1)..(1458)

SEQ ID NO: 18176 - protein, 485 aa, Bacillus stearothermophilus; identical to SEQ ID NO: 4912

SEQ ID NO: 18177 - DNA, 1533 bp, Bordetella bronchiseptica; identical to SEQ ID NO: 4913
  CDS (1)..(1533)

SEQ ID NO: 18178 - protein, 510 aa, Bordetella bronchiseptica; identical to SEQ ID NO: 4914

SEQ ID NO: 18179 - DNA, 1428 bp, Chlamydophila caviae; identical to SEQ ID NO: 4915
  CDS (1)..(1428)

SEQ ID NO: 18180 - protein, 475 aa, Chlamydophila caviae; identical to SEQ ID NO: 4916

SEQ ID NO: 18181 - DNA, 1467 bp, Chlorobium tepidum; identical to SEQ ID NO: 4917
  CDS (1)..(1467)

SEQ ID NO: 18182 - protein, 488 aa, Chlorobium tepidum; identical to SEQ ID NO: 4918

SEQ ID NO: 18183 - DNA, 1449 bp, Clostridium perfringens; identical to SEQ ID NO: 4919
  CDS (1)..(1449)

SEQ ID NO: 18184 - protein, 482 aa, Clostridium perfringens; identical to SEQ ID NO: 4920

SEQ ID NO: 18185 - DNA, 1335 bp, Deinococcus radiodurans; identical to SEQ ID NO: 4921
  CDS (1)..(1335)

SEQ ID NO: 18186 - protein, 444 aa, Deinococcus radiodurans; identical to SEQ ID NO: 4922

SEQ ID NO: 18187 - DNA, 1386 bp, Fusobacterium nucleatum; identical to SEQ ID NO: 4923
  CDS (1)..(1386)

SEQ ID NO: 18188 - protein, 461 aa, Fusobacterium nucleatum; identical to SEQ ID NO: 4924

SEQ ID NO: 18189 - DNA, 1377 bp, Gloeobacter violaceus; identical to SEQ ID NO: 4925
  CDS (1)..(1377)

SEQ ID NO: 18190 - protein, 458 aa, Gloeobacter violaceus; identical to SEQ ID NO: 4926

SEQ ID NO: 18191 - DNA, 1440 bp, Lactobacillus plantarum; identical to SEQ ID NO: 4927
  CDS (1)..(1440)

SEQ ID NO: 18192 - protein, 479 aa, Lactobacillus plantarum; identical to SEQ ID NO: 4928

SEQ ID NO: 18193 - DNA, 1488 bp, Nitrosomonas europaea; identical to SEQ ID NO: 4929
  CDS (1)..(1488)

SEQ ID NO: 18194 - protein, 495 aa, Nitrosomonas europaea; identical to SEQ ID NO: 4930

SEQ ID NO: 18195 - DNA, 1434 bp, Oceanobacillus iheyensis; identical to SEQ ID NO: 4931
  CDS (1)..(1434)

SEQ ID NO: 18196 - protein, 477 aa, Oceanobacillus iheyensis; identical to SEQ ID NO: 4932

SEQ ID NO: 18197 - DNA, 1443 bp, Pasteurella multocida; identical to SEQ ID NO: 4933
  CDS (1)..(1443)

SEQ ID NO: 18198 - protein, 480 aa, Pasteurella multocida; identical to SEQ ID NO: 4934

SEQ ID NO: 18199 - DNA, 1506 bp, Prochlorococcus marinus; identical to SEQ ID NO: 4935
  CDS (1)..(1506)

SEQ ID NO: 18200 - protein, 501 aa, Prochlorococcus marinus; identical to SEQ ID NO: 4936

SEQ ID NO: 18201 - DNA, 1500 bp, Prochlorococcus marinus; identical to SEQ ID NO: 4937
  CDS (1)..(1500)

SEQ ID NO: 18202 - protein, 499 aa, Prochlorococcus marinus; identical to SEQ ID NO: 4938

SEQ ID NO: 18203 - DNA, 1452 bp, Prochlorococcus marinus subsp; identical to SEQ ID NO: 4939
  CDS (1)..(1452)

SEQ ID NO: 18204 - protein, 483 aa, Prochlorococcus marinus subsp; identical to SEQ ID NO: 4940

SEQ ID NO: 18205 - DNA, 1560 bp, Pseudomonas putida; identical to SEQ ID NO: 4941
  CDS (1)..(1560)

SEQ ID NO: 18206 - protein, 519 aa, Pseudomonas putida; identical to SEQ ID NO: 4942

SEQ ID NO: 18207 - DNA, 1455 bp, Pseudomonas syringae; identical to SEQ ID NO: 4943
  CDS (1)..(1455)

SEQ ID NO: 18208 - protein, 484 aa, Pseudomonas syringae; identical to SEQ ID NO: 4944

SEQ ID NO: 18209 - DNA, 1626 bp, Ralstonia solanacearum; identical to SEQ ID NO: 4945
  CDS (1)..(1626)

SEQ ID NO: 18210 - protein, 541 aa, Ralstonia solanacearum; identical to SEQ ID NO: 4946

SEQ ID NO: 18211 - DNA, 1446 bp, Rhizobium loti; identical to SEQ ID NO: 4947
  CDS (1)..(1446)

SEQ ID NO: 18212 - protein, 481 aa, Rhizobium loti; identical to SEQ ID NO: 4948

SEQ ID NO: 18213 - DNA, 1443 bp, Rhizobium tropici; identical to SEQ ID NO: 4949
  CDS (1)..(1443)

SEQ ID NO: 18214 - protein, 480 aa, Rhizobium tropici; identical to SEQ ID NO: 4950

SEQ ID NO: 18215 - DNA, 1524 bp, Rhodopirellula baltica; identical to SEQ ID NO: 4951
  CDS (1)..(1524)

SEQ ID NO: 18216 - protein, 507 aa, Rhodopirellula baltica; identical to SEQ ID NO: 4952

SEQ ID NO: 18217 - DNA, 1434 bp, Rhodobacter sphaeroides; identical to SEQ ID NO: 4953
  CDS (1)..(1434)

SEQ ID NO: 18218 - protein, 477 aa, Rhodobacter sphaeroides; identical to SEQ ID NO: 4954

SEQ ID NO: 18219 - DNA, 1434 bp, Salmonella typhimurium; identical to SEQ ID NO: 4955
  CDS (1)..(1434)

SEQ ID NO: 18220 - protein, 477 aa, Salmonella typhimurium; identical to SEQ ID NO: 4956

SEQ ID NO: 18221 - DNA, 1431 bp, Streptococcus mutans; identical to SEQ ID NO: 4957
  CDS (1)..(1431)

SEQ ID NO: 18222 - protein, 476 aa, Streptococcus mutans; identical to SEQ ID NO: 4958

SEQ ID NO: 18223 - DNA, 1425 bp, Synechococcus elongatus; identical to SEQ ID NO: 4959
  CDS (1)..(1425)

SEQ ID NO: 18224 - protein, 474 aa, Synechococcus elongatus; identical to SEQ ID NO: 4960

SEQ ID NO: 18225 - DNA, 1398 bp, Synechococcus sp; identical to SEQ ID NO: 4961
  CDS (1)..(1398)

SEQ ID NO: 18226 - protein, 465 aa, Synechococcus sp; identical to SEQ ID NO: 4962

SEQ ID NO: 18227 - DNA, 1542 bp, Synechococcus sp; identical to SEQ ID NO: 4963
  CDS (1)..(1542)

SEQ ID NO: 18228 - protein, 513 aa, Synechococcus sp; identical to SEQ ID NO: 4964

SEQ ID NO: 18229 - DNA, 1317 bp, Thermus caldophilus; identical to SEQ ID NO: 4965
  CDS (1)..(1317)

SEQ ID NO: 18230 - protein, 438 aa, Thermus caldophilus; identical to SEQ ID NO: 4966

SEQ ID NO: 18231 - DNA, 1458 bp, Vibrio parahaemolyticus; identical to SEQ ID NO: 4967
  CDS (1)..(1458)

SEQ ID NO: 18232 - protein, 485 aa, Vibrio parahaemolyticus; identical to SEQ ID NO: 4968

SEQ ID NO: 18233 - DNA, 1458 bp, Vibrio vulnificus; identical to SEQ ID NO: 4969
  CDS (1)..(1458)

SEQ ID NO: 18234 - protein, 485 aa, Vibrio vulnificus; identical to SEQ ID NO: 4970

SEQ ID NO: 18235 - DNA, 1425 bp, Xanthomonas axonopodis; identical to SEQ ID NO: 4971
  CDS (1)..(1425)

SEQ ID NO: 18236 - protein, 474 aa, Xanthomonas axonopodis; identical to SEQ ID NO: 4972

SEQ ID NO: 18237 - DNA, 1425 bp, Xanthomonas campestris; identical to SEQ ID NO: 4973
  CDS (1)..(1425)

SEQ ID NO: 18238 - protein, 474 aa, Xanthomonas campestris; identical to SEQ ID NO: 4974

SEQ ID NO: 18239 - DNA, 2345 bp, Antirrhinum majus; identical to SEQ ID NO: 4975
  CDS (10)..(1836)

SEQ ID NO: 18240 - protein, 608 aa, Antirrhinum majus; identical to SEQ ID NO: 4976

SEQ ID NO: 18241 - DNA, 2211 bp, Ipomoea batatas; identical to SEQ ID NO: 4977
  CDS (93)..(1919)

SEQ ID NO: 18242 - protein, 608 aa, Ipomoea batatas; identical to SEQ ID NO: 4978

SEQ ID NO: 18243 - DNA, 2988 bp, Pisum sativum; identical to SEQ ID NO: 4979
  CDS (140)..(2398)

SEQ ID NO: 18244 - protein, 752 aa, Pisum sativum; identical to SEQ ID NO: 4980

SEQ ID NO: 18245 - DNA, 2329 bp, Arabidopsis thaliana; identical to SEQ ID NO: 4981
  CDS (67)..(2025)

SEQ ID NO: 18246 - protein, 652 aa, Arabidopsis thaliana; identical to SEQ ID NO: 4982

SEQ ID NO: 18247 - DNA, 4127 bp, Solanum tuberosum; identical to SEQ ID NO: 4983
  CDS (143)..(3835)

SEQ ID NO: 18248 - protein, 1230 aa, Solanum tuberosum; identical to SEQ ID NO: 4984

SEQ ID NO: 18249 - DNA, 25 bp, Artificial sequence
  Primer sequence
atgcaggttttacatgtatgttcag

SEQ ID NO: 18250 - DNA, 26 bp, Artificial sequence
  Primer sequence
ttatttcaagcgatagtaaagctcac

SEQ ID NO: 18251 - protein, 56 aa, Artificial sequence; identical to SEQ ID NO: 6176
  Consensus
  Variant (1)..(1): Xaa in position 1 is Gly or Ala
  Variant (2)..(4): Xaa in position 2 to 4 is any amino acid
  Variant (5)..(5): Xaa in position 5 is Ala, Ser or Cys
  Variant (6)..(7): Xaa in position 6 to 7 is any amino acid
  Variant (8)..(8): Xaa in position 8 is Val, Ile, Leu or Ala
  Variant (9)..(9): Xaa in position 9 is any amino acid
  Variant (10)..(10): Xaa in position 10 is Thr, Ala or Val
  Variant (13)..(14): Xaa in position 13 to 14 is any amino acid
  Variant (15)..(15): Xaa in position 15 is Tyr, Met or His
  Variant (16)..(16): Xaa in position 16 is Ala, Ser, Leu, Lys or Val
  Variant (17)..(17): Xaa in position 17 is any amino acid
  Variant (18)..(18): Xaa in position 18 is Glu, Gln or Asp
  Variant (19)..(19): Xaa in position 19 is Ile, Leu, Val or Glu
  Variant (20)..(28): Xaa in position 20 to 28 is any amino acid
  Variant (29)..(43): Xaa in position 29 to 43 is any or no amino acid
  Variant (44)..(44): Xaa in position 44 is Gly, Val or Tyr
  Variant (45)..(45): Xaa in position 45 is Ile or Val
  Variant (46)..(46): Xaa in position 46 is any amino acid
  Variant (49)..(49): Xaa in position 49 is Ile, Met, Val, Leu or Cys
  Variant (51)..(52): Xaa in position 51 to 52 is any amino acid
  Variant (53)..(53): Xaa in position 53 is any or no amino acid
  Variant (54)..(54): Xaa in position 54 is Trp, Tyr, Phe or Leu
  Variant (55)..(55): Xaa in position 55 is any amino acid
  Variant (56)..(56): Xaa in position 56 is Pro or Glu

SEQ ID NO: 18252 - protein, 65 aa, Artificial sequence; identical to SEQ ID NO: 6177
  Consensus
  Variant (1)..(1): Xaa in position 1 is Lys, Arg or Phe
  Variant (2)..(4): Xaa in position 2 to 4 is any amino acid
  Variant (5)..(5): Xaa in position 5 is Lys, Arg, Ala or Glu
  Variant (6)..(7): Xaa in position 6 to 7 is any amino acid
  Variant (8)..(8): Xaa in position 8 is Leu, Val or Ile
  Variant (9)..(11): Xaa in position 9 to 11 is any amino acid
  Variant (12)..(12): Xaa in position 12 is Leu, Val, Phe, Met or Thr
  Variant (13)..(13): Xaa in position 13 is any amino acid
  Variant (14)..(14): Xaa in position 14 is Leu, Ile, Phe or Val
  Variant (15)..(19): Xaa in position 15 to 19 is any amino acid
  Variant (20)..(22): Xaa in position 20 to 22 is any or no amino acid
  Variant (23)..(23): Xaa in position 23 is Leu, Val, Ile or Met
  Variant (24)..(24): Xaa in position 24 is Ile, Val, Phe, Leu, Tyr or Met
  Variant (25)..(26): Xaa in position 25 to 26 is any amino acid
  Variant (27)..(27): Xaa in position 27 is Ile or Val
  Variant (28)..(28): Xaa in position 28 is Gly, Ser, Thr, Cys or Ala
  Variant (30)..(30): Xaa in position 30 is Leu, Ile or Phe
  Variant (31)..(32): Xaa in position 31 to 32 is any amino acid
  Variant (33)..(33): Xaa in position 33 is any or no amino acid
  Variant (37)..(37): Xaa in position 37 is any amino acid
  Variant (38)..(38): Xaa in position 38 is Asp, His or Glu
  Variant (39)..(39): Xaa in position 39 is any amino acid
  Variant (40)..(40): Xaa in position 40 is Ile, Leu, Val, Met, Ala or Thr
  Variant (41)..(54): Xaa in position 41 to 54 is any amino acid
  Variant (55)..(59): Xaa in position 55 to 59 is any or no amino acid
  Variant (60)..(60): Xaa in position 60 is Val, Ile, Ala, Leu or Tyr
  Variant (61)..(61): Xaa in position 61 is Leu, Ile, Val, Met or Cys
  Variant (62)..(62): Xaa in position 62 is Leu, Val, Ile or Ala
  Variant (64)..(64): Xaa in position 64 is any amino acid
  Variant (65)..(65): Xaa in position 65 is Gly, Ala, Ser, Pro or Cys

SEQ ID NO: 18253 - protein, 51 aa, Artificial sequence; identical to SEQ ID NO: 6178
  Consensus
  Variant (1)..(1): Xaa in position 1 is Phe, Tyr, Leu or His
  Variant (2)..(5): Xaa in position 2 to 5 is any amino acid
  Variant (6)..(6): Xaa in position 6 is Ala, Ser, Ile or Val
  Variant (7)..(7): Xaa in position 7 is His, Arg or Gln
  Variant (8)..(8): Xaa in position 8 is any amino acid
  Variant (9)..(9): Xaa in position 9 is Ile, Val, Leu, Met or Ala
  Variant (10)..(10): Xaa in position 10 is any amino acid
  Variant (11)..(11): Xaa in position 11 is Ala, Gly or Thr
  Variant (12)..(12): Xaa in position 12 is Gly, Ala or Ser
  Variant (13)..(13): Xaa in position 13 is any amino acid
  Variant (15)..(16): Xaa in position 15 to 16 is any amino acid
  Variant (17)..(17): Xaa in position 17 is Leu, Ile, Val, Ala, Met or Cys
  Variant (18)..(18): Xaa in position 18 is Met, Ile, Val, His or Cys
  Variant (19)..(19): Xaa in position 19 is Pro or Thr
  Variant (21)..(21): Xaa in position 21 is any amino acid
  Variant (22)..(22): Xaa in position 22 is Phe or Tyr
  Variant (24)..(24): Xaa in position 24 is Pro or Ala
  Variant (25)..(25): Xaa in position 25 is Cys, Phe or Leu
  Variant (27)..(27): Xaa in position 27 is Leu or Ile
  Variant (28)..(28): Xaa in position 28 is any amino acid
  Variant (29)..(29): Xaa in position 29 is Gln, Asn or Pro
  Variant (30)..(30): Xaa in position 30 is Leu, Met or Ile
  Variant (31)..(31): Xaa in position 31 is any amino acid
  Variant (32)..(32): Xaa in position 32 is Ala, Gly or Ser
  Variant (33)..(33): Xaa in position 33 is Met, Leu or Gln
  Variant (34)..(34): Xaa in position 34 is any amino acid
  Variant (35)..(35): Xaa in position 35 is Tyr, Phe, Cys or Leu
  Variant (36)..(36): Xaa in position 36 is Gly, Ala or Asn
  Variant (37)..(37): Xaa in position 37 is Thr, Ser, Ala or Cys
  Variant (38)..(38): Xaa in position 38 is Val, Ile, Leu, Pro or Ala
  Variant (39)..(39): Xaa in position 39 is Pro, Cys or Val
  Variant (40)..(40): Xaa in position 40 is Ile, Val, Leu or Ala
  Variant (41)..(41): Xaa in position 41 is Val, Ala or Cys
  Variant (42)..(42): Xaa in position 42 is Arg, His, Ala, Ser or Thr
  Variant (43)..(43): Xaa in position 43 is any amino acid
  Variant (44)..(44): Xaa in position 44 is Thr or Val
  Variant (47)..(47): Xaa in position 47 is Leu or Ile
  Variant (48)..(48): Xaa in position 48 is any amino acid
  Variant (49)..(49): Xaa in position 49 is Asp or Glu
  Variant (50)..(50): Xaa in position 50 is Thr, Ser or Val
  Variant (51)..(51): Xaa in position 51 is Val or Ile

SEQ ID NO: 18254 - DNA, 1518 bp, Saccharomyces cerevisiae; identical to SEQ ID NO: 2533
  CDS (1)..(1518)

SEQ ID NO: 18255 - protein, 505 aa, Saccharomyces cerevisiae; identical to SEQ ID NO: 2534

SEQ ID NO: 18256 - DNA, 1548 bp, Mus musculus (house mouse); identical to SEQ ID NO: 2535
  CDS (1)..(1548)

SEQ ID NO: 18257 - protein, 515 aa, Mus musculus (house mouse); identical to SEQ ID NO: 2536

SEQ ID NO: 18258 - DNA, 1593 bp, Fugu rubripes (Japanese pufferfish); identical to SEQ ID NO: 2537
  CDS (1)..(1593)

SEQ ID NO: 18259 - protein, 530 aa, Fugu rubripes (Japanese pufferfish); identical to SEQ ID NO: 2538

SEQ ID NO: 18260 - DNA, 1506 bp, Vibrio cholerae; identical to SEQ ID NO: 2539
  CDS (1)..(1506)

SEQ ID NO: 18261 - protein, 501 aa, Vibrio cholerae; identical to SEQ ID NO: 2540

SEQ ID NO: 18262 - DNA, 1470 bp, Pseudomonas aeruginosa; identical to SEQ ID NO: 2541
  CDS (1)..(1470)

SEQ ID NO: 18263 - protein, 489 aa, Pseudomonas aeruginosa; identical to SEQ ID NO: 2542

SEQ ID NO: 18264 - DNA, 1485 bp, Staphylococcus aureus; identical to SEQ ID NO: 2543
  CDS (1)..(1485)

SEQ ID NO: 18265 - protein, 494 aa, Staphylococcus aureus; identical to SEQ ID NO: 2544

SEQ ID NO: 18266 - DNA, 1488 bp, Streptococcus pneumoniae; identical to SEQ ID NO: 2545
  CDS (1)..(1488)

SEQ ID NO: 18267 - protein, 495 aa, Streptococcus pneumoniae; identical to SEQ ID NO: 2546

SEQ ID NO: 18268 - DNA, 1476 bp, Salmonella enterica subsp. enterica serovar Typhi; identical to SEQ ID NO: 2547
  CDS (1)..(1476)

SEQ ID NO: 18269 - protein, 491 aa, Salmonella enterica subsp. enterica serovar Typhi; identical to SEQ ID NO: 2548

SEQ ID NO: 18270 - DNA, 1476 bp, Agrobacterium tumefaciens; identical to SEQ ID NO: 2549
  CDS (1)..(1476)

SEQ ID NO: 18271 - protein, 491 aa, Agrobacterium tumefaciens; identical to SEQ ID NO: 2550

SEQ ID NO: 18272 - DNA, 1530 bp, Nostoc sp. PCC 7120; identical to SEQ ID NO: 2551
  CDS (1)..(1530)

SEQ ID NO: 18273 - protein, 509 aa, Nostoc sp. PCC 7120; identical to SEQ ID NO: 2552

SEQ ID NO: 18274 - DNA, 1386 bp, Agrobacterium tumefaciens; identical to SEQ ID NO: 2553
  CDS (1)..(1386)

SEQ ID NO: 18275 - protein, 461 aa, Agrobacterium tumefaciens; identical to SEQ ID NO: 2554

SEQ ID NO: 18276 - DNA, 1476 bp, Brucella melitensis; identical to SEQ ID NO: 2555
  CDS (1)..(1476)

SEQ ID NO: 18277 - protein, 491 aa, Brucella melitensis; identical to SEQ ID NO: 2556

SEQ ID NO: 18278 - DNA, 1458 bp, Zymomonas mobilis; identical to SEQ ID NO: 2557
  CDS (1)..(1458)

SEQ ID NO: 18279 - protein, 485 aa, Zymomonas mobilis; identical to SEQ ID NO: 2558

SEQ ID NO: 18280 - DNA, 1470 bp, Bacillus subtilis; identical to SEQ ID NO: 2559
  CDS (1)..(1470)

SEQ ID NO: 18281 - protein, 489 aa, Bacillus subtilis; identical to SEQ ID NO: 2560

SEQ ID NO: 18282 - DNA, 1401 bp, Mycobacterium tuberculosis; identical to SEQ ID NO: 2561
  CDS (1)..(1401)

SEQ ID NO: 18283 - protein, 466 aa, Mycobacterium tuberculosis; identical to SEQ ID NO: 2562

SEQ ID NO: 18284 - DNA, 1545 bp, Mycobacterium tuberculosis; identical to SEQ ID NO: 2563
  CDS (1)..(1545)

SEQ ID NO: 18285 - protein, 514 aa, Mycobacterium tuberculosis; identical to SEQ ID NO: 2564

SEQ ID NO: 18286 - DNA, 1320 bp, Chlamydia trachomatis; identical to SEQ ID NO: 2565
  CDS (1)..(1320)

SEQ ID NO: 18287 - protein, 439 aa, Chlamydia trachomatis; identical to SEQ ID NO: 2566

SEQ ID NO: 18288 - DNA, 1773 bp, Deinococcus radiodurans; identical to SEQ ID NO: 2567
  CDS (1)..(1773)

SEQ ID NO: 18289 - protein, 590 aa, Deinococcus radiodurans; identical to SEQ ID NO: 2568

SEQ ID NO: 18290 - DNA, 1467 bp, Pseudomonas aeruginosa; identical to SEQ ID NO: 2569
  CDS (1)..(1467)

SEQ ID NO: 18291 - protein, 488 aa, Pseudomonas aeruginosa; identical to SEQ ID NO: 2570

SEQ ID NO: 18292 - DNA, 1422 bp, Caulobacter crescentus; identical to SEQ ID NO: 2571
  CDS (1)..(1422)

SEQ ID NO: 18293 - protein, 473 aa, Caulobacter crescentus; identical to SEQ ID NO: 2572

SEQ ID NO: 18294 - DNA, 1437 bp, Borrelia burgdorferi (Lyme disease spirochete); identical to SEQ ID NO: 2573
  CDS (1)..(1437)

SEQ ID NO: 18295 - protein, 478 aa, Borrelia burgdorferi (Lyme disease spirochete); identical to SEQ ID NO: 2574

SEQ ID NO: 18296 - DNA, 1539 bp, Chlamydophila pneumoniae, Chlamydia pneumoniae; identical to SEQ ID NO: 2575
  CDS (1)..(1539)

SEQ ID NO: 18297 - protein, 512 aa, Chlamydophila pneumoniae, Chlamydia pneumoniae; identical to SEQ ID NO: 2576

SEQ ID NO: 18298 - DNA, 1476 bp, Escherichia coli; identical to SEQ ID NO: 2577
  CDS (1)..(1476)

SEQ ID NO: 18299 - protein, 491 aa, Escherichia coli; identical to SEQ ID NO: 2578

SEQ ID NO: 18300 - DNA, 1548 bp, Treponema pallidum subsp. pallidum (syphilis spirochete); identical to SEQ ID NO: 2579
  CDS (1)..(1548)

SEQ ID NO: 18301 - protein, 515 aa, Treponema pallidum subsp. pallidum (syphilis spirochete); identical to SEQ ID NO: 2580

SEQ ID NO: 18302 - DNA, 1476 bp, Buchnera sp; identical to SEQ ID NO: 2581
  CDS (1)..(1476)

SEQ ID NO: 18303 - protein, 491 aa, Buchnera sp; identical to SEQ ID NO: 2582

SEQ ID NO: 18304 - DNA, 1512 bp, Lactococcus lactis subsp. lactis; identical to SEQ ID NO: 2583
  CDS (1)..(1512)

SEQ ID NO: 18305 - protein, 503 aa, Lactococcus lactis subsp. lactis; identical to SEQ ID NO: 2584

SEQ ID NO: 18306 - DNA, 1572 bp, Drosophila melanogaster; identical to SEQ ID NO: 2585
  CDS (1)..(1572)

SEQ ID NO: 18307 - protein, 523 aa, Drosophila melanogaster; identical to SEQ ID NO: 2586

SEQ ID NO: 18308 - DNA, 1575 bp, Synechococcus sp; identical to SEQ ID NO: 2587
  CDS (1)..(1575)

SEQ ID NO: 18309 - protein, 524 aa, Synechococcus sp; identical to SEQ ID NO: 2588

SEQ ID NO: 18310 - DNA, 1485 bp, Haemophilus influenzae; identical to SEQ ID NO: 2589
  CDS (1)..(1485)

SEQ ID NO: 18311 - protein, 494 aa, Haemophilus influenzae; identical to SEQ ID NO: 2590

SEQ ID NO: 18312 - DNA, 1446 bp, Neisseria meningitidis; identical to SEQ ID NO: 2591
  CDS (1)..(1446)

SEQ ID NO: 18313 - protein, 481 aa, Neisseria meningitidis; identical to SEQ ID NO: 2592

SEQ ID NO: 18314 - DNA, 1278 bp, Helicobacter pylori; identical to SEQ ID NO: 2593
  CDS (1)..(1278)

SEQ ID NO: 18315 - protein, 425 aa, Helicobacter pylori; identical to SEQ ID NO: 2594

SEQ ID NO: 18316 - DNA, 1434 bp, Xylella fastidiosa; identical to SEQ ID NO: 2595
  CDS (1)..(1434)

SEQ ID NO: 18317 - protein, 477 aa, Xylella fastidiosa; identical to SEQ ID NO: 2596

SEQ ID NO: 18318 - DNA, 1296 bp, Aquifex aeolicus; identical to SEQ ID NO: 2597
  CDS (1)..(1296)

SEQ ID NO: 18319 - protein, 431 aa, Aquifex aeolicus; identical to SEQ ID NO: 2598

SEQ ID NO: 18320 - DNA, 1491 bp, Thermotoga maritima; identical to SEQ ID NO: 2599
  CDS (1)..(1491)

SEQ ID NO: 18321 - protein, 496 aa, Thermotoga maritima; identical to SEQ ID NO: 2600

SEQ ID NO: 18322 - DNA, 1494 bp, Kluyveromyces marxianus var. lactis, Candida sphaerica; identical to SEQ ID NO: 2601
  CDS (1)..(1494)

SEQ ID NO: 18323 - protein, 497 aa, Kluyveromyces marxianus var. lactis, Candida sphaerica; identical to SEQ ID NO: 2602

SEQ ID NO: 18324 - DNA, 2813 bp, Erwinia chrysanthemi; identical to SEQ ID NO: 2603
  CDS (322)..(1797)

SEQ ID NO: 18325 - protein, 491 aa, Erwinia chrysanthemi; identical to SEQ ID NO: 2604

SEQ ID NO: 18326 - DNA, 3244 bp, Plasmodium falciparum; identical to SEQ ID NO: 2605
  CDS (184)..(2916)

SEQ ID NO: 18327 - protein, 910 aa, Plasmodium falciparum; identical to SEQ ID NO: 2606

SEQ ID NO: 18328 - DNA, 1785 bp, Medicago sativa (alfalfa); identical to SEQ ID NO: 2607
  CDS (38)..(1585)

SEQ ID NO: 18329 - protein, 515 aa, Medicago sativa (alfalfa); identical to SEQ ID NO: 2608

SEQ ID NO: 18330 - DNA, 1689 bp, Solanum tuberosum (potato); identical to SEQ ID NO: 2609
  CDS (46)..(1581)

SEQ ID NO: 18331 - protein, 511 aa, Solanum tuberosum (potato); identical to SEQ ID NO: 2610

SEQ ID NO: 18332 - DNA, 1530 bp, Synechocystis sp; identical to SEQ ID NO: 2611
  CDS (1)..(1530)

SEQ ID NO: 18333 - protein, 509 aa, Synechocystis sp; identical to SEQ ID NO: 2612

SEQ ID NO: 18334 - DNA, 1953 bp, Nicotiana tabacum (common tobacco); identical to SEQ ID NO: 2613
  CDS (43)..(1824)

SEQ ID NO: 18335 - protein, 593 aa, Nicotiana tabacum (common tobacco); identical to SEQ ID NO: 2614

SEQ ID NO: 18336 - DNA, 1869 bp, Nicotiana tabacum (common tobacco); identical to SEQ ID NO: 2615
  CDS (22)..(1788)

SEQ ID NO: 18337 - protein, 588 aa, Nicotiana tabacum (common tobacco); identical to SEQ ID NO: 2616

SEQ ID NO: 18338 - DNA, 2058 bp, Solanum tuberosum (potato); identical to SEQ ID NO: 2617
  CDS (41)..(1774)

SEQ ID NO: 18339 - protein, 577 aa, Solanum tuberosum (potato); identical to SEQ ID NO: 2618

SEQ ID NO: 18340 - DNA, 2049 bp, Spinacia oleracea (spinach); identical to SEQ ID NO: 2619
  CDS (147)..(1871)

SEQ ID NO: 18341 - protein, 574 aa, Spinacia oleracea (spinach); identical to SEQ ID NO: 2620

SEQ ID NO: 18342 - DNA, 2359 bp, Petroselinum crispum (parsley); identical to SEQ ID NO: 2621
  CDS (172)..(1986)

SEQ ID NO: 18343 - protein, 604 aa, Petroselinum crispum (parsley); identical to SEQ ID NO: 2622

SEQ ID NO: 18344 - DNA, 1848 bp, Petroselinum crispum (parsley); identical to SEQ ID NO: 2623
  CDS (41)..(1528)

SEQ ID NO: 18345 - protein, 495 aa, Petroselinum crispum (parsley); identical to SEQ ID NO: 2624

SEQ ID NO: 18346 - DNA, 1957 bp, Petroselinum crispum (parsley); identical to SEQ ID NO: 2625
  CDS (74)..(1678)

SEQ ID NO: 18347 - protein, 534 aa, Petroselinum crispum (parsley); identical to SEQ ID NO: 2626

SEQ ID NO: 18348 - DNA, 1569 bp, Caenorhabditis elegans; identical to SEQ ID NO: 2627
  CDS (1)..(1569)

SEQ ID NO: 18349 - protein, 522 aa, Caenorhabditis elegans; identical to SEQ ID NO: 2628

SEQ ID NO: 18350 - DNA, 1779 bp, Streptomyces coelicolor; identical to SEQ ID NO: 2629
  CDS (1)..(1779)

SEQ ID NO: 18351 - protein, 592 aa, Streptomyces coelicolor; identical to SEQ ID NO: 2630

SEQ ID NO: 18352 - DNA, 1524 bp, Streptomyces coelicolor; identical to SEQ ID NO: 2631
  CDS (1)..(1524)

SEQ ID NO: 18353 - protein, 507 aa, Streptomyces coelicolor; identical to SEQ ID NO: 2632

SEQ ID NO: 18354 - DNA, 1422 bp, Schizosaccharomyces pombe; identical to SEQ ID NO: 2633
  CDS (1)..(1422)

SEQ ID NO: 18355 - protein, 473 aa, Schizosaccharomyces pombe; identical to SEQ ID NO: 2634

SEQ ID NO: 18356 - DNA, 1503 bp, Schizosaccharomyces pombe; identical to SEQ ID NO: 2635
  CDS (1)..(1503)

SEQ ID NO: 18357 - protein, 500 aa, Schizosaccharomyces pombe; identical to SEQ ID NO: 2636

SEQ ID NO: 18358 - DNA, 1428 bp, Schizosaccharomyces pombe; identical to SEQ ID NO: 2637
  CDS (1)..(1428)

SEQ ID NO: 18359 - protein, 475 aa, Schizosaccharomyces pombe; identical to SEQ ID NO: 2638

SEQ ID NO: 18360 - DNA, 1461 bp, Leuconostoc mesenteroides; identical to SEQ ID NO: 2639
  CDS (1)..(1461)

SEQ ID NO: 18361 - protein, 486 aa, Leuconostoc mesenteroides; identical to SEQ ID NO: 2640

SEQ ID NO: 18362 - DNA, 3038 bp, Corynebacterium glutamicum; identical to SEQ ID NO: 2641
  CDS (115)..(1659)

SEQ ID NO: 18363 - protein, 514 aa, Corynebacterium glutamicum; identical to SEQ ID NO: 2642

SEQ ID NO: 18364 - DNA, 1852 bp, Nicotiana tabacum; identical to SEQ ID NO: 2643
  CDS (102)..(1634)

SEQ ID NO: 18365 - protein, 510 aa, Nicotiana tabacum; identical to SEQ ID NO: 2644

SEQ ID NO: 18366 - DNA, 1821 bp, Nicotiana tabacum; identical to SEQ ID NO: 2645
  CDS (88)..(1623)

SEQ ID NO: 18367 - protein, 511 aa, Nicotiana tabacum; identical to SEQ ID NO: 2646

SEQ ID NO: 18368 - DNA, 1808 bp, Chlamydia trachomatis; identical to SEQ ID NO: 2647
  CDS (105)..(1643)

SEQ ID NO: 18369 - protein, 512 aa, Chlamydia trachomatis; identical to SEQ ID NO: 2648

SEQ ID NO: 18370 - DNA, 2750 bp, Plasmodium falciparum; identical to SEQ ID NO: 2649
  CDS (48)..(2258)

SEQ ID NO: 18371 - protein, 736 aa, Plasmodium falciparum; identical to SEQ ID NO: 2650

SEQ ID NO: 18372 - DNA, 1509 bp, Debaryomyces hansenii; identical to SEQ ID NO: 2651
  CDS (1)..(1509)

SEQ ID NO: 18373 - protein, 502 aa, Debaryomyces hansenii; identical to SEQ ID NO: 2652

SEQ ID NO: 18374 - DNA, 1503 bp, Candida glabrata; identical to SEQ ID NO: 2653
  CDS (1)..(1503)

SEQ ID NO: 18375 - protein, 500 aa, Candida glabrata; identical to SEQ ID NO: 2654

SEQ ID NO: 18376 - DNA, 1485 bp, Bacillus thuringiensis serovar konkukian str; identical to SEQ ID NO: 2655
  CDS (1)..(1485)

SEQ ID NO: 18377 - protein, 494 aa, Bacillus thuringiensis serovar konkukian str; identical to SEQ ID NO: 2656

SEQ ID NO: 18378 - DNA, 1554 bp, Oryza sativa; identical to SEQ ID NO: 2657
  CDS (1)..(1554)

SEQ ID NO: 18379 - protein, 517 aa, Oryza sativa; identical to SEQ ID NO: 2658

SEQ ID NO: 18380 - DNA, 1500 bp, Photobacterium profundum; identical to SEQ ID NO: 2659
  CDS (1)..(1500)

SEQ ID NO: 18381 - protein, 499 aa, Photobacterium profundum; identical to SEQ ID NO: 2660

SEQ ID NO: 18382 - DNA, 1551 bp, Parachlamydia sp; identical to SEQ ID NO: 2661
  CDS (1)..(1551)

SEQ ID NO: 18383 - protein, 516 aa, Parachlamydia sp; identical to SEQ ID NO: 2662

SEQ ID NO: 18384 - DNA, 1515 bp, Rhodopseudomonas palustris; identical to SEQ ID NO: 2663
  CDS (1)..(1515)

SEQ ID NO: 18385 - protein, 504 aa, Rhodopseudomonas palustris; identical to SEQ ID NO: 2664

SEQ ID NO: 18386 - DNA, 1650 bp, Corynebacterium diphtheriae; identical to SEQ ID NO: 2665
  CDS (1)..(1650)

SEQ ID NO: 18387 - protein, 549 aa, Corynebacterium diphtheriae; identical to SEQ ID NO: 2666

SEQ ID NO: 18388 - DNA, 1446 bp, uncultured bacterium 581; identical to SEQ ID NO: 2667
  CDS (1)..(1446)

SEQ ID NO: 18389 - protein, 481 aa, uncultured bacterium 581; identical to SEQ ID NO: 2668

SEQ ID NO: 18390 - DNA, 1602 bp, Nonomuraea sp; identical to SEQ ID NO: 2669
  CDS (1)..(1602)

SEQ ID NO: 18391 - protein, 533 aa, Nonomuraea sp; identical to SEQ ID NO: 2670

SEQ ID NO: 18392 - DNA, 1476 bp, Listeria monocytogenes; identical to SEQ ID NO: 2671
  CDS (1)..(1476)

SEQ ID NO: 18393 - protein, 491 aa, Listeria monocytogenes; identical to SEQ ID NO: 2672

SEQ ID NO: 18394 - DNA, 1485 bp, Bacillus cereus; identical to SEQ ID NO: 2673
  CDS (1)..(1485)

SEQ ID NO: 18395 - protein, 494 aa, Bacillus cereus; identical to SEQ ID NO: 2674

SEQ ID NO: 18396 - DNA, 1410 bp, Mycobacterium paratuberculosis; identical to SEQ ID NO: 2675
  CDS (1)..(1410)

SEQ ID NO: 18397 - protein, 469 aa, Mycobacterium paratuberculosis; identical to SEQ ID NO: 2676

SEQ ID NO: 18398 - DNA, 2454 bp, Mycobacterium paratuberculosis; identical to SEQ ID NO: 2677
  CDS (1)..(2454)

SEQ ID NO: 18399 - protein, 817 aa, Mycobacterium paratuberculosis; identical to SEQ ID NO: 2678

SEQ ID NO: 18400 - DNA, 1545 bp, Mycobacterium paratuberculosis; identical to SEQ ID NO: 2679
  CDS (1)..(1545)

SEQ ID NO: 18401 - protein, 514 aa, Mycobacterium paratuberculosis; identical to SEQ ID NO: 2680

SEQ ID NO: 18402 - DNA, 1449 bp, Lactobacillus johnsonii; identical to SEQ ID NO: 2681
  CDS (1)..(1449)

SEQ ID NO: 18403 - protein, 482 aa, Lactobacillus johnsonii; identical to SEQ ID NO: 2682

SEQ ID NO: 18404 - DNA, 1539 bp, Ashbya gossypii; identical to SEQ ID NO: 2683
  CDS (1)..(1539)

SEQ ID NO: 18405 - protein, 512 aa, Ashbya gossypii; identical to SEQ ID NO: 2684

SEQ ID NO: 18406 - DNA, 1734 bp, Oryza sativa; identical to SEQ ID NO: 2685
  CDS (1)..(1734)

SEQ ID NO: 18407 - protein, 577 aa, Oryza sativa; identical to SEQ ID NO: 2686

SEQ ID NO: 18408 - DNA, 1467 bp, Gluconobacter oxydans; identical to SEQ ID NO: 2687
  CDS (1)..(1467)

SEQ ID NO: 18409 - protein, 488 aa, Gluconobacter oxydans; identical to SEQ ID NO: 2688

SEQ ID NO: 18410 - DNA, 1581 bp, Vibrio vulnificus; identical to SEQ ID NO: 2689
  CDS (1)..(1581)

SEQ ID NO: 18411 - protein, 526 aa, Vibrio vulnificus; identical to SEQ ID NO: 2690

SEQ ID NO: 18412 - DNA, 1476 bp, Photorhabdus luminescens; identical to SEQ ID NO: 2691
  CDS (1)..(1476)

SEQ ID NO: 18413 - protein, 491 aa, Photorhabdus luminescens; identical to SEQ ID NO: 2692

SEQ ID NO: 18414 - DNA, 1539 bp, Gloeobacter violaceus; identical to SEQ ID NO: 2693
  CDS (1)..(1539)

SEQ ID NO: 18415 - protein, 512 aa, Gloeobacter violaceus; identical to SEQ ID NO: 2694

SEQ ID NO: 18416 - DNA, 1539 bp, Gloeobacter violaceus; identical to SEQ ID NO: 2695
  CDS (1)..(1539)

SEQ ID NO: 18417 - protein, 512 aa, Gloeobacter violaceus; identical to SEQ ID NO: 2696

SEQ ID NO: 18418 - DNA, 1479 bp, Chromobacterium violaceum; identical to SEQ ID NO: 2697
  CDS (1)..(1479)

SEQ ID NO: 18419 - protein, 492 aa, Chromobacterium violaceum; identical to SEQ ID NO: 2698

SEQ ID NO: 18420 - DNA, 2229 bp, Giardia lamblia ATCC 50803; identical to SEQ ID NO: 2699
  CDS (1)..(2229)

SEQ ID NO: 18421 - protein, 742 aa, Giardia lamblia ATCC 50803; identical to SEQ ID NO: 2700

SEQ ID NO: 18422 - DNA, 2850 bp, Plasmodium yoelii yoelii; identical to SEQ ID NO: 2701
  CDS (1)..(2850)

SEQ ID NO: 18423 - protein, 949 aa, Plasmodium yoelii yoelii; identical to SEQ ID NO: 2702

SEQ ID NO: 18424 - DNA, 1476 bp, Neurospora crassa; identical to SEQ ID NO: 2703
  CDS (1)..(1476)

SEQ ID NO: 18425 - protein, 491 aa, Neurospora crassa; identical to SEQ ID NO: 2704

SEQ ID NO: 18426 - DNA, 1524 bp, Synechococcus sp; identical to SEQ ID NO: 2705
  CDS (1)..(1524)

SEQ ID NO: 18427 - protein, 507 aa, Synechococcus sp; identical to SEQ ID NO: 2706

SEQ ID NO: 18428 - DNA, 1455 bp, Rhodopirellula baltica; identical to SEQ ID NO: 2707
  CDS (1)..(1455)

SEQ ID NO: 18429 - protein, 484 aa, Rhodopirellula baltica; identical to SEQ ID NO: 2708

SEQ ID NO: 18430 - DNA, 1524 bp, Prochlorococcus marinus subsp; identical to SEQ ID NO: 2709
  CDS (1)..(1524)

SEQ ID NO: 18431 - protein, 507 aa, Prochlorococcus marinus subsp; identical to SEQ ID NO: 2710

SEQ ID NO: 18432 - DNA, 1524 bp, Prochlorococcus marinus; identical to SEQ ID NO: 2711
  CDS (1)..(1524)

SEQ ID NO: 18433 - protein, 507 aa, Prochlorococcus marinus; identical to SEQ ID NO: 2712

SEQ ID NO: 18434 - DNA, 1521 bp, Prochlorococcus marinus; identical to SEQ ID NO: 2713
  CDS (1)..(1521)

SEQ ID NO: 18435 - protein, 506 aa, Prochlorococcus marinus; identical to SEQ ID NO: 2714

SEQ ID NO: 18436 - DNA, 1488 bp, Haemophilus ducreyi; identical to SEQ ID NO: 2715
  CDS (1)..(1488)

SEQ ID NO: 18437 - protein, 495 aa, Haemophilus ducreyi; identical to SEQ ID NO: 2716

SEQ ID NO: 18438 - DNA, 1497 bp, Candidatus Blochmannia floridanus; identical to SEQ ID NO: 2717
  CDS (1)..(1497)

SEQ ID NO: 18439 - protein, 498 aa, Candidatus Blochmannia floridanus; identical to SEQ ID NO: 2718

SEQ ID NO: 18440 - DNA, 1768 bp, Oryza sativa; identical to SEQ ID NO: 2719
  CDS (2)..(1768)

SEQ ID NO: 18441 - protein, 588 aa, Oryza sativa; identical to SEQ ID NO: 2720

SEQ ID NO: 18442 - DNA, 1548 bp, Bos indicus; identical to SEQ ID NO: 2721
  CDS (1)..(1548)

SEQ ID NO: 18443 - protein, 515 aa, Bos indicus; identical to SEQ ID NO: 2722

SEQ ID NO: 18444 - DNA, 1536 bp, Chlamydophila caviae; identical to SEQ ID NO: 2723
  CDS (1)..(1536)

SEQ ID NO: 18445 - protein, 511 aa, Chlamydophila caviae; identical to SEQ ID NO: 2724

SEQ ID NO: 18446 - DNA, 1524 bp, Streptomyces avermitilis; identical to SEQ ID NO: 2725
  CDS (1)..(1524)

SEQ ID NO: 18447 - protein, 507 aa, Streptomyces avermitilis; identical to SEQ ID NO: 2726

SEQ ID NO: 18448 - DNA, 1647 bp, Streptomyces avermitilis; identical to SEQ ID NO: 2727
  CDS (1)..(1647)

SEQ ID NO: 18449 - protein, 548 aa, Streptomyces avermitilis; identical to SEQ ID NO: 2728

SEQ ID NO: 18450 - DNA, 1491 bp, Nitrosomonas europaea; identical to SEQ ID NO: 2729
  CDS (1)..(1491)

SEQ ID NO: 18451 - protein, 496 aa, Nitrosomonas europaea; identical to SEQ ID NO: 2730

SEQ ID NO: 18452 - DNA, 1524 bp, Enterococcus faecalis; identical to SEQ ID NO: 2731
  CDS (1)..(1524)

SEQ ID NO: 18453 - protein, 507 aa, Enterococcus faecalis; identical to SEQ ID NO: 2732

SEQ ID NO: 18454 - DNA, 1464 bp, Tropheryma whipplei; identical to SEQ ID NO: 2733
  CDS (1)..(1464)

SEQ ID NO: 18455 - protein, 487 aa, Tropheryma whipplei; identical to SEQ ID NO: 2734

SEQ ID NO: 18456 - DNA, 2145 bp, Leishmania mexicana; identical to SEQ ID NO: 2735
  CDS (298)..(1986)

SEQ ID NO: 18457 - protein, 562 aa, Leishmania mexicana; identical to SEQ ID NO: 2736

SEQ ID NO: 18458 - DNA, 1494 bp, Dictyostelium discoideum; identical to SEQ ID NO: 2737
  CDS (1)..(1494)

SEQ ID NO: 18459 - protein, 497 aa, Dictyostelium discoideum; identical to SEQ ID NO: 2738

SEQ ID NO: 18460 - DNA, 1503 bp, Xylella fastidiosa; identical to SEQ ID NO: 2739
  CDS (1)..(1503)

SEQ ID NO: 18461 - protein, 500 aa, Xylella fastidiosa; identical to SEQ ID NO: 2740

SEQ ID NO: 18462 - DNA, 1506 bp, Vibrio parahaemolyticus; identical to SEQ ID NO: 2741
  CDS (1)..(1506)

SEQ ID NO: 18463 - protein, 501 aa, Vibrio parahaemolyticus; identical to SEQ ID NO: 2742

SEQ ID NO: 18464 - DNA, 1533 bp, Pseudomonas syringae; identical to SEQ ID NO: 2743
  CDS (1)..(1533)

SEQ ID NO: 18465 - protein, 510 aa, Pseudomonas syringae; identical to SEQ ID NO: 2744

SEQ ID NO: 18466 - DNA, 1470 bp, Pseudomonas syringae; identical to SEQ ID NO: 2745
  CDS (1)..(1470)

SEQ ID NO: 18467 - protein, 489 aa, Pseudomonas syringae; identical to SEQ ID NO: 2746

SEQ ID NO: 18468 - DNA, 1458 bp, Pseudomonas putida; identical to SEQ ID NO: 2747
  CDS (1)..(1458)

SEQ ID NO: 18469 - protein, 485 aa, Pseudomonas putida; identical to SEQ ID NO: 2748

SEQ ID NO: 18470 - DNA, 1506 bp, Pseudomonas putida; identical to SEQ ID NO: 2749
  CDS (1)..(1506)

SEQ ID NO: 18471 - protein, 501 aa, Pseudomonas putida; identical to SEQ ID NO: 2750

SEQ ID NO: 18472 - DNA, 1470 bp, Pseudomonas putida; identical to SEQ ID NO: 2751
  CDS (1)..(1470)

SEQ ID NO: 18473 - protein, 489 aa, Pseudomonas putida; identical to SEQ ID NO: 2752

SEQ ID NO: 18474 - DNA, 1485 bp, Lactobacillus plantarum; identical to SEQ ID NO: 2753
  CDS (1)..(1485)

SEQ ID NO: 18475 - protein, 494 aa, Lactobacillus plantarum; identical to SEQ ID NO: 2754

SEQ ID NO: 18476 - DNA, 1440 bp, Clostridium tetani; identical to SEQ ID NO: 2755
  CDS (1)..(1440)

SEQ ID NO: 18477 - protein, 479 aa, Clostridium tetani; identical to SEQ ID NO: 2756

SEQ ID NO: 18478 - DNA, 1512 bp, Bradyrhizobium japonicum; identical to SEQ ID NO: 2757
  CDS (1)..(1512)

SEQ ID NO: 18479 - protein, 503 aa, Bradyrhizobium japonicum; identical to SEQ ID NO: 2758

SEQ ID NO: 18480 - DNA, 1497 bp, Bacteroides thetaiotaomicron; identical to SEQ ID NO: 2759
  CDS (1)..(1497)

SEQ ID NO: 18481 - protein, 498 aa, Bacteroides thetaiotaomicron; identical to SEQ ID NO: 2760

SEQ ID NO: 18482 - DNA, 4583 bp, Mus musculus; identical to SEQ ID NO: 2761
  CDS (119)..(2488)

SEQ ID NO: 18483 - protein, 789 aa, Mus musculus; identical to SEQ ID NO: 2762

SEQ ID NO: 18484 - DNA, 1485 bp, Staphylococcus epidermidis; identical to SEQ ID NO: 2763
  CDS (1)..(1485)

SEQ ID NO: 18485 - protein, 494 aa, Staphylococcus epidermidis; identical to SEQ ID NO: 2764

SEQ ID NO: 18486 - DNA, 1590 bp, Yersinia pestis; identical to SEQ ID NO: 2765
  CDS (1)..(1590)

SEQ ID NO: 18487 - protein, 529 aa, Yersinia pestis; identical to SEQ ID NO: 2766

SEQ ID NO: 18488 - DNA, 1530 bp, Synechococcus elongatus; identical to SEQ ID NO: 2767
  CDS (1)..(1530)

SEQ ID NO: 18489 - protein, 509 aa, Synechococcus elongatus; identical to SEQ ID NO: 2768

SEQ ID NO: 18490 - DNA, 1473 bp, Shewanella oneidensis; identical to SEQ ID NO: 2769
  CDS (1)..(1473)

SEQ ID NO: 18491 - protein, 490 aa, Shewanella oneidensis; identical to SEQ ID NO: 2770

SEQ ID NO: 18492 - DNA, 1476 bp, Oceanobacillus iheyensis; identical to SEQ ID NO: 2771
  CDS (1)..(1476)

SEQ ID NO: 18493 - protein, 491 aa, Oceanobacillus iheyensis; identical to SEQ ID NO: 2772

SEQ ID NO: 18494 - DNA, 1344 bp, Corynebacterium efficiens; identical to SEQ ID NO: 2773
  CDS (1)..(1344)

SEQ ID NO: 18495 - protein, 447 aa, Corynebacterium efficiens; identical to SEQ ID NO: 2774

SEQ ID NO: 18496 - DNA, 1545 bp, Corynebacterium efficiens; identical to SEQ ID NO: 2775
  CDS (1)..(1545)

SEQ ID NO: 18497 - protein, 514 aa, Corynebacterium efficiens; identical to SEQ ID NO: 2776

SEQ ID NO: 18498 - DNA, 1668 bp, Bifidobacterium longum; identical to SEQ ID NO: 2777
  CDS (1)..(1668)

SEQ ID NO: 18499 - protein, 555 aa, Bifidobacterium longum; identical to SEQ ID NO: 2778

SEQ ID NO: 18500 - DNA, 1284 bp, Rhodococcus opacus; identical to SEQ ID NO: 2779
  CDS (1)..(1284)

SEQ ID NO: 18501 - protein, 427 aa, Rhodococcus opacus; identical to SEQ ID NO: 2780

SEQ ID NO: 18502 - DNA, 2879 bp, Leishmania guyanensis; identical to SEQ ID NO: 2781
  misc_feature (1992)..(2321): n is a, c, g, or t
  misc_feature (2700)..(2700): n is a, c, g, or t
  misc_feature (2840)..(2840): n is a, c, g, or t
  CDS (205)..(1893)

SEQ ID NO: 18503 - protein, 562 aa, Leishmania guyanensis; identical to SEQ ID NO: 2782

SEQ ID NO: 18504 - DNA, 1689 bp, Leishmania mexicana; identical to SEQ ID NO: 2783
  misc_feature (227)..(444): n is a, c, g, or t
  misc_feature (1475)..(1528): n is a, c, g, or t
  CDS (1)..(1689)

SEQ ID NO: 18505 - protein, 562 aa, Leishmania mexicana; identical to SEQ ID NO: 2784
  misc_feature (76)..(148): Xaa can be any naturally occuring amino acid
  misc_feature (187)..(187): Xaa can be any naturally occuring amino acid
  misc_feature (197)..(197): Xaa can be any naturally occuring amino acid
  misc_feature (224)..(224): Xaa can be any naturally occuring amino acid
  misc_feature (243)..(243): Xaa can be any naturally occuring amino acid
  misc_feature (250)..(250): Xaa can be any naturally occuring amino acid
  misc_feature (492)..(510): Xaa can be any naturally occuring amino acid

SEQ ID NO: 18506 - DNA, 2916 bp, Leishmania amazonensis; identical to SEQ ID NO: 2785
  misc_feature (2191)..(2311): n is a, c, g, or t
  CDS (207)..(1895)

SEQ ID NO: 18507 - protein, 562 aa, Leishmania amazonensis; identical to SEQ ID NO: 2786
  misc_feature (463)..(463): Xaa can be any naturally occuring amino acid
  misc_feature (481)..(481): Xaa can be any naturally occuring amino acid

SEQ ID NO: 18508 - DNA, 1440 bp, Chlorobium tepidum; identical to SEQ ID NO: 2787
  CDS (1)..(1440)

SEQ ID NO: 18509 - protein, 479 aa, Chlorobium tepidum; identical to SEQ ID NO: 2788

SEQ ID NO: 18510 - DNA, 2187 bp, Methylobacterium extorquens; identical to SEQ ID NO: 2789
  CDS (640)..(2187)

SEQ ID NO: 18511 - protein, 515 aa, Methylobacterium extorquens; identical to SEQ ID NO: 2790

SEQ ID NO: 18512 - DNA, 1476 bp, Bartonella henselae; identical to SEQ ID NO: 2791
  CDS (1)..(1476)

SEQ ID NO: 18513 - protein, 491 aa, Bartonella henselae; identical to SEQ ID NO: 2792

SEQ ID NO: 18514 - DNA, 2266 bp, Toxoplasma gondii; identical to SEQ ID NO: 2793
  CDS (169)..(1851)

SEQ ID NO: 18515 - protein, 560 aa, Toxoplasma gondii; identical to SEQ ID NO: 2794

SEQ ID NO: 18516 - DNA, 1923 bp, Xanthomonas campestris; identical to SEQ ID NO: 2795
  CDS (1)..(1923)

SEQ ID NO: 18517 - protein, 640 aa, Xanthomonas campestris; identical to SEQ ID NO: 2796

SEQ ID NO: 18518 - DNA, 1431 bp, Xanthomonas campestris; identical to SEQ ID NO: 2797
  CDS (1)..(1431)

SEQ ID NO: 18519 - protein, 476 aa, Xanthomonas campestris; identical to SEQ ID NO: 2798

SEQ ID NO: 18520 - DNA, 1839 bp, Xanthomonas axonopodis; identical to SEQ ID NO: 2799
  CDS (1)..(1839)

SEQ ID NO: 18521 - protein, 612 aa, Xanthomonas axonopodis; identical to SEQ ID NO: 2800

SEQ ID NO: 18522 - DNA, 1431 bp, Xanthomonas axonopodis; identical to SEQ ID NO: 2801
  CDS (1)..(1431)

SEQ ID NO: 18523 - protein, 476 aa, Xanthomonas axonopodis; identical to SEQ ID NO: 2802

SEQ ID NO: 18524 - DNA, 1458 bp, Thermoanaerobacter tengcongensis; identical to SEQ ID NO: 2803
  CDS (1)..(1458)

SEQ ID NO: 18525 - protein, 485 aa, Thermoanaerobacter tengcongensis; identical to SEQ ID NO: 2804

SEQ ID NO: 18526 - DNA, 1762 bp, Oryza sativa; identical to SEQ ID NO: 2805
  CDS (41)..(1558)

SEQ ID NO: 18527 - protein, 505 aa, Oryza sativa; identical to SEQ ID NO: 2806

SEQ ID NO: 18528 - DNA, 1305 bp, Encephalitozoon cuniculi; identical to SEQ ID NO: 2807
  CDS (1)..(1305)

SEQ ID NO: 18529 - protein, 434 aa, Encephalitozoon cuniculi; identical to SEQ ID NO: 2808

SEQ ID NO: 18530 - DNA, 2125 bp, Drosophila melanogaster; identical to SEQ ID NO: 2809
  CDS (158)..(1738)

SEQ ID NO: 18531 - protein, 526 aa, Drosophila melanogaster; identical to SEQ ID NO: 2810

SEQ ID NO: 18532 - DNA, 1470 bp, Ralstonia solanacearum; identical to SEQ ID NO: 2811
  CDS (1)..(1470)

SEQ ID NO: 18533 - protein, 489 aa, Ralstonia solanacearum; identical to SEQ ID NO: 2812

SEQ ID NO: 18534 - DNA, 1521 bp, Enterococcus mundtii; identical to SEQ ID NO: 2813
  CDS (1)..(1521)

SEQ ID NO: 18535 - protein, 506 aa, Enterococcus mundtii; identical to SEQ ID NO: 2814

SEQ ID NO: 18536 - DNA, 2230 bp, Homo sapiens; identical to SEQ ID NO: 2815
  CDS (54)..(1601)

SEQ ID NO: 18537 - protein, 515 aa, Homo sapiens [sequence omitted]

SEQ ID NO: 18538 - DNA, 1470 bp, Rhizobium loti; identical to SEQ ID NO: 2817
  CDS (1)..(1470)

SEQ ID NO: 18539 - protein, 489 aa, Rhizobium loti; identical to SEQ ID NO: 2818

SEQ ID NO: 18540 - DNA, 1428 bp, Rhizobium loti; identical to SEQ ID NO: 2819
  CDS (1)..(1428)

SEQ ID NO: 18541 - protein, 475 aa, Rhizobium loti; identical to SEQ ID NO: 2820

SEQ ID NO: 18542 - DNA, 3584 bp, Plasmodium berghei; identical to SEQ ID NO: 2821
  CDS (370)..(3222)

SEQ ID NO: 18543 - protein, 950 aa, Plasmodium berghei; identical to SEQ ID NO: 2822

SEQ ID NO: 18544 - DNA, 1491 bp, Pasteurella multocida; identical to SEQ ID NO: 2823
  CDS (1)..(1491)

SEQ ID NO: 18545 - protein, 496 aa, Pasteurella multocida; identical to SEQ ID NO: 2824

SEQ ID NO: 18546 - DNA, 1470 bp, Pseudomonas putida; identical to SEQ ID NO: 2825
  CDS (1)..(1470)

SEQ ID NO: 18547 - protein, 489 aa, Pseudomonas putida; identical to SEQ ID NO: 2826

SEQ ID NO: 18548 - DNA, 1566 bp, Trypanosoma brucei; identical to SEQ ID NO: 2827
  CDS (1)..(1566)

SEQ ID NO: 18549 - protein, 521 aa, Trypanosoma brucei; identical to SEQ ID NO: 2828

SEQ ID NO: 18550 - DNA, 1904 bp, Triticum aestivum; identical to SEQ ID NO: 2829
  CDS (153)..(1682)

SEQ ID NO: 18551 - protein, 509 aa, Triticum aestivum; identical to SEQ ID NO: 2830

SEQ ID NO: 18552 - DNA, 2098 bp, Solanum tuberosum; identical to SEQ ID NO: 2831
  CDS (27)..(1775)

SEQ ID NO: 18553 - protein, 582 aa, Solanum tuberosum; identical to SEQ ID NO: 2832

SEQ ID NO: 18554 - DNA, 1924 bp, Dunaliella bioculata; identical to SEQ ID NO: 2833
  CDS (68)..(1840)

SEQ ID NO: 18555 - protein, 590 aa, Dunaliella bioculata; identical to SEQ ID NO: 2834

SEQ ID NO: 18556 - DNA, 1976 bp, Cyanidium caldarium; identical to SEQ ID NO: 2835
  CDS (46)..(1848)

SEQ ID NO: 18557 - protein, 600 aa, Cyanidium caldarium; identical to SEQ ID NO: 2836

SEQ ID NO: 18558 - DNA, 2106 bp, Drosophila melanogaster; identical to SEQ ID NO: 2837
  CDS (28)..(1746)

SEQ ID NO: 18559 - protein, 572 aa, Drosophila melanogaster; identical to SEQ ID NO: 2838

SEQ ID NO: 18560 - DNA, 1777 bp, Mesembryanthemum crystallinum; identical to SEQ ID NO: 2839
  CDS (39)..(1589)

SEQ ID NO: 18561 - protein, 516 aa, Mesembryanthemum crystallinum; identical to SEQ ID NO: 2840

SEQ ID NO: 18562 - DNA, 1542 bp, Mus musculus; identical to SEQ ID NO: 2841
  CDS (1)..(1542)

SEQ ID NO: 18563 - protein, 513 aa, Mus musculus; identical to SEQ ID NO: 2842

SEQ ID NO: 18564 - DNA, 1485 bp, Actinobacillus actinomycetemcomitans; identical to SEQ ID NO: 2843
  CDS (1)..(1485)

SEQ ID NO: 18565 - protein, 494 aa, Actinobacillus actinomycetemcomitans; identical to SEQ ID NO: 2844

SEQ ID NO: 18566 - DNA, 1473 bp, Buchnera aphidicola; identical to SEQ ID NO: 2845
  CDS (1)..(1473)

SEQ ID NO: 18567 - protein, 490 aa, Buchnera aphidicola; identical to SEQ ID NO: 2846

SEQ ID NO: 18568 - DNA, 1473 bp, Buchnera aphidicola; identical to SEQ ID NO: 2847
  CDS (1)..(1473)

SEQ ID NO: 18569 - protein, 490 aa, Buchnera aphidicola; identical to SEQ ID NO: 2848

SEQ ID NO: 18570 - DNA, 2049 bp, Ceratitis capitata; identical to SEQ ID NO: 2849
  CDS (60)..(1640)

SEQ ID NO: 18571 - protein, 526 aa, Ceratitis capitata; identical to SEQ ID NO: 2850

SEQ ID NO: 18572 - DNA, 1524 bp, Chlamydia muridarum; identical to SEQ ID NO: 2851
  CDS (1)..(1524)

SEQ ID NO: 18573 - protein, 507 aa, Chlamydia muridarum; identical to SEQ ID NO: 2852

SEQ ID NO: 18574 - DNA, 2062 bp, Drosophila melanogaster; identical to SEQ ID NO: 2853
  CDS (303)..(1877)

SEQ ID NO: 18575 - protein, 524 aa, Drosophila melanogaster; identical to SEQ ID NO: 2854

SEQ ID NO: 18576 - DNA, 1536 bp, Emericella nidulans; identical to SEQ ID NO: 2855
  CDS (1)..(1536)

SEQ ID NO: 18577 - protein, 511 aa, Emericella nidulans; identical to SEQ ID NO: 2856

SEQ ID NO: 18578 - DNA, 1957 bp, Leuconostoc mesenteroides; identical to SEQ ID NO: 2857
  CDS (206)..(1666)

SEQ ID NO: 18579 - protein, 486 aa, Leuconostoc mesenteroides; identical to SEQ ID NO: 2858

SEQ ID NO: 18580 - DNA, 2055 bp, Macropus robustus; identical to SEQ ID NO: 2859
  CDS (94)..(1641)

SEQ ID NO: 18581 - protein, 515 aa, Macropus robustus; identical to SEQ ID NO: 2860

SEQ ID NO: 18582 - DNA, 1530 bp, Nostoc punctiforme; identical to SEQ ID NO: 2861
  CDS (1)..(1530)

SEQ ID NO: 18583 - protein, 509 aa, Nostoc punctiforme; identical to SEQ ID NO: 2862

SEQ ID NO: 18584 - DNA, 1476 bp, Rhizobium meliloti; identical to SEQ ID NO: 2863
  CDS (1)..(1476)

SEQ ID NO: 18585 - protein, 491 aa, Rhizobium meliloti; identical to SEQ ID NO: 2864

SEQ ID NO: 18586 - DNA, 2853 bp, Homo sapiens; identical to SEQ ID NO: 2865
  CDS (273)..(2648)

SEQ ID NO: 18587 - protein, 791 aa, Homo sapiens; identical to SEQ ID NO: 2866

SEQ ID NO: 18588 - DNA, 1970 bp, Arabidopsis thaliana; identical to SEQ ID NO: 2867
  CDS (60)..(1790)

SEQ ID NO: 18589 - protein, 576 aa, Arabidopsis thaliana; identical to SEQ ID NO: 2868

SEQ ID NO: 18590 - DNA, 2112 bp, Arabidopsis thaliana; identical to SEQ ID NO: 2869
  CDS (142)..(1932)

SEQ ID NO: 18591 - protein, 596 aa, Arabidopsis thaliana; identical to SEQ ID NO: 2870

SEQ ID NO: 18592 - DNA, 2161 bp, Arabidopsis thaliana; identical to SEQ ID NO: 2871
  CDS (90)..(1967)

SEQ ID NO: 18593 - protein, 625 aa, Arabidopsis thaliana; identical to SEQ ID NO: 2872

SEQ ID NO: 18594 - DNA, 1936 bp, Arabidopsis thaliana; identical to SEQ ID NO: 2873
  CDS (136)..(1686)

SEQ ID NO: 18595 - protein, 516 aa, Arabidopsis thaliana; identical to SEQ ID NO: 2874

SEQ ID NO: 18596 - DNA, 1959 bp, Arabidopsis thaliana; identical to SEQ ID NO: 2875
  CDS (194)..(1741)

SEQ ID NO: 18597 - protein, 515 aa, Arabidopsis thaliana [sequence omitted]

SEQ ID NO: 18598 - DNA, 1503 bp, Xenopus laevis; identical to SEQ ID NO: 2877
  CDS (1)..(1503)

SEQ ID NO: 18599 - protein, 500 aa, Xenopus laevis; identical to SEQ ID NO: 2878

SEQ ID NO: 18600 - DNA, 2004 bp, Arabidopsis thaliana; identical to SEQ ID NO: 2879
  CDS (51)..(1850)

SEQ ID NO: 18601 - protein, 599 aa, Arabidopsis thaliana; identical to SEQ ID NO: 2880

SEQ ID NO: 18602 - DNA, 23 bp, Artificial sequence
  Primer sequence
atgagtgaaggccccgtcaaatt

SEQ ID NO: 18603 - DNA, 25 bp, Artificial sequence
  Primer sequence
ctaattatccttcgtatcttctggc

SEQ ID NO: 18604 - protein, 806 aa, Artificial sequence
  Consensus
  Variant (2)..(3): Xaa in position 2 to 3 is any amino acid
  Variant (7)..(9): Xaa in position 7 to 9 is any amino acid
  Variant (11)..(12): Xaa in position 11 to 12 is any amino acid
  Variant (14)..(17): Xaa in position 14 to 17 is any amino acid
  Variant (19)..(23): Xaa in position 19 to 23 is any amino acid
  Variant (25)..(32): Xaa in position 25 to 32 is any amino acid
  Variant (34)..(35): Xaa in position 34 to 35 is any amino acid
  Variant (37)..(81): Xaa in position 37 to 81 is any amino acid
  Variant (83)..(95): Xaa in position 83 to 95 is any amino acid
  Variant (97)..(225): Xaa in position 97 to 225 is any amino acid
  Variant (227)..(230): Xaa in position 227 to 230 is any amino acid
  Variant (232)..(258): Xaa in position 232 to 258 is any amino acid
  Variant (260)..(262): Xaa in position 260 to 262 is any amino acid
  Variant (266)..(266): Xaa in position 266 is any amino acid
  Variant (268)..(268): Xaa in position 268 is any amino acid
  Variant (270)..(271): Xaa in position 270 to 271 is any amino acid
  Variant (273)..(275): Xaa in position 273 to 275 is any amino acid
  Variant (277)..(285): Xaa in position 277 to 285 is any amino acid
  Variant (287)..(290): Xaa in position 287 to 290 is any amino acid
  Variant (300)..(300): Xaa in position 300 is any amino acid
  Variant (302)..(302): Xaa in position 302 is any amino acid
  Variant (304)..(307): Xaa in position 304 to 307 is any amino acid
  Variant (310)..(310): Xaa in position 310 is any amino acid
  Variant (312)..(318): Xaa in position 312 to 318 is any amino acid
  Variant (321)..(323): Xaa in position 321 to 323 is any amino acid
  Variant (325)..(328): Xaa in position 325 to 328 is any amino acid
  Variant (330)..(332): Xaa in position 330 to 332 is any amino acid
  Variant (334)..(335): Xaa in position 334 to 335 is any amino acid
  Variant (337)..(339): Xaa in position 337 to 339 is any amino acid
  Variant (341)..(342): Xaa in position 341 to 342 is any amino acid
  Variant (344)..(347): Xaa in position 344 to 347 is any amino acid
  Variant (349)..(351): Xaa in position 349 to 351 is any amino acid
  Variant (354)..(355): Xaa in position 354 to 355 is any amino acid
  Variant (359)..(360): Xaa in position 359 to 360 is any amino acid
  Variant (362)..(366): Xaa in position 362 to 366 is any amino acid
  Variant (370)..(370): Xaa in position 370 is any amino acid
  Variant (372)..(382): Xaa in position 372 to 382 is any amino acid
  Variant (385)..(385): Xaa in position 385 is any amino acid
  Variant (387)..(387): Xaa in position 387 is any amino acid
  Variant (389)..(405): Xaa in position 389 to 405 is any amino acid
  Variant (409)..(438): Xaa in position 409 to 438 is any amino acid
  Variant (440)..(451): Xaa in position 440 to 451 is any amino acid
  Variant (453)..(455): Xaa in position 453 to 455 is any amino acid
  Variant (457)..(465): Xaa in position 457 to 465 is any amino acid
  Variant (467)..(467): Xaa in position 467 is any amino acid
  Variant (470)..(470): Xaa in position 470 is any amino acid
  Variant (475)..(478): Xaa in position 475 to 478 is any amino acid
  Variant (481)..(493): Xaa in position 481 to 493 is any amino acid
  Variant (495)..(524): Xaa in position 495 to 524 is any amino acid
  Variant (526)..(531): Xaa in position 526 to 531 is any amino acid
  Variant (534)..(534): Xaa in position 534 is any amino acid
  Variant (536)..(543): Xaa in position 536 to 543 is any amino acid
  Variant (545)..(545): Xaa in position 545 is any amino acid
  Variant (548)..(588): Xaa in position 548 to 588 is any amino acid
  Variant (592)..(592): Xaa in position 592 is any amino acid
  Variant (594)..(595): Xaa in position 594 to 595 is any amino acid
  Variant (597)..(599): Xaa in position 597 to 599 is any amino acid
  Variant (601)..(604): Xaa in position 601 to 604 is any amino acid
  Variant (606)..(609): Xaa in position 606 to 609 is any amino acid
  Variant (611)..(614): Xaa in position 611 to 614 is any amino acid
  Variant (616)..(797): Xaa in position 616 to 797 is any amino acid
  Variant (799)..(800): Xaa in position 799 to 800 is any amino acid
  Variant (802)..(805): Xaa in position 802 to 805 is any amino acid
GXXGDLXXXKXXPXXXXLXXXXXLXXXXXXXXGXXRXXXXXXXXXXXXXXXXXXXXXXXXXXXXXXXXXXXXXXXXXXXXXYXXXXXXXXXXXXXLXXXXXXXXXXXXXXXXXXXXXXXXXXXXXXXXXXXXXXXXXXXXXXXXXXXXXXXXXXXXXXXXXXXXXXXXXXXXXXXXXXXXXXXXXXXXXXXXXXXXXXXXXXXXXXXXXXXXXXXXXXXXXXXXXYXXXXPXXXXXXXXXXXXXXXXXXXXXXXXXXXRXXXEKPXGXDXXSXXXLXXXXXXXXXEXXXXRIDHYLGKEXVXNXXXXRFXNXXXXXXXWNXXXIXXXXIXXXEXXGXXXRXXYXXXXGXXXRDXXQNHXXQXXXXXAMEXPXXXXXXXXXXXEKXKXLXXXXXXXXXXXXXXXXXGQYXXXXXXXXXXXXXXXXXXXXXXXXXXXXXXYXXXXXXXXXXXXSXXXTXXXXXXXXXNXRWXGVPFXXXXGKXXXXXXXXXXXXXFXXXXXXXXXXXXXXXXXXXXXXXXXXXXXXNXXXXXXQPXEXXXXXXXXKXPGXXXXXXXXXXXXXXXXXXXXXXXXXXXXXXXXXXXXXXXXXAYEXLXXDXXXGXXXXFXXXXEXXXXWXXXXXXXXXXXXXXXXXXXXXXXXXXXXXXXXXXXXXXXXXXXXXXXXXXXXXXXXXXXXXXXXXXXXXXXXXXXXXXXXXXXXXXXXXXXXXXXXXXXXXXXXXXXXXXXXXXXXXXXXXXXXXXXXXXXXXXXXXXXXXXXXXXXXXXXXXXXXXXXXXXXXXXXXXXXXXXXXXXXXXXYXXGXXXXP

SEQ ID NO: 18605 - protein, 150 aa, Artificial sequence; identical to SEQ ID NO: 2917
  Consensus
  Variant (1)..(1): Xaa in position 1 is Arg or Lys
  Variant (2)..(2): Xaa in position 2 is Val, Ile, Leu or Ala
  Variant (3)..(3): Xaa in position 3 is Ile, Val, Met or Ala
  Variant (4)..(4): Xaa in position 4 is Ile, Val, Leu, Met or Ala
  Variant (8)..(8): Xaa in position 8 is Phe, Ile, Leu or Tyr
  Variant (9)..(9): Xaa in position 9 is Gly or Ala
  Variant (10)..(10): Xaa in position 10 is any amino acid
  Variant (11)..(11): Xaa in position 11 is Asp, Ser or Asn
  Variant (12)..(13): Xaa in position 12 to 13 is any amino acid
  Variant (14)..(14): Xaa in position 14 is Ser, Thr or Asn
  Variant (15)..(15): Xaa in position 15 is Ala, Ser, Phe or Tyr
  Variant (16)..(17): Xaa in position 16 to 17 is any amino acid
  Variant (18)..(18): Xaa in position 18 is Leu, Ile, Val or Phe
  Variant (19)..(21): Xaa in position 19 to 21 is any amino acid
  Variant (22)..(22): Xaa in position 22 is Leu, Ile or Val
  Variant (23)..(27): Xaa in position 23 to 27 is any amino acid
  Variant (28)..(28): Xaa in position 28 is Glu, Asp, Pro or Ser
  Variant (29)..(30): Xaa in position 29 to 30 is any amino acid
  Variant (31)..(31): Xaa in position 31 is Ile, Val, Leu, Thr or Met
  Variant (32)..(32): Xaa in position 32 is Tyr, Phe or Leu
  Variant (33)..(33): Xaa in position 33 is Arg, His or Leu
  Variant (34)..(34): Xaa in position 34 is Ile, Val, Met or Leu
  Variant (37)..(37): Xaa in position 37 is Tyr or Phe
  Variant (39)..(39): Xaa in position 39 is Gly, Ser or Ala
  Variant (40)..(40): Xaa in position 40 is Lys, Arg or Glu
  Variant (41)..(42): Xaa in position 41 to 42 is any amino acid
  Variant (43)..(43): Xaa in position 43 is Val, Ile, Leu, Ala or Met
  Variant (44)..(44): Xaa in position 44 is any amino acid
  Variant (45)..(45): Xaa in position 45 is Asn, Gly, Gln or Ala
  Variant (46)..(46): Xaa in position 46 is Leu, Ile, Met, Phe or Val
  Variant (47)..(49): Xaa in position 47 to 49 is any amino acid
  Variant (50)..(50): Xaa in position 50 is Arg, Lys or Glu
  Variant (51)..(51): Xaa in position 51 is Phe or Tyr
  Variant (52)..(52): Xaa in position 52 is any amino acid
  Variant (54)..(59): Xaa in position 54 to 59 is any amino acid
  Variant (60)..(60): Xaa in position 60 is any or no amino acid
  Variant (61)..(61): Xaa in position 61 is Trp, Met, Asn or Leu
  Variant (62)..(63): Xaa in position 62 to 63 is any amino acid
  Variant (64)..(65): Xaa in position 64 to 65 is any or no amino acid
  Variant (66)..(66): Xaa in position 66 is Ile, Val or Ala
  Variant (67)..(68): Xaa in position 67 to 68 is any amino acid
  Variant (69)..(69): Xaa in position 69 is Val, Ile, Met or Leu
  Variant (70)..(70): Xaa in position 70 is any amino acid
  Variant (71)..(71): Xaa in position 71 is Ile, Leu, Val, Phe or Ser
  Variant (72)..(74): Xaa in position 72 to 74 is any amino acid
  Variant (76)..(77): Xaa in position 76 to 77 is any amino acid
  Variant (78)..(78): Xaa in position 78 is Gly, Asp, Val or Ala
  Variant (79)..(81): Xaa in position 79 to 81 is any amino acid
  Variant (82)..(82): Xaa in position 82 is Arg or Lys
  Variant (83)..(84): Xaa in position 83 to 84 is any or no amino acid
  Variant (85)..(85): Xaa in position 85 is Tyr or Phe
  Variant (86)..(86): Xaa in position 86 is Tyr, Phe or Trp
  Variant (87)..(87): Xaa in position 87 is Asp, Glu, Ala or Asn
  Variant (88)..(89): Xaa in position 88 to 89 is any amino acid
  Variant (91)..(91): Xaa in position 91 is any amino acid
  Variant (92)..(92): Xaa in position 92 is any or no amino acid
  Variant (93)..(93): Xaa in position 93 is Leu, Ile, Val, Met or Ala
  Variant (94)..(94): Xaa in position 94 is Arg, Lys or Leu
  Variant (96)..(96): Xaa in position 96 is Met, Val, Ile or Leu
  Variant (97)..(97): Xaa in position 97 is Val, Met, Ile, Leu or Phe
  Variant (98)..(98): Xaa in position 98 is Gln, Pro or Thr
  Variant (99)..(99): Xaa in position 99 is Asn or Ser
  Variant (100)..(100): Xaa in position 100 is His, Gln or Pro
  Variant (101)..(102): Xaa in position 101 to 102 is any amino acid
  Variant (103)..(103): Xaa in position 103 is Gln, Glu, Asn or Leu
  Variant (104)..(104): Xaa in position 104 is Leu, Ile, Val, Met or Thr
  Variant (105)..(105): Xaa in position 105 is Leu, Met, Val, Ile, Phe or Tyr
  Variant (106)..(106): Xaa in position 106 is any amino acid
  Variant (107)..(107): Xaa in position 107 is Leu, Met, Ile, Val, Trp or Phe
  Variant (108)..(109): Xaa in position 108 to 109 is any amino acid
  Variant (111)..(111): Xaa in position 111 is Glu, Asp, Ser or Asn
  Variant (112)..(112): Xaa in position 112 is any amino acid
  Variant (114)..(118): Xaa in position 114 to 118 is any amino acid
  Variant (119)..(121): Xaa in position 119 to 121 is any or no amino acid
  Variant (122)..(122): Xaa in position 122 is Ile, Val, Leu, Phe or Met
  Variant (123)..(124): Xaa in position 123 to 124 is any amino acid
  Variant (125)..(125): Xaa in position 125 is Glu, Lys, Ala, Arg or His
  Variant (126)..(126): Xaa in position 126 is Lys or Val
  Variant (127)..(128): Xaa in position 127 to 128 is any amino acid
  Variant (129)..(129): Xaa in position 129 is Val, Ile, Ala, Leu or Phe
  Variant (130)..(130): Xaa in position 130 is Leu, Ile, Val, Phe or Met
  Variant (131)..(140): Xaa in position 131 to 140 is any amino acid
  Variant (141)..(145): Xaa in position 141 to 145 is any or no amino acid
  Variant (146)..(146): Xaa in position 146 is Val, Leu, Ile, Ala or Ser
  Variant (147)..(147): Xaa in position 147 is any amino acid
  Variant (148)..(148): Xaa in position 148 is Gly or Ala
  Variant (149)..(149): Xaa in position 149 is Gln or Arg
  Variant (150)..(150): Xaa in position 150 is Tyr or Phe

SEQ ID NO: 18606 - protein, 44 aa, Artificial sequence; identical to SEQ ID NO: 2918
  Consensus
  Variant (1)..(1): Xaa in position 1 is Tyr or Leu
  Variant (2)..(2): Xaa in position 2 is any amino acid
  Variant (3)..(13): Xaa in position 3 to 13 is any or no amino acid
  Variant (15)..(17): Xaa in position 15 to 17 is any amino acid
  Variant (19)..(19): Xaa in position 19 is Phe or Tyr
  Variant (20)..(25): Xaa in position 20 to 25 is any amino acid
  Variant (26)..(26): Xaa in position 26 is Ile, Val, Leu or Phe
  Variant (27)..(29): Xaa in position 27 to 29 is any amino acid
  Variant (30)..(30): Xaa in position 30 is Arg, Asn, Phe or Gln
  Variant (31)..(31): Xaa in position 31 is Trp or Phe
  Variant (32)..(32): Xaa in position 32 is any amino acid
  Variant (33)..(33): Xaa in position 33 is Gly or Asp
  Variant (34)..(34): Xaa in position 34 is Val or Thr
  Variant (36)..(36): Xaa in position 36 is Phe or Ile
  Variant (37)..(37): Xaa in position 37 is any amino acid
  Variant (38)..(38): Xaa in position 38 is Leu, Met, Ile, Val or Phe
  Variant (39)..(40): Xaa in position 39 to 40 is any amino acid
  Variant (41)..(41): Xaa in position 41 is Gly or Ala
  Variant (43)..(43): Xaa in position 43 is any amino acid
  Variant (44)..(44): Xaa in position 44 is Leu, Met or Val

SEQ ID NO: 18607 - protein, 97 aa, Artificial sequence; identical to SEQ ID NO: 2919
  Consensus
  Variant (1)..(1): Xaa in position 1 is Asn, Asp, Gln, Arg or Lys
  Variant (2)..(4): Xaa in position 2 to 4 is any amino acid
  Variant (5)..(5): Xaa in position 5 is Ile, Leu, Met, Phe or Val
  Variant (6)..(6): Xaa in position 6 is any amino acid
  Variant (7)..(7): Xaa in position 7 is Ile, Leu, Val, Ala or Ser
  Variant (8)..(8): Xaa in position 8 is any amino acid
  Variant (9)..(9): Xaa in position 9 is Pro or His
  Variant (10)..(12): Xaa in position 10 to 12 is any amino acid
  Variant (13)..(13): Xaa in position 13 is Ile, Val, Met, Leu, Phe or Ala
  Variant (14)..(19): Xaa in position 14 to 19 is any amino acid
  Variant (20)..(20): Xaa in position 20 is Lys, Ser or Arg
  Variant (21)..(29): Xaa in position 21 to 29 is any amino acid
  Variant (30)..(35): Xaa in position 30 to 35 is any or no amino acid
  Variant (36)..(36): Xaa in position 36 is Leu, Ile, Met or Val
  Variant (37)..(44): Xaa in position 37 to 44 is any amino acid
  Variant (45)..(64): Xaa in position 45 to 64 is any or no amino acid
  Variant (65)..(65): Xaa in position 65 is Ala, Gly, Pro or Ser
  Variant (66)..(66): Xaa in position 66 is Tyr or Leu
  Variant (67)..(68): Xaa in position 67 to 68 is any amino acid
  Variant (69)..(69): Xaa in position 69 is Leu, Met or Tyr
  Variant (70)..(70): Xaa in position 70 is Leu, Ile, Phe or Met
  Variant (71)..(71): Xaa in position 71 is any amino acid
  Variant (72)..(72): Xaa in position 72 is Asp, Glu, Ala, Asn or His
  Variant (73)..(75): Xaa in position 73 to 75 is any amino acid
  Variant (76)..(76): Xaa in position 76 is Gly, Ser or Asp
  Variant (77)..(80): Xaa in position 77 to 80 is any amino acid
  Variant (81)..(81): Xaa in position 81 is Phe or Tyr
  Variant (82)..(85): Xaa in position 82 to 85 is any amino acid
  Variant (86)..(86): Xaa in position 86 is any or no amino acid
  Variant (87)..(87): Xaa in position 87 is Val, Ile, Leu, Ala or Gln
  Variant (88)..(90): Xaa in position 88 to 90 is any amino acid
  Variant (92)..(96): Xaa in position 92 to 96 is any amino acid
  Variant (97)..(97): Xaa in position 97 is Ile, Val, Leu, Phe or Ala

SEQ ID NO: 18608 - DNA, 291 bp, Escherichia coli K12
  CDS (1)..(291): transl_table=11
gtgctgtcaaaactaccccgtagactccgatcttttcaaacatattgcaccatccgtgtacatcggggtgaggatatgaaatcaatggataagttaacaacaggtgttgcctatggcacatcggcgggtaatgctggtttctgggcattgcagttactcgataaagtaactccgtcacagtgggctgcaatcggtgtgctgggtagcctggtttttggcctgctgacgtatctgacaaatctttatttcaagattaaagaagacaggcgtaaggctgcgagaggagagtaa

SEQ ID NO: 18609 - protein, 96 aa, Escherichia coli K12
MLSKLPRRLRSFQTYCTIRVHRGEDMKSMDKLTTGVAYGTSAGNAGFWALQLLDKVTPSQWAAIGVLGSLVFGLLTYLTNLYFKIKEDRRKAARGE

SEQ ID NO: 18610 - DNA, 216 bp, Bacteriophage 933W
  CDS (1)..(216): transl_table=11
atgtaccagatggaaaaaatcacaacaggtgtgtcatacaccacgtcagcggtgggaacgggctactggttcctgcagttgctggacagggtttccccgtctcagtgggcggcaataggcgtgctggggagtctgctgtttgggctgctgacatatctgacgaacctgtatttcaagattaaagaagaccggcgtaaggcggcacggggagagtaa

SEQ ID NO: 18611 - protein, 71 aa, Bacteriophage 933W
MYQMEKITTGVSYTTSAVGTGYWFLQLLDRVSPSQWAAIGVLGSLLFGLLTYLTNLYFKIKEDRRKAARGE

SEQ ID NO: 18612 - DNA, 291 bp, Bacteriophage VT2-Sa
  CDS (1)..(291): transl_table=11
atgcgtcagggaccatcggtgtgtgccggtggtcttttttattgttgtgagcttccggattgcgggagacggggtatgtaccagatggaaaaaatcacaacaggtgtgtcatacaccacgtcagcggtgggaacgggctactggttcctgcagttgctggacagggtttccccgtctcagtgggcggcaataggcgtgctggggagtctgctgtttgggctgctgacatatctgacgaacctgtatttcaagattaaagaagaccggcgtaaggcggcacggggagagtaa

SEQ ID NO: 18613 - protein, 96 aa, Bacteriophage VT2-Sa
MRQGPSVCAGGLFYCCELPDCGRRGMYQMEKITTGVSYTTSAVGTGYWFLQLLDRVSPSQWAAIGVLGSLLFGLLTYLTNLYFKIKEDRRKAARGE

SEQ ID NO: 18614 - DNA, 315 bp, Escherichia coli O157:H7 EDL933
  CDS (1)..(315): transl_table=11
gtgggtcgtctgagacgcctgcatgagttatcagagccatcagtagttaactggtggcttttttattgttgtcagcttccggataacgggagacggggtatgtaccagatggaaaaaatcacaacaggtgtgtcatacaccacgtcagcggtagggacgggatactggttactgcaactgctggacaaagtctctccgtcccagtgggtggcaataggtgtactggggagtctgctgtttggcctgctgacgtatctgactaacctgtatttcaaaatcagggaggaccgccgtaagacggcgcggggagactaa

SEQ ID NO: 18615 - protein, 104 aa, Escherichia coli O157:H7 EDL933
MGRLRRLHELSEPSVVNWWLFYCCQLPDNGRRGMYQMEKITTGVSYTTSAVGTGYWLLQLLDKVSPSQWVAIGVLGSLLFGLLTYLTNLYFKIREDRRKTARGD

SEQ ID NO: 18616 - DNA, 315 bp, Escherichia coli O157:H7 EDL933
  CDS (1)..(315): transl_table=11
gtgggtcgtctgagacgcctgcatgagttatcagagccatcagtagttaactggtggcttttttattgttgtcagcttccggataacgggagacggggtatgtaccagatggaaaaaatcacaacgggtgtgtcatacaccacgtcagcggtggggacgggatactggttactgcagctgctggacaaagtctctccgtcccagtgggtggcgataggcgtgctggggagtctgctgtttgggctgctgacatatctgacgaacctgtatttcaagattaaagaagaccggcgtaaggcggcgcggggagagtaa

SEQ ID NO: 18617 - protein, 104 aa, Escherichia coli O157:H7 EDL933
MGRLRRLHELSEPSVVNWWLFYCCQLPDNGRRGMYQMEKITTGVSYTTSAVGTGYWLLQLLDKVSPSQWVAIGVLGSLLFGLLTYLTNLYFKIKEDRRKAARGE

SEQ ID NO: 18618 - DNA, 273 bp, Escherichia coli O157:H7 EDL933
  CDS (1)..(273): transl_table=11
gtgtgtgccggtggtcttttttattgttgtgagcttccggattgcgggagacggggtatgtaccagatggaaaaaatcacaacaggtgtgtcatacaccacgtcagcggtgggaacgggctactggttcctgcagttgctggacagggtttccccgtctcagtgggcggcaataggcgtgctggggagtctgctgtttgggctgctgacatatctgacgaacctgtatttcaagattaaagaagaccggcgtaaggcggcacggggagagtaa

SEQ ID NO: 18619 - protein, 90 aa, Escherichia coli O157:H7 EDL933
MCAGGLFYCCELPDCGRRGMYQMEKITTGVSYTTSAVGTGYWFLQLLDRVSPSQWAAIGVLGSLLFGLLTYLTNLYFKIKEDRRKAARGE

SEQ ID NO: 18620 - DNA, 216 bp, Escherichia coli O157:H7
  CDS (1)..(216): transl_table=11
atgtaccagatggaaaaaataacaacaggtgtgtcatacaccacgtcagcggtggggacgggatactggctactgcagttgctggacaaagtctccccatcccagtgggtggcaataggcgtattgggtagcttggtgtttggcttgctgacgtatctgacaaacctttatttcaagattaaagaagataagcgtaaggctgcgagaggtgaataa

SEQ ID NO: 18621 - protein, 71 aa, Escherichia coli O157:H7
MYQMEKITTGVSYTTSAVGTGYWLLQLLDKVSPSQWVAIGVLGSLVFGLLTYLTNLYFKIKEDKRKAARGE

SEQ ID NO: 18622 - DNA, 207 bp, Escherichia coli O157:H7
  CDS (1)..(207): transl_table=11
atggaaaaaatcacaacaggtgtgtcatacaccacgtcagcggtggggacggaatactggttactgcagctgctggacaaagtctctccgtcccagtgggtggcaataggagtgctgggaagtctgctgtttggcctgctgacgtatctgactaacctgtatttcaaaatcagagaggaccgtcgtaaggtggcgcggggagagtag

SEQ ID NO: 18623 - protein, 68 aa, Escherichia coli O157:H7
MEKITTGVSYTTSAVGTEYWLLQLLDKVSPSQWVAIGVLGSLLFGLLTYLTNLYFKIREDRRKVARGE

SEQ ID NO: 18624 - DNA, 216 bp, Escherichia coli O157:H7
  CDS (1)..(216): transl_table=11
atgtaccagatggaaaaaatcacaacgggtgtgtcatacaccacgtcagcggtggggacgggatactggttactgcagctgctggacaaagtctctccgtcccagtgggtggcgataggtgtgctggggagtctgctgtttggcctgctgacgtatctgactaacctgtatttcaaaatcagagaggaccgtcgtaaggcggcgcggggagagtaa

SEQ ID NO: 18625 - protein, 71 aa, Escherichia coli O157:H7
MYQMEKITTGVSYTTSAVGTGYWLLQLLDKVSPSQWVAIGVLGSLLFGLLTYLTNLYFKIREDRRKAARGE

SEQ ID NO: 18626 - DNA, 216 bp, Escherichia coli O157:H7
  CDS (1)..(216): transl_table=11
atgtaccagatggaaaaaatcacaacgggtgtgtcatacaccacgtcagcggtggggacgggatactggttactgcagctgctggacaaagtctctccgtcccagtgggtggcgataggcgtgctggggagtctgctgtttgggctgctgacatatctgacgaacctgtatttcaagattaaagaagaccggcgtaaggcggcgcggggagagtaa

SEQ ID NO: 18627 - protein, 71 aa, Escherichia coli O157:H7
MYQMEKITTGVSYTTSAVGTGYWLLQLLDKVSPSQWVAIGVLGSLLFGLLTYLTNLYFKIKEDRRKAARGE

SEQ ID NO: 18628 - DNA, 216 bp, Escherichia coli O157:H7
  CDS (1)..(216): transl_table=11
atgtaccagatggaaaaaatcacaacaggtgtgtcatacaccacgtcagcggtagggacgggatactggttactgcaactgctggacaaagtctctccgtcccagtgggtggcaataggtgtactggggagtctgctgtttggcctgctgacgtatctgactaacctgtatttcaaaatcagggaggaccgccgtaagacggcgcggggagactaa

SEQ ID NO: 18629 - protein, 71 aa, Escherichia coli O157:H7
MYQMEKITTGVSYTTSAVGTGYWLLQLLDKVSPSQWVAIGVLGSLLFGLLTYLTNLYFKIREDRRKTARGD

SEQ ID NO: 18630 - DNA, 207 bp, Escherichia coli O157:H7
  CDS (1)..(207): transl_table=11
atggaaaaaatcacaacgggtgtgtcatacaccacgtcagcggtggggacgggatactggttactgcagctgctggacaaagtctctccgtcccagtgggtggcgataggcgtgctggggagtctgctgtttgggctgctgacatatctgacgaacctgtatttcaagattaaagaagaccggcgtaaggcggcgcggggagagtaa

SEQ ID NO: 18631 - protein, 68 aa, Escherichia coli O157:H7
MEKITTGVSYTTSAVGTGYWLLQLLDKVSPSQWVAIGVLGSLLFGLLTYLTNLYFKIKEDRRKAARGE

SEQ ID NO: 18632 - DNA, 207 bp, Escherichia coli O157:H7
  CDS (1)..(207): transl_table=11
atggaaaaaatcacaacaggtgtgtcatacaccacgtcagcggtggggacgggatactggttactgcagctgctggacaaagtctctccgtcccagtgggtggcaatcggtgtgctggggagtctgctgtttggcctgctgacgtatctgactaacctgtatttcaaaatcagagaggaccgtcgtaaggcggcgcggggggagtaa

SEQ ID NO: 18633 - protein, 68 aa, Escherichia coli O157:H7
MEKITTGVSYTTSAVGTGYWLLQLLDKVSPSQWVAIGVLGSLLFGLLTYLTNLYFKIREDRRKAARGE

SEQ ID NO: 18634 - DNA, 216 bp, Shigella flexneri 2a str. 301
  CDS (1)..(216): transl_table=11
atgaaatccatggacaaaatttcaacgggcattgcctacggcacctccgccggcagtgccggctactggtttttgcagtggttggatcaggtcaggccatcacagtgggctgcgattggtgtgctgggaagtctgcttctggggcttctgacttatctgacgaatctgtatttcaaaataagagaagacaagcgtaaggctgcacggggagagtaa

SEQ ID NO: 18635 - protein, 71 aa, Shigella flexneri 2a str. 301
MKSMDKISTGIAYGTSAGSAGYWFLQWLDQVRPSQWAAIGVLGSLLLGLLTYLTNLYFKIREDKRKAARGE

SEQ ID NO: 18636 - DNA, 216 bp, Shigella flexneri 2a str. 301
  CDS (1)..(216): transl_table=11
atgaaatccatggacaaaatttcaacgggcattgcctacggcacctccgcaggcagtgctggctactggtttttacagtggcttgatcaggtcagtccgtcacagtgggctgcgattggtgtactggggagtctggttctgggcttcctgacttatctgacaaatctgtacttcaaaatcagagaagacaagcgtaaggctgcgagaggtgaataa

SEQ ID NO: 18637 - protein, 71 aa, Shigella flexneri 2a str. 301
MKSMDKISTGIAYGTSAGSAGYWFLQWLDQVSPSQWAAIGVLGSLVLGFLTYLTNLYFKIREDKRKAARGE

SEQ ID NO: 18638 - DNA, 321 bp, Escherichia coli CFT073
  CDS (1)..(321): transl_table=11
gtgtcagtgggtcgtctgagacgcttgcatgagttatcagagccatcagtagttaactggtggcttttttattgttgtcagcttccggataacgggagacggggtatggaccagatggaaaaaatcacaacaggtgtgtcatacaccacgtcagcggtgggaacgggctactggttcctgcagttgctggacagggtttccccgtctcagtgggcggcaataggcgtgctgggaagtctgctgtttgggctgctgacatatctgactaacctgtatttcaaaatcagagaggaccgtcgtaaggcggcacggggagagtaa

SEQ ID NO: 18639 - protein, 106 aa, Escherichia coli CFT073
MSVGRLRRLHELSEPSVVNWWLFYCCQLPDNGRRGMDQMEKITTGVSYTTSAVGTGYWFLQLLDRVSPSQWAAIGVLGSLLFGLLTYLTNLYFKIREDRRKAARGE

SEQ ID NO: 18640 - DNA, 216 bp, Escherichia coli CFT073
  CDS (1)..(216): transl_table=11
atgaaatcaatggataagttaacaacaggtatcgcctatggcacatcggctggtaatgctggtttctgggcattgcagttactcgataaagtaactccgtcacagtgggctgcaatcggtgtgctgggtagtctggtttttggcctgctgacgtatctgacaaacctttatttcaagattaaagaagacaggcgtaaggttgcgagaagagagtaa

SEQ ID NO: 18641 - protein, 71 aa, Escherichia coli CFT073
MKSMDKLTTGIAYGTSAGNAGFWALQLLDKVTPSQWAAIGVLGSLVFGLLTYLTNLYFKIKEDRRKVARRE

SEQ ID NO: 18642 - DNA, 216 bp, Shigella flexneri 2a str. 2457T
  CDS (1)..(216): transl_table=11
atgaaatccatggacaaaatttcaacgggcattgcctacggcacctcctcaggcagtgctggctactggtttttacagtggcttgatcaggtcagtccgtcacagtgggctgcgattggtgtactggggagtctggttctgggcttcctgacttatctgacaaatctgtacttcaaaatcagagaagacaagcgtaaggctgcacggggagagtaa

SEQ ID NO: 18643 - protein, 71 aa, Shigella flexneri 2a str. 2457T
MKSMDKISTGIAYGTSSGSAGYWFLQWLDQVSPSQWAAIGVLGSLVLGFLTYLTNLYFKIREDKRKAARGE

SEQ ID NO: 18644 - DNA, 180 bp, Shigella flexneri 2a str. 2457T
  CDS (1)..(180): transl_table=11
atggaccagatggaaaaaatcacaacaggtgtgtcatacaccacgtcagcggtgggaacgggctactggttcctgcagttgctggacagggtttccccgtctcagtgggcggcaataggcgtgctggggagtctgctgtttgggctgctgacatatctgactgaggtgtactggcaatag

SEQ ID NO: 18645 - protein, 59 aa, Shigella flexneri 2a str. 2457T
MDQMEKITTGVSYTTSAVGTGYWFLQLLDRVSPSQWAAIGVLGSLLFGLLTYLTEVYWQ

SEQ ID NO: 18646 - DNA, 213 bp, Yersinia pseudotuberculosis IP 32953
  CDS (1)..(213): transl_table=11
atgaaaatggagaggctcacaaccggtatctcttataccgcgagcggtggcggcgcactgttttggtttaaacaattactgaatggatttgcccctgagcaatgggcggctattggtgtgctgggtagcttgatgtttgctttcctaacattcctaaccaacctatatttcaaggtgcgcgaagataagcggaaagcggcgaagggggaataa

SEQ ID NO: 18647 - protein, 70 aa, Yersinia pseudotuberculosis IP 32953
MKMERLTTGISYTASGGGALFWFKQLLNGFAPEQWAAIGVLGSLMFAFLTFLTNLYFKVREDKRKAAKGE

SEQ ID NO: 18648 - DNA, 216 bp, Shigella sonnei Ss046
  CDS (1)..(216): transl_table=11
atgaaatccatggataagttaacaacgggtgtcgcctatggcacctcagcaggtagtgccgggtactggtttttacagctgctagataaagtcacgccctcacagtgggcggcaattggagtgctgggtagcctggtatttggcctgctgacgtacctgacaaacctttatttcaagattaaagaagataagcgcaaggctgcgagaggtggataa

SEQ ID NO: 18649 - protein, 71 aa, Shigella sonnei Ss046
MKSMDKLTTGVAYGTSAGSAGYWFLQLLDKVTPSQWAAIGVLGSLVFGLLTYLTNLYFKIKEDKRKAARGG

SEQ ID NO: 18650 - DNA, 216 bp, Shigella sonnei Ss046
  CDS (1)..(216): transl_table=11
atgtatcagatggaaaaaatatcaacaggcattgcctacggcacctccgccggcagtgccggctactggtttttgcagtggttggatcaggtcagtccatcacagtgggctgcgattggtgtgctgggaagtctgcttctggggcttctgacttatctgacaaatctgtatttcaaaataagagaagacaagcgtaaggctgcgagaggtgaataa

SEQ ID NO: 18651 - protein, 71 aa, Shigella sonnei Ss046
MYQMEKISTGIAYGTSAGSAGYWFLQWLDQVSPSQWAAIGVLGSLLLGLLTYLTNLYFKIREDKRKAARGE

SEQ ID NO: 18652 - DNA, 207 bp, Bacteriophage H19B
  CDS (1)..(207): transl_table=11
atggaaaaaatcacaacaggtgtgtcatacaccacgtcagcggtagggacgggatactggttactgcaactgctggacaaagtctctccgtcccagtgggtggcaataggtgtactggggagtctgctgtttggcctgctgacgtatctgactaacctgtatttcaaaatcagagaggaccggcgtaaggcggtgcggggagagtaa

SEQ ID NO: 18653 - protein, 68 aa, Bacteriophage H19B
MEKITTGVSYTTSAVGTGYWLLQLLDKVSPSQWVAIGVLGSLLFGLLTYLTNLYFKIREDRRKAVRGE

SEQ ID NO: 18654 - DNA, 291 bp, Stx1
  CDS (1)..(291): transl_table=11
atgcgtcagggaccatcggtgtgtgccggtggtcttttttattgttgtgagcttccggattgcgggaggcggggtatgaaccagatggaaaaaatcacaacaggtgtgtcatacaccacgtcagcggtgggaacgggctactggttcctgcagttgctggacagggtttccccgtctcagtgggcggcaataggcgtgctggggagtctgctgtttggtctgctgacgtacctgacgaacctgtatttcaaaatcagagaggacaggcgtaaggcggcacggggagagtaa

SEQ ID NO: 18655 - protein, 96 aa, Stx1
MRQGPSVCAGGLFYCCELPDCGRRGMNQMEKITTGVSYTTSAVGTGYWFLQLLDRVSPSQWAAIGVLGSLLFGLLTYLTNLYFKIREDRRKAARGE

SEQ ID NO: 18656 - DNA, 150 bp, Escherichia coli
  CDS (1)..(150): transl_table=11
atgaaatccatggacaaaatttcaacgagcattgcctacggcacctccgcaggcagtgctggctactggtttttacagtggcttgatcaggtcagtccgtcacagtgggctgcgattggtgtactggggagtctggttctgggcttctag

SEQ ID NO: 18657 - protein, 49 aa, Escherichia coli
MKSMDKISTSIAYGTSAGSAGYWFLQWLDQVSPSQWAAIGVLGSLVLGF

SEQ ID NO: 18658 - DNA, 216 bp, Escherichia coli
  CDS (1)..(216): transl_table=11
atgaaatccatggacaaaatttcaacgagcattgcctacggcacctccgcaggcagtgctggctactggtttttacagtggcttgatcaggtcagtccgtcacagtgggctgcgattggtgtactggggagtctggttctgggcttcctgacttatctgacaaatctgtacttcaaaatcagagaagacagaagaaaggctgcgagaggtgaataa

SEQ ID NO: 18659 - protein, 71 aa, Escherichia coli
MKSMDKISTSIAYGTSAGSAGYWFLQWLDQVSPSQWAAIGVLGSLVLGFLTYLTNLYFKIREDRRKAARGE

SEQ ID NO: 18660 - DNA, 216 bp, Shigella dysenteriae
  CDS (1)..(216): transl_table=11
atgtaccagatggaaaaaatcacaacaggtgtgtcatacaccacgtcagcggtgggaatgggctactggttcctgcagtttctggacagggtctccccgtctcagtgggcggcaataggcgtactggggagtctgctgtttgggctgctgacatatctgactaacctgtatttcaaaatcagagaggaccggcgtaaggcggcgcggggagagtaa

SEQ ID NO: 18661 - protein, 71 aa, Shigella dysenteriae
MYQMEKITTGVSYTTSAVGMGYWFLQFLDRVSPSQWAAIGVLGSLLFGLLTYLTNLYFKIREDRRKAARGE

SEQ ID NO: 18662 - DNA, 216 bp, Escherichia coli O6
  CDS (1)..(216): transl_table=11
atgaaatccatggataagttaacaacgggtgtcgcctatggtacctcagcaggtagtgccgggtactggtttttacagttgctcgataaagtcacgccctcacagtgggcggcaataggtgtgctgggtagcctggtatttggcctgctgacgtacctgacaaacctttatttcaagattaaagaagataagcgcaaggctgcgagaggtgaataa

SEQ ID NO: 18663 - protein, 71 aa, Escherichia coli O6
MKSMDKLTTGVAYGTSAGSAGYWFLQLLDKVTPSQWAAIGVLGSLVFGLLTYLTNLYFKIKEDKRKAARGE

SEQ ID NO: 18664 - DNA, 216 bp, Bacteriophage P21
  CDS (1)..(216): transl_table=11
atgaaatcaatggacaaaatctcaactggcattgcctacggaacatctgctggtagtgcgggatactggtttttgcagtggttggatcaggtcagtccgtcacagtgggctgcgattggagtgcttggaagccttgtgttgggttttctcacttatctgacaaatctgtatttcaaaatcagagaagacagacgaaaggctgcgagaggtgaataa

SEQ ID NO: 18665 - protein, 71 aa, Bacteriophage P21
MKSMDKISTGIAYGTSAGSAGYWFLQWLDQVSPSQWAAIGVLGSLVLGFLTYLTNLYFKIREDRRKAARGE

SEQ ID NO: 18666 - DNA, 24 bp, Artificial sequence
  Primer sequence
atgctgtcaaaactaccccgtaga

SEQ ID NO: 18667 - DNA, 23 bp, Artificial sequence
  Primer sequence
ttactctcctctcgcagccttac

SEQ ID NO: 18668 - protein, 71 aa, Artificial sequence
  Consensus
  Variant (2)..(3): Xaa in position 2 to 3 is any amino acid
  Variant (14)..(14): Xaa in position 14 is any amino acid
  Variant (18)..(20): Xaa in position 18 to 20 is any amino acid
  Variant (24)..(24): Xaa in position 24 is any amino acid
  Variant (27)..(27): Xaa in position 27 is any amino acid
  Variant (30)..(30): Xaa in position 30 is any amino acid
  Variant (37)..(37): Xaa in position 37 is any amino acid
  Variant (47)..(47): Xaa in position 47 is any amino acid
  Variant (49)..(49): Xaa in position 49 is any amino acid
  Variant (67)..(67): Xaa in position 67 is any amino acid
MXXMEKITTGVSYXTSAXXXGYWXLQXLDXVSPSQWXAIGVLGSLLXGXLTYLTNLYFKIREDRRKXARGE

SEQ ID NO: 18669 - protein, 10 aa, Artificial sequence
  Consensus
  Variant (2)..(2): Xaa in position 2 is Asp or Glu
  Variant (5)..(5): Xaa in position 5 is Ser or Thr
  Variant (7)..(7): Xaa in position 7 is Gly or Ser
  Variant (8)..(8): Xaa in position 8 is Ile or Val
  Variant (9)..(9): Xaa in position 9 is Ala or Ser
MXKIXTXXXY

SEQ ID NO: 18670 - protein, 6 aa, Artificial sequence
  Consensus
  Variant (2)..(2): Xaa in position 2 is Phe or Leu
  Variant (5)..(5): Xaa in position 5 is any amino acid
WXLQXL

SEQ ID NO: 18671 - protein, 14 aa, Artificial sequence
  Consensus
  Variant (5)..(5): Xaa in position 5 is any or no amino acid
  Variant (7)..(7): Xaa in position 7 is any or no amino acid
PSQWXAXIGVLGSL

SEQ ID NO: 18672 - DNA, 294 bp, Escherichia coli K12
  CDS (1)..(294): transl_table=11
atgagccagaacgctacggttaacgtcgacatcaaattaggcgtcaataaattccatgttgatgagggccacccgcatatcattctggcggaaaatcccgatatcaatgaattccataaattaatgaaagcctgccctgccggactttataagcaggatgacgcaggaaacattcattttgattccgccggttgtctggagtgcggcacctgtcgggtgctgtgcggtaacactattctcgaacagtggcaatatcccgcaggcaccttcggtattgattttcgctacggctaa

SEQ ID NO: 18673 - protein, 97 aa, Escherichia coli K12
MSQNATVNVDIKLGVNKFHVDEGHPHIILAENPDINEFHKLMKACPAGLYKQDDAGNIHFDSAGCLECGTCRVLCGNTILEQWQYPAGTFGIDFRYG

SEQ ID NO: 18674 - DNA, 300 bp, Mesorhizobium loti MAFF303099
  CDS (1)..(300): transl_table=11
atgacgatggccgtgacgaagttacgtgtcgaggagaagctttatcagaaccgctatctggtcgatccgggccgcccgcatatcaaagtgcgaccgcacgagaggccgagcgcgaacctgctcgcgctgacacacatctgcccggccaaatgctatgagttgaacgacaagggacaggtggagaccacttccgacggctgcatggaatgcggcacctgtcgcgtgctgtgcgaggccagcggtgagatcgtgtggaattacccgcgcggcggcttcggcgttctcttcaagttcggatga

SEQ ID NO: 18675 - protein, 99 aa, Mesorhizobium loti MAFF303099
MTMAVTKLRVEEKLYQNRYLVDPGRPHIKVRPHERPSANLLALTHICPAKCYELNDKGQVETTSDGCMECGTCRVLCEASGEIVWNYPRGGFGVLFKFG

SEQ ID NO: 18676 - DNA, 273 bp, Thermoplasma volcanium GSS1
  CDS (1)..(273): transl_table=11
atgaaaatagaagaaaaattatcgttattaaattataaaacggataaatcatacgcacatataacaataaacccggatatatgcagtacatgcccagatcatttctgcgtgtttgcgtgccctgccaactgctatacgcttataaatggcaagcttaacttcaaatatgaagactgcgtagaatgtggaacctgcgatatagcctgctcccatgggagtgttaagtggacgctaccaaagggggataacggagttatatacaaatacgggtga

SEQ ID NO: 18677 - protein, 90 aa, Thermoplasma volcanium GSS1
MKIEEKLSLLNYKTDKSYAHITINPDICSTCPDHFCVFACPANCYTLINGKLNFKYEDCVECGTCDIACSHGSVKWTLPKGDNGVIYKYG

SEQ ID NO: 18678 - DNA, 279 bp, Thermotoga maritima MSB8
  CDS (1)..(279): transl_table=11
gtgaggatcgaagataaactctatttgaacagatacagaacggatgaggaaaatccgcatctcaaaataaaagatgaaagcatctgtgcggaaaaatgttccgatcgaccatgtgtgagctgttgtcctgcggatgtgtacgagtggacggagagtggaatggaggtgaaattcgaggggtgtctcgagtgtggcacctgtaggattgtttgtccctttggaaacatagaatggaattatccaaggggaaattacggtgtgctctacaaattcgggtga

SEQ ID NO: 18679 - protein, 92 aa, Thermotoga maritima MSB8
MRIEDKLYLNRYRTDEENPHLKIKDESICAEKCSDRPCVSCCPADVYEWTESGMEVKFEGCLECGTCRIVCPFGNIEWNYPRGNYGVLYKFG

SEQ ID NO: 18680 - DNA, 297 bp, Escherichia coli O157:H7
  CDS (1)..(297): transl_table=11
gtggaatctggcgggcgatgttatcaggagtgttcgatgtctgtagcccgtaatctctggcgcgctgctgatgcgccgcacattgttccggctgactccgttgagcgtcagatggtacaacggttgattaacgcctgtccggtaggtcttttttcgctcacaccggaaggtgacttacgcgttgattatcacggctgcctggagtgtggcacctgccgtttgctgtgcgacgaatccacactacaacagtggcgctatccgccttccggattcggcatcacctaccgatttggataa

SEQ ID NO: 18681 - protein, 98 aa, Escherichia coli O157:H7
MESGGRCYQECSMSVARNLWRAADAPHIVPADSVERQMVQRLINACPVGLFSLTPEGDLRVDYHGCLECGTCRLLCDESTLQQWRYPPSGFGITYRFG

SEQ ID NO: 18682 - DNA, 282 bp, Sulfolobus tokodaii str. 7
  CDS (1)..(282): transl_table=11
atgagagtagaagaaaggctttatactttaaggtataaaagggatgagaaaccgcatctagagataaaagatcaacaaacctgcaataaatgtcacgaaacttataagtcaccgtgtatcacagtctgtccagcaaacgtatactcttttgccgaaggaaaaataatagtctcatatgaaaattgccttgaatgcggagcttgcaaaatagtttgtcccttcaataacattatttggagatacccaagatatggtttagggatatctttaagatacggatga

SEQ ID NO: 18683 - protein, 93 aa, Sulfolobus tokodaii str. 7
MRVEERLYTLRYKRDEKPHLEIKDQQTCNKCHETYKSPCITVCPANVYSFAEGKIIVSYENCLECGACKIVCPFNNIIWRYPRYGLGISLRYG

SEQ ID NO: 18684 - DNA, 273 bp, Thermoplasma acidophilum DSM 1728
  CDS (1)..(273): transl_table=11
atgaagattgaggaaaagctttccctgttaaactacaagacggatcgatcatacgcgcacataacgatcgatcccgatatatgtgctggatgcccagatcacttctgtgttttcgcctgtcctgcaaactgctacacactcataaacggtaagctgaacttcaagtatgaagactgtgtagaatgcggcacatgcgacatagcgtgctcacacggtagcgtgaaatggacgcttccgaagggagacaacggagtcatatacaaatatgggtga

SEQ ID NO: 18685 - protein, 90 aa, Thermoplasma acidophilum DSM 1728
MKIEEKLSLLNYKTDRSYAHITIDPDICAGCPDHFCVFACPANCYTLINGKLNFKYEDCVECGTCDIACSHGSVKWTLPKGDNGVIYKYG

SEQ ID NO: 18686 - DNA, 291 bp, Pyrobaculum aerophilum str. IM2
  CDS (1)..(291): transl_table=11
atgagtttgaagtactttacaattgaagaaaggcttaatgcaaatgcttgggacgttgatgtccacaggccacatataagaattaaagacccggagaagtgcagaaaatgtgaaaaaaagccgtgtacttatatgtgtccagcaaaatgctacgtacaacagggggattacgtagtgcttagcacagaggcgtgtgtggaatgcggcacttgccgcgttgtgtgcccacacggcagtatagaatggaattacccgcggtctggcatgggaatttggtatagatttacttga

SEQ ID NO: 18687 - protein, 96 aa, Pyrobaculum aerophilum str. IM2
MSLKYFTIEERLNANAWDVDVHRPHIRIKDPEKCRKCEKKPCTYMCPAKCYVQQGDYVVLSTEACVECGTCRVVCPHGSIEWNYPRSGMGIWYRFT

SEQ ID NO: 18688 - DNA, 285 bp, Fusobacterium nucleatum subsp. nucleatum ATCC 25586
  CDS (1)..(285): transl_table=11
atgaagaagatgacaatagaagataaacttggattaaatgtttttcatgttgatgaagaaaattctcatattgatgtagataaaaattttactgatgaagtagaaattaaaaaattattattggcttgtccagcagaatgttataaatacattgatggaaaattaagtttcagtcatttaggttgtctagaatgtggaacttgtagagtgctttcacatggaaaaattgtaaaatcttggaaacatccaatcggagaagtaggagttacttttagacaaggataa

SEQ ID NO: 18689 - protein, 94 aa, Fusobacterium nucleatum subsp. nucleatum ATCC 25586
MKKMTIEDKLGLNVFHVDEENSHIDVDKNFTDEVEIKKLLLACPAECYKYIDGKLSFSHLGCLECGTCRVLSHGKIVKSWKHPIGEVGVTFRQG

SEQ ID NO: 18690 - DNA, 297 bp, Shigella flexneri 2a str. 301
  CDS (1)..(297): transl_table=11
gtggcatctggcgggcgatgttatcaggagtctgcgatgtctgtagcccgtaatctctggcgcgttgctgatgcgccgcacattgttccggctgactccgttgagcgtcagatggtacaacggttgattaacgcctgtccggtaggtcttttttctctcacacaggaaggtgacttacgtattgactatcgcggctgcctggagtgtggcacctgccgtttgctgtgcgacgaatccacactacaacagtggcgctatccgccttccggattcggcatcacctaccgctttggataa

SEQ ID NO: 18691 - protein, 98 aa, Shigella flexneri 2a str. 301
MASGGRCYQESAMSVARNLWRVADAPHIVPADSVERQMVQRLINACPVGLFSLTQEGDLRIDYRGCLECGTCRLLCDESTLQQWRYPPSGFGITYRFG

SEQ ID NO: 18692 - DNA, 297 bp, Escherichia coli CFT073
  CDS (1)..(297): transl_table=11
gtggcatctgacgggcgatgttatcaggagtctacgatgtctgtagcccgtaatctctggcgcgctgccgatgcgccgcacattgttccagctgactccgttgagcgccagacggcacaacggttgattaacgcctgtccggctggtcttttttcgctcacacctgaaggtgacttacgcgttgattatcacggctgcctggagtgtggcacctgccgtttgctgtgcgacgaatcaacactacaacagtggcgctatccgccttccggattcggcatcacctaccgctttggataa

SEQ ID NO: 18693 - protein, 98 aa, Escherichia coli CFT073
MASDGRCYQESTMSVARNLWRAADAPHIVPADSVERQTAQRLINACPAGLFSLTPEGDLRVDYHGCLECGTCRLLCDESTLQQWRYPPSGFGITYRFG

SEQ ID NO: 18694 - DNA, 297 bp, Rhodopseudomonas palustris CGA009
  CDS (1)..(297): transl_table=11
atgacaacggaagccccggttcgcgtcgaagacaagctgtatcagaaccgctatctggtcgacgtcggcaatgcccacatcaaggtcaagccccacaccaagccatcgccgcaactgctggcgctgttgaaagtgtgcccggcgcactgctacgagctgaacagtaacggacaggtcgaagtgacgccggacggctgcgtcgaatgcggcacctgccgggtgctcgccgaaggtggcggcgacatcgagtggagctacccgcgcggcggctacggcgtgctgttcaagttcggctga

SEQ ID NO: 18695 - protein, 98 aa, Rhodopseudomonas palustris CGA009
MTTEAPVRVEDKLYQNRYLVDVGNAHIKVKPHTKPSPQLLALLKVCPAHCYELNSNGQVEVTPDGCVECGTCRVLAEGGGDIEWSYPRGGYGVLFKFG

SEQ ID NO: 18696 - DNA, 294 bp, Salmonella enterica subsp. enterica serovar Choleraesuis str
  CDS (1)..(294): transl_table=11
atgagttcggacaataaggtgaatgttgacgtcaaattgggcgtaaataaattttacgtagatgaaggacacccacatatcattttgcgatcctcgcctgacatgcaggagtttaataaattaataaaagcctgccctgccggactctataagctggacgatgcgggaaatattcattttgactccgcgggctgcctggaatgcgggacctgcagggttctctgcggcaatactcttctcgaaaaatgggaatacccggcgggaacgttcggcgttgagtttcgctacggctga

SEQ ID NO: 18697 - protein, 97 aa, Salmonella enterica subsp. enterica serovar Choleraesuis str
MSSDNKVNVDVKLGVNKFYVDEGHPHIILRSSPDMQEFNKLIKACPAGLYKLDDAGNIHFDSAGCLECGTCRVLCGNTLLEKWEYPAGTFGVEFRYG

SEQ ID NO: 18698 - DNA, 291 bp, Sulfolobus acidocaldarius DSM 639
  CDS (1)..(291): transl_table=11
atgagaattgaggaaaggttatatactttaagatataagagagacgaaaaaccacacttatcaataattgagcccaataagtgtcaaaagtgtgctgaaattaatggagtacctgaaccatgtatcgttgtttgcccagcaaatgtgtactcatgggtagacaacaatagaatagtagtatcctatgagaactgtgttgagtgcggagcctgtagaatagcatgtccattcgataatatttcctggaagtatccaagatatggtctcggagtagcatttagatatgggtaa

SEQ ID NO: 18699 - protein, 96 aa, Sulfolobus acidocaldarius DSM 639
MRIEERLYTLRYKRDEKPHLSIIEPNKCQKCAEINGVPEPCIVVCPANVYSWVDNNRIVVSYENCVECGACRIACPFDNISWKYPRYGLGVAFRYG

SEQ ID NO: 18700 - DNA, 297 bp, Shigella sonnei Ss046
  CDS (1)..(297): transl_table=11
gtggcatctggcgggcgatgttatcaggagtctgcgatgtctgtagcccataatctctggcgcgttgctgatgcgccgcacattgttccggctgactccgttgagcgtcagatggtacaacggttgattaacgcctgtccggcaggtcttttttcgctcacaccggaaggtgacttacgcgttgattatcacggctgcctggagtgtggcacctgccgtttgctgtgcgacgaatccacactacaacagtggcgctatccgccttccggattcggcatcacctaccgctttggataa

SEQ ID NO: 18701 - protein, 98 aa, Shigella sonnei Ss046
MASGGRCYQESAMSVAHNLWRVADAPHIVPADSVERQMVQRLINACPAGLFSLTPEGDLRVDYHGCLECGTCRLLCDESTLQQWRYPPSGFGITYRFG

SEQ ID NO: 18702 - DNA, 291 bp, Rhodospirillum rubrum
  CDS (1)..(291)
atggcgatgagcgacaaaatcgaagaaaagctgtatcagaaccgctatcgggttgacgagggctgtccccacgtccgtatcgatgcgtccaaggtcccctccgagcagttgaaggcgatggtcgacatctgccccgccggctgctacgtggaaggggagaacggcaaggtcgaagttgttcccgatggttgcatggagtgcgggacctgtcgcattgtgtgtcaggaaaccggtgaactggaatgggcctatccgcgtggcggctatggcattctgttcaagtttggctga

SEQ ID NO: 18703 - protein, 96 aa, Rhodospirillum rubrum
MAMSDKIEEKLYQNRYRVDEGCPHVRIDASKVPSEQLKAMVDICPAGCYVEGENGKVEVVPDGCMECGTCRIVCQETGELEWAYPRGGYGILFKFG

SEQ ID NO: 18704 - DNA, 300 bp, Burkholderia fungorum LB400
  CDS (1)..(300)
atgagcaccgtacccgtcaacgtagaggaaaagctgttccagaaccgttaccgcgtggatgcggggcggccgcacatccgcatcaaggacgccgacgtgtgcctgagcgagtgcagcgcgaagagttgcaccttcgtctgcccggcgtcctgctacaaggccgaaggcaacggcgcggtaacgctgatcaccgacggttgcctcgaatgcggcagctgccgcattctctgtaccgaccaccagaacatcgagtgggactacccgcgcggcggtcacggcatcctgttcaaattcggttga

SEQ ID NO: 18705 - protein, 99 aa, Burkholderia fungorum LB400
MSTVPVNVEEKLFQNRYRVDAGRPHIRIKDADVCLSECSAKSCTFVCPASCYKAEGNGAVTLITDGCLECGSCRILCTDHQNIEWDYPRGGHGILFKFG

SEQ ID NO: 18706 - DNA, 285 bp, Azotobacter vinelandii AvOP
  CDS (1)..(285): transl_table=11
atgtcgaagatcgaagaaaagctgttccaggatcgttatcgggtcgactccggccggccgcacatcaggatcaaggaccccgaccattgcaccgaatgtctggaaaagcagtgcaccgtctgctgtccggccggttgctacacccgcgaaaccaacggcaaggtcaccctggtgaccgacggctgcctggagtgcggaacctgcaggatcatttgccaggacagcggcaacctggagtgggaatggcccaggggcggattcggaatcctgttcaagttcggttga

SEQ ID NO: 18707 - protein, 94 aa, Azotobacter vinelandii AvOP
MSKIEEKLFQDRYRVDSGRPHIRIKDPDHCTECLEKQCTVCCPAGCYTRETNGKVTLVTDGCLECGTCRIICQDSGNLEWEWPRGGFGILFKFG

SEQ ID NO: 18708 - DNA, 300 bp, Burkholderia vietnamiensis G4
  CDS (1)..(300): transl_table=11
atgagcaccgtgacagtcaacgtcgaggaaaagctgtttcagaaccgctaccgcgtcgacgcgggccggccccacatccgcatcaagagcacggacgtctgcctgaacgactgcaggcagaagagctgcacgttcgtctgcccggcgtcgtgctacaaggccgaaggcaacggcgcggtgacgctgatcaccgacggctgcctcgagtgcgggagctgccggatcctgtgcagcgaacatcagaacatcgaatgggagtacccgcggggcggccacgggatcctgttcaagttcggttga

SEQ ID NO: 18709 - protein, 99 aa, Burkholderia vietnamiensis G4
MSTVTVNVEEKLFQNRYRVDAGRPHIRIKSTDVCLNDCRQKSCTFVCPASCYKAEGNGAVTLITDGCLECGSCRILCSEHQNIEWEYPRGGHGILFKFG

SEQ ID NO: 18710 - DNA, 282 bp, Desulfitobacterium hafniense DCB-2
  CDS (1)..(282): transl_table=11
atgaagaaattaagtttggcagataaattgtctctgaacaaatttgaagtgaatgaaggagagcctcatatccggatcgatcagcaggtctgccggacctgccgagaaaaaagctgccttaccgcttgtccggcggggctttacagcgaacaaaacgaccagattacagtggaatgggcaggttgcctggagtgcggaacctgccggatcatctgtggcaaaaaggccatctcctgggagtatcctcaagggggattcggaatcatttatcgtcaaggatag

SEQ ID NO: 18711 - protein, 93 aa, Desulfitobacterium hafniense DCB-2
MKKLSLADKLSLNKFEVNEGEPHIRIDQQVCRTCREKSCLTACPAGLYSEQNDQITVEWAGCLECGTCRIICGKKAISWEYPQGGFGIIYRQG

SEQ ID NO: 18712 - DNA, 279 bp, Desulfitobacterium hafniense DCB-2
  CDS (1)..(279): transl_table=11
atgaaattagatgataaattgtatttggtgcgctttaacacagacaaattaaatcacatcaaaatcagcaacggcgaactttgtttaaagtgcaaagacaaagtatgcacctttatttgcccggcccatgtctatgactgggatgaagaagagaatcgcattgctgtcggctatgaaggctgtttggaatgcggtacctgccgtgtagcctgcccccatggcaatattcaatgggattatccacggggcggtttcggagtctcctggaagaacggctga

SEQ ID NO: 18713 - protein, 92 aa, Desulfitobacterium hafniense DCB-2
MKLDDKLYLVRFNTDKLNHIKISNGELCLKCKDKVCTFICPAHVYDWDEEENRIAVGYEGCLECGTCRVACPHGNIQWDYPRGGFGVSWKNG

SEQ ID NO: 18714 - DNA, 297 bp, Desulfitobacterium hafniense DCB-2
  CDS (1)..(297): transl_table=11
atgatcatcaagaataacgtcaacgtcgatcacaaactgggcatcaataaatttcatgtggatgaagaaaatgcccatatcgttttaaaagaagacaacctggacatgaaggaatatcagaaactggtgatcgcctgcccggcagggttatataagatcgacgaaaaaggaaatccccaatttgactatgcgggatgcttagaatgcggaacttgtcgggtgttgtgcggcaagaccattatagaaaaatgggagcttccccagggaacgctggggatagaattcagattcgggtaa

SEQ ID NO: 18715 - protein, 98 aa, Desulfitobacterium hafniense DCB-2
MIIKNNVNVDHKLGINKFHVDEENAHIVLKEDNLDMKEYQKLVIACPAGLYKIDEKGNPQFDYAGCLECGTCRVLCGKTIIEKWELPQGTLGIEFRFG

SEQ ID NO: 18716 - DNA, 288 bp, Desulfitobacterium hafniense DCB-2
  CDS (1)..(288): transl_table=11
atgagtcaggtcaatgtcgatcagaagcttggggtcaataagttccatgtggatgaagaaaacgcccatattgtcatgaaagaggggaatatcgatcgggcggaatatcaaaaattggttctggcctgtccggcagggttatataaaattaatgacagcggcgacattcaatttgactacgccgggtgtctggagtgcggcacctgccgggtgctttgcggtaaaacccttttggataaatgggaatttcctctgggaaccttaggtgtggagtttagatacgggtga

SEQ ID NO: 18717 - protein, 95 aa, Desulfitobacterium hafniense DCB-2
MSQVNVDQKLGVNKFHVDEENAHIVMKEGNIDRAEYQKLVLACPAGLYKINDSGDIQFDYAGCLECGTCRVLCGKTLLDKWEFPLGTLGVEFRYG

SEQ ID NO: 18718 - DNA, 279 bp, Moorella thermoacetica ATCC 39073
  CDS (1)..(279): transl_table=11
atgcgcctggaggataaactctttcttaatcgttatcagaccgacaaacaccctcacctgcgcatcaaggaccgggaggtctgccgccactgcgagggcaaaccctgtacctttatctgcccggcccgggtttacgtctggaacgaaagggaagaacgcatcgagaccgcctatgaaggttgcgtcgaatgcggcacctgccgctacgggtgtgcccatgataacatcgactggcgctatccccgcggcggtttcggtatcttgtataagtatggttaa

SEQ ID NO: 18719 - protein, 92 aa, Moorella thermoacetica ATCC 39073
MRLEDKLFLNRYQTDKHPHLRIKDREVCRHCEGKPCTFICPARVYVWNEREERIETAYEGCVECGTCRYGCAHDNIDWRYPRGGFGILYKYG

SEQ ID NO: 18720 - DNA, 285 bp, Syntrophomonas wolfei str. Goettingen
  CDS (1)..(285): transl_table=11
atgagtgaaatattaggattgaaagccaagctgggattggatgtttttaaagccgataaagaagctcatataaagatcaggccaggtatggagaaagacccccgcttgaaaagggcgattctggtatgcccggccgggctttatagcgaaaatgccgaaggtgtcgttgaatttaccattgatggatgcctggaatgcggcacttgccgtctggcttgcggtaccgaggtcttggaatggaattatcccggcggcggaagcggagtgcaatttcgcttcggctag

SEQ ID NO: 18721 - protein, 94 aa, Syntrophomonas wolfei str. Goettingen
MSEILGLKAKLGLDVFKADKEAHIKIRPGMEKDPRLKRAILVCPAGLYSENAEGVVEFTIDGCLECGTCRLACGTEVLEWNYPGGGSGVQFRFG

SEQ ID NO: 18722 - DNA, 288 bp, Syntrophobacter fumaroxidans MPOB
  CDS (1)..(288): transl_table=11
gtgaaacgcttgagcatcgaacagttgctgggaatgaacaagttcgtggtggatgacgaggaggcgcacatcaaggtgaaccgggaggtttgcgcgtcatgcccggacaagccttgcacctgggcatgtccggccgggctctacagcgtcaaggacggcgcgctgagcttcgattacgccgggtgcctggagtgcggcacgtgccgcgtggcctgccccaacgccggctccgccatcgactggaactatccgcgcggaggtttcggagtccacttccgctatggatga

SEQ ID NO: 18723 - protein, 95 aa, Syntrophobacter fumaroxidans MPOB
MKRLSIEQLLGMNKFVVDDEEAHIKVNREVCASCPDKPCTWACPAGLYSVKDGALSFDYAGCLECGTCRVACPNAGSAIDWNYPRGGFGVHFRYG

SEQ ID NO: 18724 - DNA, 297 bp, Rhizobium leguminosarum
  CDS (1)..(297): transl_table=11
atgagggcgaccatcattgagcgcattgaggacaagctgtaccaaaaccgatatctcgtcgacactggacgtccgcatataacagtgcgaccgcaccggtcgccaagcccgaacctgctcgccttgacgcaaatctgtccggccaaatgctacgagctgaacgaaattggtcaggtggcgattgttcccgatggctgcttggaatgcggcacatgcagagtgttgtgcgaagctagtggcgacataaagtggaatataccccggggcgggttcggggtcctcttcaaattcggatga

SEQ ID NO: 18725 - protein, 98 aa, Rhizobium leguminosarum
MRATIIERIEDKLYQNRYLVDTGRPHITVRPHRSPSPNLLALTQICPAKCYELNEIGQVAIVPDGCLECGTCRVLCEASGDIKWNIPRGGFGVLFKFG

SEQ ID NO: 18726 - DNA, 297 bp, Rhizobium leguminosarum bv
  CDS (1)..(297): transl_table=11
atgaaggcgaccaccattgagcgcattgaggataagctgtaccaaaaccgatatctcgtcgatactggacgcccacacattacggtgcggccgcatcggtcgccaagcccaagcctgctcgccttgacgcaaatctgtccggccaaatgctacgaggtgaacgaaattggtcaagtggcgattgtttcggatggctgcttggaatgcggcacatgcagagtgttatgcgaagcgagtggcgacataaagtggaattatccccggggagggttcggggtcctcttcaaattcggatga

SEQ ID NO: 18727 - protein, 98 aa, Rhizobium leguminosarum bv
MKATTIERIEDKLYQNRYLVDTGRPHITVRPHRSPSPSLLALTQICPAKCYEVNEIGQVAIVSDGCLECGTCRVLCEASGDIKWNYPRGGFGVLFKFG

SEQ ID NO: 18728 - DNA, 300 bp, Rhizobium loti
  CDS (1)..(300): transl_table=11
atgacgatggccgtgacgaagttacgagtcgaggagaagctttatcagaaccgctatctggtcgatccgggccgcccgcatatcaaagtgcgaccgcacgagaggccgagcgcgaacctgctcgcgctgacacacatctgcccggccaagtgctatgagttgaacgacaagggacaggtggagaccacttccgacggctgcatggaatgcggcacctgtcgcgtgttgtgcgaggccaacggtgagatcgtatggaattacccgcgcggcggctttggcgtactcttcaagtttggatga

SEQ ID NO: 18729 - protein, 99 aa, Rhizobium loti
MTMAVTKLRVEEKLYQNRYLVDPGRPHIKVRPHERPSANLLALTHICPAKCYELNDKGQVETTSDGCMECGTCRVLCEANGEIVWNYPRGGFGVLFKFG

SEQ ID NO: 18730 - DNA, 294 bp, Azospirillum brasilense
  CDS (1)..(294): transl_table=11
atgagcatcgtggtcaagatcgaagagaagctgtaccagaaccgctacatcgtggacgagagccggccgcacatccagatccgcaacgacgcggtctgcaagtcctgcgagtcccaggcctgcaccatctgctgcccggcggcctgctacagcaagaacgagacgggcagcgtgacgctggccaccgacggctgcctggaatgcggcacctgccgcgtggtctgccaggacaaggaaaatattcagtgggactacccacggggcggctacggcatcagttataagtttggttga

SEQ ID NO: 18731 - protein, 97 aa, Azospirillum brasilense
MSIVVKIEEKLYQNRYIVDESRPHIQIRNDAVCKSCESQACTICCPAACYSKNETGSVTLATDGCLECGTCRVVCQDKENIQWDYPRGGYGISYKFG

SEQ ID NO: 18732 - DNA, 285 bp, Acetobacter diazotrophicus
  CDS (1)..(285): transl_table=11
atgagcgatcgggtcgaagaccgtctgttccagaacaggtatgtcgtggatgtcgggcggccgcatattaccgtccgtccgcatgaaaccccgtcgcaggcgctcctggtcatgacgcgcatctgtcccgccggctgttacagccagaatgaacagggacaggtggaagtcgccgccgacgggtgcatggaatgcgggacgtgtcgcgtcgtgtgctccaagacgggcgatatcgaatggcagtatccgcgtggtggatacggtgtccttttcaagttcggttaa

SEQ ID NO: 18733 - protein, 94 aa, Acetobacter diazotrophicus
MSDRVEDRLFQNRYVVDVGRPHITVRPHETPSQALLVMTRICPAGCYSQNEQGQVEVAADGCMECGTCRVVCSKTGDIEWQYPRGGYGVLFKFG

SEQ ID NO: 18734 - DNA, 294 bp, Azorhizobium caulinodans
  CDS (1)..(294): transl_table=11
atggctgacgcatcggtccgtgtcgaggacaagctcttctacaatcgctacctggtcgattccggccgggcccacatcaaggtgcggccgcacaccgagccgccgccggccctgctgagcatgctcaagctgtgcccggcccgctgctacgaactcaatgaagccgggcaggtggaagtcaccgtggacggctgcgtggaatgcggcacctgccgcgtcatcgccgagccctcgggcgacatagaatggacctatccgcgcggcggcttcggcgtgctgttcaagttcggctga

SEQ ID NO: 18735 - protein, 97 aa, Azorhizobium caulinodans
MADASVRVEDKLFYNRYLVDSGRAHIKVRPHTEPPPALLSMLKLCPARCYELNEAGQVEVTVDGCVECGTCRVIAEPSGDIEWTYPRGGFGVLFKFG

SEQ ID NO: 18736 - DNA, 285 bp, Azotobacter vinelandii
  CDS (1)..(285): transl_table=11
atgtcgaagatcgaagaaaagctgttccaggatcgttatcgggtcgactccggccggccgcacatcaggatcaaggaccccgaccattgcaccgaattgtctgaaaagcagtgcaccgtctgctgtccggccggttgctacacccgcgaaaccaacggcaaggtcaccctggtgaccgacggctgcctggagtgcggaacctgcaggatcatttgccaggacagcggcaacctggagtgggaatggcccaggggcggattcggaatcctgttcaagttcggttga

SEQ ID NO: 18737 - protein, 94 aa, Azotobacter vinelandii
MSKIEEKLFQDRYRVDSGRPHIRIKDPDHCTELSEKQCTVCCPAGCYTRETNGKVTLVTDGCLECGTCRIICQDSGNLEWEWPRGGFGILFKFG

SEQ ID NO: 18738 - DNA, 297 bp, Bradyrhizobium japonicum
  CDS (1)..(297): transl_table=11
atgaatgtcgaaccctccgtgcgcgtcgaagacaagctgtactacaaccgttatcttgtcgacgccgggcaccctcacgtcagggtacgtgcgcacaagacgccatcgccgcagctcctcacacttttgaaggcctgcccggcgcgatgctacgagctcaacgacaacggccaggtcgaagttacagttgatggctgcattgaatgcggtacctgccgcgtgatcgccgagccgaccggcgacatcgaatggagccacccgcgcggcggatatggtgttctgttcaagtttgggtga

SEQ ID NO: 18739 - protein, 98 aa, Bradyrhizobium japonicum
MNVEPSVRVEDKLYYNRYLVDAGHPHVRVRAHKTPSPQLLTLLKACPARCYELNDNGQVEVTVDGCIECGTCRVIAEPTGDIEWSHPRGGYGVLFKFG

SEQ ID NO: 18740 - DNA, 288 bp, Escherichia coli O157
  CDS (1)..(288): transl_table=11
atgacttctcccgtcaatgtggacgtcaaactgggcgtcaataaattcaatgtcgatgaagagcatccgcacattgttgtgaaagccgatgccgataaacaggcgctggagctgctggtgaaagcgtgccccgcaggtctgtacaagaagcaggatgacggcagtgtgcgcttcgattacgccggatgtctggagtgcggcacctgtcgcattctggggctggggtcggcgctggaacagtgggaatacccgcgcggcacctttggtgtggagttccgttacggctga

SEQ ID NO: 18741 - protein, 95 aa, Escherichia coli O157
MTSPVNVDVKLGVNKFNVDEEHPHIVVKADADKQALELLVKACPAGLYKKQDDGSVRFDYAGCLECGTCRILGLGSALEQWEYPRGTFGVEFRYG

SEQ ID NO: 18742 - DNA, 297 bp, Rhizobium leguminosarum
  CDS (1)..(297): transl_table=11
atgaaggcgaccaccattgagcgcattgaggataagctgtaccaaaaccgatatctcgtcgatactagacgcccacacattacggtgcggccgcatcggtcgccaagcccaagcctgctcgccttgacgcaaatctgtccggccaaatgctacgaggtgaacgaaattggtcaagtggcgattgtttcggatggctgcttggaatgcggcacatgcagagtgttagccgaagcgagtggcgacataaagtggaattatccccggggagggttcggggtcctcttcaaattcggatga

SEQ ID NO: 18743 - protein, 98 aa, Rhizobium leguminosarum
MKATTIERIEDKLYQNRYLVDTRRPHITVRPHRSPSPSLLALTQICPAKCYEVNEIGQVAIVSDGCLECGTCRVLAEASGDIKWNYPRGGFGVLFKFG

SEQ ID NO: 18744 - DNA, 300 bp, Rhizobium leguminosarum bv
  CDS (1)..(300): transl_table=11
atgacggttgcagtgacgaacatacgcgtagaggacaagctttaccaaaatcgatacgtggtcgatgccggacgcccgcatattagggtgcgtccacacgattggccaagcgtaaatctgtatgccctcacaagtgtctgtccggccaagtgctacgaattgaatgaccagggccaagtggaggttatcgccgatgggtgcatggagtgcggcacgtgccgcgtactctgcgaggcaagtggagatatcgagtggaactatccgagaggcggtttcggcgttctcttcaagttcggataa

SEQ ID NO: 18745 - protein, 99 aa, Rhizobium leguminosarum bv
MTVAVTNIRVEDKLYQNRYVVDAGRPHIRVRPHDWPSVNLYALTSVCPAKCYELNDQGQVEVIADGCMECGTCRVLCEASGDIEWNYPRGGFGVLFKFG

SEQ ID NO: 18746 - DNA, 297 bp, Rhizobium leguminosarum bv
  CDS (1)..(297): transl_table=11
atgaaggccatcgttaagcggcgagttgaggacaagctttaccagaaccgatatctggttgacccgggccgtccacacatatcggtcagaaaacacctgtttccaaccccaaacctaatcgccttgacgcaagtgtgtccggcgaaatgctatcagctgaacgacagacgtcaagtgatcatcgtttccgatggctgcttggaatgcgggacatgcaacgtgttatgcggacccgacggcgacattgagtggacgtatccacgaggtgggttcggcgttctcttcaagtttggatga

SEQ ID NO: 18747 - protein, 98 aa, Rhizobium leguminosarum bv
MKAIVKRRVEDKLYQNRYLVDPGRPHISVRKHLFPTPNLIALTQVCPAKCYQLNDRRQVIIVSDGCLECGTCNVLCGPDGDIEWTYPRGGFGVLFKFG

SEQ ID NO: 18748 - DNA, 297 bp, Rhizobium meliloti
  CDS (1)..(297): transl_table=11
atgaagacggcaatcgcggagcgtatcgaagacaagctttaccagaaccgctatctggtcgacgcagggcgtccacacattacagtgcggccacaccggtcgccaagcttaaacctgctcgcgctcacgcgagtctgcccggccaaatgctacgagttgaatgaaactgggcaagtggaagtcactgccgatggctgcatggagtgcggcacatgcagagtgttgtgcgaggcaaacggtgacgtcgagtggagctatccacgaggtggcttcggtgtcctcttcaagttcggatga

SEQ ID NO: 18749 - protein, 98 aa, Rhizobium meliloti
MKTAIAERIEDKLYQNRYLVDAGRPHITVRPHRSPSLNLLALTRVCPAKCYELNETGQVEVTADGCMECGTCRVLCEANGDVEWSYPRGGFGVLFKFG

SEQ ID NO: 18750 - DNA, 294 bp, Rhizobium sp
  CDS (1)..(294): transl_table=11
atgacagcttcagtcgttcgcattgaagacaagctttaccaaaaccgttacctggtggacgcggggcggccgcacatcaaggtgcggcagcatcagtctccgagcccaaacctgcttgcgctgaccgttgtttgcccagcgaaatgctacgaggtgaatgaagacggccaagtagaggttattgcggatggatgcatggaatgcgggacatgtagagtactgtgcgaagagagcggtgacattgattggagctatccgcgaggtggattcggtgtgctctttaaattcggatga

SEQ ID NO: 18751 - protein, 97 aa, Rhizobium sp
MTASVVRIEDKLYQNRYLVDAGRPHIKVRQHQSPSPNLLALTVVCPAKCYEVNEDGQVEVIADGCMECGTCRVLCEESGDIDWSYPRGGFGVLFKFG

SEQ ID NO: 18752 - DNA, 288 bp, Salmonella typhi
  CDS (1)..(288): transl_table=11
atgacatctcccgtcaatgtggacgtcaaattgggcgtcaataagttcaatgtggatgaagatagcccgcacatcattctcaaaaccgatcctgataaacaggcgctggaggtgctggttaaggcctgtccggcgggactgtataaaaagcaggacgacggtagcgttcgttttgattacgccgggtgcctggagtgcggaacatgccggatcctcggccttgatacggcgctggaaaaatgggaatacccacgcgggacgtttggcgtggagttccgctacggctaa

SEQ ID NO: 18753 - protein, 95 aa, Salmonella typhi
MTSPVNVDVKLGVNKFNVDEDSPHIILKTDPDKQALEVLVKACPAGLYKKQDDGSVRFDYAGCLECGTCRILGLDTALEKWEYPRGTFGVEFRYG

SEQ ID NO: 18754 - DNA, 288 bp, Salmonella typhimurium
  CDS (1)..(288): transl_table=11
atgacatctcccgttaatgtggacgtcaaactgggcgtcaataagttcaatgtggatgaagacagcccgcacatcattctcaaaaccgatcctgataaacaggcgctggaggtgctgattaaggcctgtccggcgggactgtataaaaagcaggacgacggcagcgttcgttttgattacgccgggtgcctggagtgcggaacgtgccggatcctcggccttgatacggcgctggaaaaatgggaatacccgcgcgggacgtttggcgtagagttccgctacggctaa

SEQ ID NO: 18755 - protein, 95 aa, Salmonella typhimurium
MTSPVNVDVKLGVNKFNVDEDSPHIILKTDPDKQALEVLIKACPAGLYKKQDDGSVRFDYAGCLECGTCRILGLDTALEKWEYPRGTFGVEFRYG

SEQ ID NO: 18756 - DNA, 288 bp, Shigella flexneri
  CDS (1)..(288): transl_table=11
atgacttctcccgtcaatgtggacgtcaaactgggcgtcaataaattcaatgtcgatgaagagcatccgcacattgttgtgaaggccgatgctgataaacaggtgctggagctgctggtgaaagcgtgccccgcaggtctgtacaagaagcaggatgacggcagtgtgcgcttcgattacgccggatgtctggagtgcggcacctgtcgcattctggggctggggtcggcgctggaacagtgggaatacccgcgcggcacctttggtgtggagttccgttacggctga

SEQ ID NO: 18757 - protein, 95 aa, Shigella flexneri
MTSPVNVDVKLGVNKFNVDEEHPHIVVKADADKQVLELLVKACPAGLYKKQDDGSVRFDYAGCLECGTCRILGLGSALEQWEYPRGTFGVEFRYG

SEQ ID NO: 18758 - DNA, 297 bp, Escherichia coli
  CDS (1)..(297): transl_table=11
gtggcatctggcgggcgatgttatcaggagtctgcgatgtctgtagcccgtaatctctggcgcgttgctgatgcgccgcacattgttccggctgactccgttgagcgccagacggcagaacggttgattaacgcctgtccggcaggtcttttttcgctcacaccggaaggtaacttacgtattgactatcgcagttgcctggagtgtggcacctgccgtttgctgtgcgacgaatcaacactacaacagtggcgctatccgccttccggattcggcatcacctaccgctttggataa

SEQ ID NO: 18759 - protein, 98 aa, Escherichia coli
MASGGRCYQESAMSVARNLWRVADAPHIVPADSVERQTAERLINACPAGLFSLTPEGNLRIDYRSCLECGTCRLLCDESTLQQWRYPPSGFGITYRFG

SEQ ID NO: 18760 - DNA, 23 bp, Artificial sequence
  Primer sequence
atgagccagaacgctacggttaa

SEQ ID NO: 18761 - DNA, 24 bp, Artificial sequence
  Primer sequence
ttagccgtagcgaaaatcaatacc

SEQ ID NO: 18762 - protein, 97 aa, Artificial sequence
  Consensus
  Variant (3)..(3): Xaa in position 3 is any amino acid
  Variant (6)..(9): Xaa in position 6 to 9 is any amino acid
  Variant (11)..(12): Xaa in position 11 to 12 is any amino acid
  Variant (14)..(16): Xaa in position 14 to 16 is any amino acid
  Variant (17)..(17): Xaa in position 17 is any or no amino acid
  Variant (20)..(20): Xaa in position 20 is any amino acid
  Variant (22)..(36): Xaa in position 22 to 36 is any amino acid
  Variant (37)..(42): Xaa in position 37 to 42 is any or no amino acid
  Variant (46)..(47): Xaa in position 46 to 47 is any amino acid
  Variant (49)..(54): Xaa in position 49 to 54 is any amino acid
  Variant (55)..(56): Xaa in position 55 to 56 is any or no amino acid
  Variant (58)..(62): Xaa in position 58 to 62 is any amino acid
  Variant (74)..(80): Xaa in position 74 to 80 is any amino acid
  Variant (81)..(82): Xaa in position 81 to 82 is any or no amino acid
  Variant (84)..(84): Xaa in position 84 is any amino acid
  Variant (87)..(87): Xaa in position 87 is any amino acid
  Variant (89)..(90): Xaa in position 89 to 90 is any amino acid
  Variant (93)..(93): Xaa in position 93 is any amino acid
VEXKLXXXXYXXDXXXXHIXVXXXXXXXXXXXXXXXXXXXXXCPAXXYXXXXXXXXVXXXXXGCLECGTCRVLXXXXXXXXXWXYPXGXXGVXFKFG

SEQ ID NO: 18763 - protein, 11 aa, Artificial sequence
  Consensus
  Variant (3)..(3): Xaa in position 3 is Ile, Leu, Met or Val
  Variant (9)..(9): Xaa in position 9 is Asn or Arg
  Variant (10)..(10): Xaa in position 10 is any amino acid
  Variant (11)..(11): Xaa in position 11 is Ala, Gly, Ile, Leu or Val
GCXECGTCXXX

SEQ ID NO: 18764 - protein, 15 aa, Artificial sequence
  Consensus
  Variant (2)..(3): Xaa in position 2 to 3 is any amino acid
  Variant (5)..(5): Xaa in position 5 is any amino acid
  Variant (7)..(7): Xaa in position 7 is Asp, Glu, Gly, Asn or Thr
  Variant (8)..(8): Xaa in position 8 is any amino acid
  Variant (10)..(10): Xaa in position 10 is Ile or Val
  Variant (11)..(11): Xaa in position 11 is any amino acid
  Variant (12)..(12): Xaa in position 12 is Phe, Trp or Tyr
  Variant (13)..(13): Xaa in position 13 is Lys or Arg
  Variant (14)..(14): Xaa in position 14 is any amino acid
WXXPXGXXGXXXXXG

SEQ ID NO: 18765 - DNA, 1047 bp, Escherichia coli K12; identical to SEQ ID NO: 1323
  CDS (1)..(1047)

SEQ ID NO: 18766 - protein, 348 aa, Escherichia coli K12; identical to SEQ ID NO: 1324

SEQ ID NO: 18767 - DNA, 1235 bp, Salmonella typhimurium; identical to SEQ ID NO: 1325
  CDS (165)..(1235)

SEQ ID NO: 18768 - protein, 356 aa, Salmonella typhimurium; identical to SEQ ID NO: 1326

SEQ ID NO: 18769 - DNA, 1086 bp, Deinococcus radiodurans; identical to SEQ ID NO: 1327
  CDS (1)..(1086)

SEQ ID NO: 18770 - protein, 361 aa, Deinococcus radiodurans; identical to SEQ ID NO: 1328

SEQ ID NO: 18771 - DNA, 1056 bp, Neisseria meningitidis; identical to SEQ ID NO: 1329
  CDS (1)..(1056)

SEQ ID NO: 18772 - protein, 351 aa, Neisseria meningitidis; identical to SEQ ID NO: 1330

SEQ ID NO: 18773 - DNA, 1047 bp, Yersinia pestis; identical to SEQ ID NO: 1331
  CDS (1)..(1047)

SEQ ID NO: 18774 - protein, 348 aa, Yersinia pestis; identical to SEQ ID NO: 1332

SEQ ID NO: 18775 - DNA, 1071 bp, Escherichia coli; identical to SEQ ID NO: 1333
  CDS (1)..(1071)

SEQ ID NO: 18776 - protein, 356 aa, Escherichia coli; identical to SEQ ID NO: 1334

SEQ ID NO: 18777 - DNA, 1131 bp, Nostoc sp. PCC 7120; identical to SEQ ID NO: 1335
  CDS (1)..(1131)

SEQ ID NO: 18778 - protein, 376 aa, Nostoc sp. PCC 7120; identical to SEQ ID NO: 1336

SEQ ID NO: 18779 - DNA, 1053 bp, Salmonella enterica subsp. enterica serovar Typhi; identical to SEQ ID NO: 1337
  CDS (1)..(1053)

SEQ ID NO: 18780 - protein, 350 aa, Salmonella enterica subsp. enterica serovar Typhi; identical to SEQ ID NO: 1338

SEQ ID NO: 18781 - DNA, 1077 bp, Pseudomonas aeruginosa; identical to SEQ ID NO: 1339
  CDS (1)..(1077)

SEQ ID NO: 18782 - protein, 358 aa, Pseudomonas aeruginosa; identical to SEQ ID NO: 1340

SEQ ID NO: 18783 - DNA, 1047 bp, Buchnera sp; identical to SEQ ID NO: 1341
  CDS (1)..(1047)

SEQ ID NO: 18784 - protein, 348 aa, Buchnera sp; identical to SEQ ID NO: 1342

SEQ ID NO: 18785 - DNA, 1074 bp, Vibrio cholerae; identical to SEQ ID NO: 1343
  CDS (1)..(1074)

SEQ ID NO: 18786 - protein, 357 aa, Vibrio cholerae; identical to SEQ ID NO: 1344

SEQ ID NO: 18787 - DNA, 1038 bp, Lactococcus lactis subsp. lactis; identical to SEQ ID NO: 1345
  CDS (1)..(1038)

SEQ ID NO: 18788 - protein, 345 aa, Lactococcus lactis subsp. lactis; identical to SEQ ID NO: 1346

SEQ ID NO: 18789 - DNA, 1023 bp, Lactococcus lactis subsp. lactis; identical to SEQ ID NO: 1347
  CDS (1)..(1023)

SEQ ID NO: 18790 - protein, 340 aa, Lactococcus lactis subsp. lactis; identical to SEQ ID NO: 1348

SEQ ID NO: 18791 - DNA, 1032 bp, Streptococcus pneumoniae; identical to SEQ ID NO: 1349
  CDS (1)..(1032)

SEQ ID NO: 18792 - protein, 343 aa, Streptococcus pneumoniae; identical to SEQ ID NO: 1350

SEQ ID NO: 18793 - DNA, 1095 bp, Pseudomonas aeruginosa; identical to SEQ ID NO: 1351
  CDS (1)..(1095)

SEQ ID NO: 18794 - protein, 364 aa, Pseudomonas aeruginosa; identical to SEQ ID NO: 1352

SEQ ID NO: 18795 - DNA, 1110 bp, Caulobacter crescentus; identical to SEQ ID NO: 1353
  CDS (1)..(1110)

SEQ ID NO: 18796 - protein, 369 aa, Caulobacter crescentus; identical to SEQ ID NO: 1354

SEQ ID NO: 18797 - DNA, 1032 bp, Streptococcus pneumoniae; identical to SEQ ID NO: 1355
  CDS (1)..(1032)

SEQ ID NO: 18798 - protein, 343 aa, Streptococcus pneumoniae; identical to SEQ ID NO: 1356

SEQ ID NO: 18799 - DNA, 1047 bp, Buchnera aphidicola; identical to SEQ ID NO: 1357
  CDS (1)..(1047)

SEQ ID NO: 18800 - protein, 348 aa, Buchnera aphidicola; identical to SEQ ID NO: 1358

SEQ ID NO: 18801 - DNA, 1089 bp, Haemophilus influenzae; identical to SEQ ID NO: 1359
  CDS (1)..(1089)

SEQ ID NO: 18802 - protein, 362 aa, Haemophilus influenzae; identical to SEQ ID NO: 1360

SEQ ID NO: 18803 - DNA, 1502 bp, Candida albicans; identical to SEQ ID NO: 1361
  CDS (336)..(1442)

SEQ ID NO: 18804 - protein, 368 aa, Candida albicans; identical to SEQ ID NO: 1362

SEQ ID NO: 18805 - DNA, 1113 bp, Saccharomyces cerevisiae; identical to SEQ ID NO: 1363
  CDS (1)..(1113)

SEQ ID NO: 18806 - protein, 370 aa, Saccharomyces cerevisiae; identical to SEQ ID NO: 1364

SEQ ID NO: 18807 - DNA, 2048 bp, Saccharomyces cerevisiae; identical to SEQ ID NO: 1365
  CDS (619)..(1731)

SEQ ID NO: 18808 - protein, 370 aa, Saccharomyces cerevisiae; identical to SEQ ID NO: 1366

SEQ ID NO: 18809 - DNA, 1107 bp, Schizosaccharomyces pombe; identical to SEQ ID NO: 1367
  CDS (1)..(1107)

SEQ ID NO: 18810 - protein, 368 aa, Schizosaccharomyces pombe; identical to SEQ ID NO: 1368

SEQ ID NO: 18811 - DNA, 1089 bp, Amycolatopsis orientalis; identical to SEQ ID NO: 1369
  CDS (1)..(1089)

SEQ ID NO: 18812 - protein, 362 aa, Amycolatopsis orientalis; identical to SEQ ID NO: 1370

SEQ ID NO: 18813 - DNA, 1119 bp, Schizosaccharomyces pombe; identical to SEQ ID NO: 1371
  CDS (1)..(1119)

SEQ ID NO: 18814 - protein, 372 aa, Schizosaccharomyces pombe; identical to SEQ ID NO: 1372

SEQ ID NO: 18815 - DNA, 1248 bp, Corynebacterium glutamicum; identical to SEQ ID NO: 1373
  CDS (101)..(1228)

SEQ ID NO: 18816 - protein, 375 aa, Corynebacterium glutamicum; identical to SEQ ID NO: 1374

SEQ ID NO: 18817 - DNA, 1083 bp, Methylophilus methylotrophus; identical to SEQ ID NO: 1375
  CDS (1)..(1083)

SEQ ID NO: 18818 - protein, 360 aa, Methylophilus methylotrophus; identical to SEQ ID NO: 1376

SEQ ID NO: 18819 - DNA, 1107 bp, Debaryomyces hansenii; identical to SEQ ID NO: 1377
  CDS (1)..(1107)

SEQ ID NO: 18820 - protein, 368 aa, Debaryomyces hansenii; identical to SEQ ID NO: 1378

SEQ ID NO: 18821 - DNA, 1074 bp, Yarrowia lipolytica; identical to SEQ ID NO: 1379
  CDS (1)..(1074)

SEQ ID NO: 18822 - protein, 357 aa, Yarrowia lipolytica; identical to SEQ ID NO: 1380

SEQ ID NO: 18823 - DNA, 1089 bp, Yarrowia lipolytica; identical to SEQ ID NO: 1381
  CDS (1)..(1089)

SEQ ID NO: 18824 - protein, 362 aa, Yarrowia lipolytica; identical to SEQ ID NO: 1382

SEQ ID NO: 18825 - DNA, 1119 bp, Kluyveromyces lactis; identical to SEQ ID NO: 1383
  CDS (1)..(1119)

SEQ ID NO: 18826 - protein, 372 aa, Kluyveromyces lactis; identical to SEQ ID NO: 1384

SEQ ID NO: 18827 - DNA, 1095 bp, Kluyveromyces lactis; identical to SEQ ID NO: 1385
  CDS (1)..(1095)

SEQ ID NO: 18828 - protein, 364 aa, Kluyveromyces lactis; identical to SEQ ID NO: 1386

SEQ ID NO: 18829 - DNA, 1074 bp, Erwinia carotovora subsp; identical to SEQ ID NO: 1387
  CDS (1)..(1074)

SEQ ID NO: 18830 - protein, 357 aa, Erwinia carotovora subsp; identical to SEQ ID NO: 1388

SEQ ID NO: 18831 - DNA, 1047 bp, Erwinia carotovora subsp; identical to SEQ ID NO: 1389
  CDS (1)..(1047)

SEQ ID NO: 18832 - protein, 348 aa, Erwinia carotovora subsp; identical to SEQ ID NO: 1390

SEQ ID NO: 18833 - DNA, 1056 bp, Erwinia carotovora subsp; identical to SEQ ID NO: 1391
  CDS (1)..(1056)

SEQ ID NO: 18834 - protein, 351 aa, Erwinia carotovora subsp; identical to SEQ ID NO: 1392

SEQ ID NO: 18835 - DNA, 1113 bp, Acinetobacter sp; identical to SEQ ID NO: 1393
  CDS (1)..(1113)

SEQ ID NO: 18836 - protein, 370 aa, Acinetobacter sp; identical to SEQ ID NO: 1394

SEQ ID NO: 18837 - DNA, 1056 bp, Acinetobacter sp; identical to SEQ ID NO: 1395
  CDS (1)..(1056)

SEQ ID NO: 18838 - protein, 351 aa, Acinetobacter sp; identical to SEQ ID NO: 1396

SEQ ID NO: 18839 - DNA, 1119 bp, Candida glabrata; identical to SEQ ID NO: 1397
  CDS (1)..(1119)

SEQ ID NO: 18840 - protein, 372 aa, Candida glabrata; identical to SEQ ID NO: 1398

SEQ ID NO: 18841 - DNA, 1071 bp, Candida glabrata; identical to SEQ ID NO: 1399
  CDS (1)..(1071)

SEQ ID NO: 18842 - protein, 356 aa, Candida glabrata; identical to SEQ ID NO: 1400

SEQ ID NO: 18843 - DNA, 1083 bp, Photobacterium profundum; identical to SEQ ID NO: 1401
  CDS (1)..(1083)

SEQ ID NO: 18844 - protein, 360 aa, Photobacterium profundum; identical to SEQ ID NO: 1402

SEQ ID NO: 18845 - DNA, 1053 bp, Photobacterium profundum; identical to SEQ ID NO: 1403
  CDS (1)..(1053)

SEQ ID NO: 18846 - protein, 350 aa, Photobacterium profundum; identical to SEQ ID NO: 1404

SEQ ID NO: 18847 - DNA, 1113 bp, Photobacterium profundum; identical to SEQ ID NO: 1405
  CDS (1)..(1113)

SEQ ID NO: 18848 - protein, 370 aa, Photobacterium profundum; identical to SEQ ID NO: 1406

SEQ ID NO: 18849 - DNA, 1056 bp, Photobacterium profundum; identical to SEQ ID NO: 1407
  CDS (1)..(1056)

SEQ ID NO: 18850 - protein, 351 aa, Photobacterium profundum; identical to SEQ ID NO: 1408

SEQ ID NO: 18851 - DNA, 1092 bp, Parachlamydia sp; identical to SEQ ID NO: 1409
  CDS (1)..(1092)

SEQ ID NO: 18852 - protein, 363 aa, Parachlamydia sp; identical to SEQ ID NO: 1410

SEQ ID NO: 18853 - DNA, 1095 bp, Rhodopseudomonas palustris; identical to SEQ ID NO: 1411
  CDS (1)..(1095)

SEQ ID NO: 18854 - protein, 364 aa, Rhodopseudomonas palustris; identical to SEQ ID NO: 1412

SEQ ID NO: 18855 - DNA, 1100 bp, Amycolatopsis methanolica; identical to SEQ ID NO: 1413
  CDS (1)..(1086)

SEQ ID NO: 18856 - protein, 361 aa, Amycolatopsis methanolica; identical to SEQ ID NO: 1414

SEQ ID NO: 18857 - DNA, 1071 bp, Treponema denticola; identical to SEQ ID NO: 1415
  CDS (1)..(1071)

SEQ ID NO: 18858 - protein, 356 aa, Treponema denticola; identical to SEQ ID NO: 1416

SEQ ID NO: 18859 - DNA, 1068 bp, Geobacter sulfurreducens; identical to SEQ ID NO: 1417
  CDS (1)..(1068)

SEQ ID NO: 18860 - protein, 355 aa, Geobacter sulfurreducens; identical to SEQ ID NO: 1418

SEQ ID NO: 18861 - DNA, 1095 bp, Ashbya gossypii; identical to SEQ ID NO: 1419
  CDS (1)..(1095)

SEQ ID NO: 18862 - protein, 364 aa, Ashbya gossypii; identical to SEQ ID NO: 1420

SEQ ID NO: 18863 - DNA, 1122 bp, Ashbya gossypii; identical to SEQ ID NO: 1421
  CDS (1)..(1122)

SEQ ID NO: 18864 - protein, 373 aa, Ashbya gossypii; identical to SEQ ID NO: 1422

SEQ ID NO: 18865 - DNA, 1098 bp, Amycolatopsis balhimycina; identical to SEQ ID NO: 1423
  CDS (1)..(1098)

SEQ ID NO: 18866 - protein, 365 aa, Amycolatopsis balhimycina; identical to SEQ ID NO: 1424

SEQ ID NO: 18867 - DNA, 1071 bp, Vibrio vulnificus; identical to SEQ ID NO: 1425
  CDS (1)..(1071)

SEQ ID NO: 18868 - protein, 356 aa, Vibrio vulnificus; identical to SEQ ID NO: 1426

SEQ ID NO: 18869 - DNA, 1047 bp, Photorhabdus luminescens; identical to SEQ ID NO: 1427
  CDS (1)..(1047)

SEQ ID NO: 18870 - protein, 348 aa, Photorhabdus luminescens; identical to SEQ ID NO: 1428

SEQ ID NO: 18871 - DNA, 1053 bp, Photorhabdus luminescens; identical to SEQ ID NO: 1429
  CDS (1)..(1053)

SEQ ID NO: 18872 - protein, 350 aa, Photorhabdus luminescens; identical to SEQ ID NO: 1430

SEQ ID NO: 18873 - DNA, 1095 bp, Photorhabdus luminescens; identical to SEQ ID NO: 1431
  CDS (1)..(1095)

SEQ ID NO: 18874 - protein, 364 aa, Photorhabdus luminescens; identical to SEQ ID NO: 1432

SEQ ID NO: 18875 - DNA, 1119 bp, Gloeobacter violaceus; identical to SEQ ID NO: 1433
  CDS (1)..(1119)

SEQ ID NO: 18876 - protein, 372 aa, Gloeobacter violaceus; identical to SEQ ID NO: 1434

SEQ ID NO: 18877 - DNA, 1107 bp, Chromobacterium violaceum; identical to SEQ ID NO: 1435
  CDS (1)..(1107)

SEQ ID NO: 18878 - protein, 368 aa, Chromobacterium violaceum; identical to SEQ ID NO: 1436

SEQ ID NO: 18879 - DNA, 1059 bp, Chromobacterium violaceum; identical to SEQ ID NO: 1437
  CDS (1)..(1059)

SEQ ID NO: 18880 - protein, 352 aa, Chromobacterium violaceum; identical to SEQ ID NO: 1438

SEQ ID NO: 18881 - DNA, 1140 bp, Neurospora crassa; identical to SEQ ID NO: 1439
  CDS (1)..(1140)

SEQ ID NO: 18882 - protein, 379 aa, Neurospora crassa; identical to SEQ ID NO: 1440

SEQ ID NO: 18883 - DNA, 1092 bp, Neurospora crassa; identical to SEQ ID NO: 1441
  CDS (1)..(1092)

SEQ ID NO: 18884 - protein, 363 aa, Neurospora crassa; identical to SEQ ID NO: 1442

SEQ ID NO: 18885 - DNA, 1068 bp, Synechococcus sp; identical to SEQ ID NO: 1443
  CDS (1)..(1068)

SEQ ID NO: 18886 - protein, 355 aa, Synechococcus sp; identical to SEQ ID NO: 1444

SEQ ID NO: 18887 - DNA, 1053 bp, Rhodopirellula baltica; identical to SEQ ID NO: 1445
  CDS (1)..(1053)

SEQ ID NO: 18888 - protein, 350 aa, Rhodopirellula baltica; identical to SEQ ID NO: 1446

SEQ ID NO: 18889 - DNA, 1068 bp, Prochlorococcus marinus subsp; identical to SEQ ID NO: 1447
  CDS (1)..(1068)

SEQ ID NO: 18890 - protein, 355 aa, Prochlorococcus marinus subsp; identical to SEQ ID NO: 1448

SEQ ID NO: 18891 - DNA, 1083 bp, Prochlorococcus marinus; identical to SEQ ID NO: 1449
  CDS (1)..(1083)

SEQ ID NO: 18892 - protein, 360 aa, Prochlorococcus marinus; identical to SEQ ID NO: 1450

SEQ ID NO: 18893 - DNA, 1074 bp, Prochlorococcus marinus; identical to SEQ ID NO: 1451
  CDS (1)..(1074)

SEQ ID NO: 18894 - protein, 357 aa, Prochlorococcus marinus; identical to SEQ ID NO: 1452

SEQ ID NO: 18895 - DNA, 1113 bp, Haemophilus ducreyi; identical to SEQ ID NO: 1453
  CDS (1)..(1113)

SEQ ID NO: 18896 - protein, 370 aa, Haemophilus ducreyi; identical to SEQ ID NO: 1454

SEQ ID NO: 18897 - DNA, 1080 bp, Haemophilus ducreyi; identical to SEQ ID NO: 1455
  CDS (1)..(1080)

SEQ ID NO: 18898 - protein, 359 aa, Haemophilus ducreyi; identical to SEQ ID NO: 1456

SEQ ID NO: 18899 - DNA, 1086 bp, Candidatus Blochmannia floridanus; identical to SEQ ID NO: 1457
  CDS (1)..(1086)

SEQ ID NO: 18900 - protein, 361 aa, Candidatus Blochmannia floridanus; identical to SEQ ID NO: 1458

SEQ ID NO: 18901 - DNA, 1074 bp, Bordetella pertussis; identical to SEQ ID NO: 1459
  CDS (1)..(1074)

SEQ ID NO: 18902 - protein, 357 aa, Bordetella pertussis; identical to SEQ ID NO: 1460

SEQ ID NO: 18903 - DNA, 1119 bp, Bordetella bronchiseptica; identical to SEQ ID NO: 1461
  CDS (1)..(1119)

SEQ ID NO: 18904 - protein, 372 aa, Bordetella bronchiseptica; identical to SEQ ID NO: 1462

SEQ ID NO: 18905 - DNA, 1179 bp, Nitrosomonas europaea; identical to SEQ ID NO: 1463
  CDS (1)..(1179)

SEQ ID NO: 18906 - protein, 392 aa, Nitrosomonas europaea; identical to SEQ ID NO: 1464

SEQ ID NO: 18907 - DNA, 1083 bp, Coxiella burnetii; identical to SEQ ID NO: 1465
  CDS (1)..(1083)

SEQ ID NO: 18908 - protein, 360 aa, Coxiella burnetii; identical to SEQ ID NO: 1466

SEQ ID NO: 18909 - DNA, 834 bp, Vibrio anguillarum; identical to SEQ ID NO: 1467
  CDS (1)..(834)

SEQ ID NO: 18910 - protein, 277 aa, Vibrio anguillarum; identical to SEQ ID NO: 1468

SEQ ID NO: 18911 - DNA, 1143 bp, Xylella fastidiosa; identical to SEQ ID NO: 1469
  CDS (1)..(1143)

SEQ ID NO: 18912 - protein, 380 aa, Xylella fastidiosa; identical to SEQ ID NO: 1470

SEQ ID NO: 18913 - DNA, 1053 bp, Vibrio parahaemolyticus; identical to SEQ ID NO: 1471
  CDS (1)..(1053)

SEQ ID NO: 18914 - protein, 350 aa, Vibrio parahaemolyticus; identical to SEQ ID NO: 1472

SEQ ID NO: 18915 - DNA, 1053 bp, Vibrio parahaemolyticus; identical to SEQ ID NO: 1473
  CDS (1)..(1053)

SEQ ID NO: 18916 - protein, 350 aa, Vibrio parahaemolyticus; identical to SEQ ID NO: 1474

SEQ ID NO: 18917 - DNA, 1074 bp, Vibrio parahaemolyticus; identical to SEQ ID NO: 1475
  CDS (1)..(1074)

SEQ ID NO: 18918 - protein, 357 aa, Vibrio parahaemolyticus; identical to SEQ ID NO: 1476

SEQ ID NO: 18919 - DNA, 1083 bp, Pseudomonas syringae; identical to SEQ ID NO: 1477
  CDS (1)..(1083)

SEQ ID NO: 18920 - protein, 360 aa, Pseudomonas syringae; identical to SEQ ID NO: 1478

SEQ ID NO: 18921 - DNA, 1077 bp, Pseudomonas syringae; identical to SEQ ID NO: 1479
  CDS (1)..(1077)

SEQ ID NO: 18922 - protein, 358 aa, Pseudomonas syringae; identical to SEQ ID NO: 1480

SEQ ID NO: 18923 - DNA, 1062 bp, Pseudomonas putida; identical to SEQ ID NO: 1481
  CDS (1)..(1062)

SEQ ID NO: 18924 - protein, 353 aa, Pseudomonas putida; identical to SEQ ID NO: 1482

SEQ ID NO: 18925 - DNA, 1113 bp, Pseudomonas putida; identical to SEQ ID NO: 1483
  CDS (1)..(1113)

SEQ ID NO: 18926 - protein, 370 aa, Pseudomonas putida; identical to SEQ ID NO: 1484

SEQ ID NO: 18927 - DNA, 1086 bp, Bradyrhizobium japonicum; identical to SEQ ID NO: 1485
  CDS (1)..(1086)

SEQ ID NO: 18928 - protein, 361 aa, Bradyrhizobium japonicum; identical to SEQ ID NO: 1486

SEQ ID NO: 18929 - DNA, 1053 bp, Yersinia pestis; identical to SEQ ID NO: 1487
  CDS (1)..(1053)

SEQ ID NO: 18930 - protein, 350 aa, Yersinia pestis; identical to SEQ ID NO: 1488

SEQ ID NO: 18931 - DNA, 1077 bp, Yersinia pestis; identical to SEQ ID NO: 1489
  CDS (1)..(1077)

SEQ ID NO: 18932 - protein, 358 aa, Yersinia pestis; identical to SEQ ID NO: 1490

SEQ ID NO: 18933 - DNA, 1038 bp, Wigglesworthia glossinidia brevipalpis; identical to SEQ ID NO: 1491
  CDS (1)..(1038)

SEQ ID NO: 18934 - protein, 345 aa, Wigglesworthia glossinidia brevipalpis; identical to SEQ ID NO: 1492

SEQ ID NO: 18935 - DNA, 1053 bp, Vibrio vulnificus; identical to SEQ ID NO: 1493
  CDS (1)..(1053)

SEQ ID NO: 18936 - protein, 350 aa, Vibrio vulnificus; identical to SEQ ID NO: 1494

SEQ ID NO: 18937 - DNA, 1053 bp, Vibrio vulnificus; identical to SEQ ID NO: 1495
  CDS (1)..(1053)

SEQ ID NO: 18938 - protein, 350 aa, Vibrio vulnificus; identical to SEQ ID NO: 1496

SEQ ID NO: 18939 - DNA, 1071 bp, Vibrio vulnificus; identical to SEQ ID NO: 1497
  CDS (1)..(1071)

SEQ ID NO: 18940 - protein, 356 aa, Vibrio vulnificus; identical to SEQ ID NO: 1498

SEQ ID NO: 18941 - DNA, 1062 bp, Synechococcus elongatus; identical to SEQ ID NO: 1499
  CDS (1)..(1062)

SEQ ID NO: 18942 - protein, 353 aa, Synechococcus elongatus; identical to SEQ ID NO: 1500

SEQ ID NO: 18943 - DNA, 1032 bp, Streptococcus mutans; identical to SEQ ID NO: 1501
  CDS (1)..(1032)

SEQ ID NO: 18944 - protein, 343 aa, Streptococcus mutans; identical to SEQ ID NO: 1502

SEQ ID NO: 18945 - DNA, 1035 bp, Streptococcus mutans; identical to SEQ ID NO: 1503
  CDS (1)..(1035)

SEQ ID NO: 18946 - protein, 344 aa, Streptococcus mutans; identical to SEQ ID NO: 1504

SEQ ID NO: 18947 - DNA, 1008 bp, Streptococcus agalactiae; identical to SEQ ID NO: 1505
  CDS (1)..(1008)

SEQ ID NO: 18948 - protein, 335 aa, Streptococcus agalactiae; identical to SEQ ID NO: 1506

SEQ ID NO: 18949 - DNA, 1065 bp, Shewanella oneidensis; identical to SEQ ID NO: 1507
  CDS (1)..(1065)

SEQ ID NO: 18950 - protein, 354 aa, Shewanella oneidensis; identical to SEQ ID NO: 1508

SEQ ID NO: 18951 - DNA, 1092 bp, Shewanella oneidensis; identical to SEQ ID NO: 1509
  CDS (1)..(1092)

SEQ ID NO: 18952 - protein, 363 aa, Shewanella oneidensis; identical to SEQ ID NO: 1510

SEQ ID NO: 18953 - DNA, 1059 bp, Shewanella oneidensis; identical to SEQ ID NO: 1511
  CDS (1)..(1059)

SEQ ID NO: 18954 - protein, 352 aa, Shewanella oneidensis; identical to SEQ ID NO: 1512

SEQ ID NO: 18955 - DNA, 1053 bp, Escherichia coli O6; identical to SEQ ID NO: 1513
  CDS (1)..(1053)

SEQ ID NO: 18956 - protein, 350 aa, Escherichia coli O6; identical to SEQ ID NO: 1514

SEQ ID NO: 18957 - DNA, 1170 bp, Corynebacterium efficiens; identical to SEQ ID NO: 1515
  CDS (1)..(1170)

SEQ ID NO: 18958 - protein, 389 aa, Corynebacterium efficiens; identical to SEQ ID NO: 1516

SEQ ID NO: 18959 - DNA, 1134 bp, Bifidobacterium longum; identical to SEQ ID NO: 1517
  CDS (1)..(1134)

SEQ ID NO: 18960 - protein, 377 aa, Bifidobacterium longum; identical to SEQ ID NO: 1518

SEQ ID NO: 18961 - DNA, 1233 bp, Bifidobacterium longum; identical to SEQ ID NO: 1519
  CDS (1)..(1233)

SEQ ID NO: 18962 - protein, 410 aa, Bifidobacterium longum; identical to SEQ ID NO: 1520

SEQ ID NO: 18963 - DNA, 1221 bp, Phytophthora infestans; identical to SEQ ID NO: 1521
  CDS (20)..(1153)

SEQ ID NO: 18964 - protein, 377 aa, Phytophthora infestans; identical to SEQ ID NO: 1522

SEQ ID NO: 18965 - DNA, 1062 bp, Chlorobium tepidum; identical to SEQ ID NO: 1523
  CDS (1)..(1062)

SEQ ID NO: 18966 - protein, 353 aa, Chlorobium tepidum; identical to SEQ ID NO: 1524

SEQ ID NO: 18967 - DNA, 1074 bp, Xanthomonas campestris; identical to SEQ ID NO: 1525
  CDS (1)..(1074)

SEQ ID NO: 18968 - protein, 357 aa, Xanthomonas campestris; identical to SEQ ID NO: 1526

SEQ ID NO: 18969 - DNA, 1074 bp, Xanthomonas axonopodis; identical to SEQ ID NO: 1527
  CDS (1)..(1074)

SEQ ID NO: 18970 - protein, 357 aa, Xanthomonas axonopodis; identical to SEQ ID NO: 1528

SEQ ID NO: 18971 - DNA, 1080 bp, Ralstonia solanacearum; identical to SEQ ID NO: 1529
  CDS (1)..(1080)

SEQ ID NO: 18972 - protein, 359 aa, Ralstonia solanacearum; identical to SEQ ID NO: 1530

SEQ ID NO: 18973 - DNA, 1179 bp, Ralstonia solanacearum; identical to SEQ ID NO: 1531
  CDS (1)..(1179)

SEQ ID NO: 18974 - protein, 392 aa, Ralstonia solanacearum; identical to SEQ ID NO: 1532

SEQ ID NO: 18975 - DNA, 1065 bp, Synechococcus sp; identical to SEQ ID NO: 1533
  CDS (1)..(1065)

SEQ ID NO: 18976 - protein, 354 aa, Synechococcus sp; identical to SEQ ID NO: 1534

SEQ ID NO: 18977 - DNA, 1035 bp, Escherichia coli; identical to SEQ ID NO: 1535
  CDS (1)..(1035)

SEQ ID NO: 18978 - protein, 344 aa, Escherichia coli; identical to SEQ ID NO: 1536

SEQ ID NO: 18979 - DNA, 1200 bp, Stigmatella aurantiaca; identical to SEQ ID NO: 1537
  CDS (62)..(1147)

SEQ ID NO: 18980 - protein, 361 aa, Stigmatella aurantiaca; identical to SEQ ID NO: 1538

SEQ ID NO: 18981 - DNA, 1092 bp, Rhizobium loti; identical to SEQ ID NO: 1539
  CDS (1)..(1092)

SEQ ID NO: 18982 - protein, 363 aa, Rhizobium loti; identical to SEQ ID NO: 1540

SEQ ID NO: 18983 - DNA, 1083 bp, Amycolatopsis mediterranei; identical to SEQ ID NO: 1541
  CDS (1)..(1083)

SEQ ID NO: 18984 - protein, 360 aa, Amycolatopsis mediterranei; identical to SEQ ID NO: 1542

SEQ ID NO: 18985 - DNA, 1053 bp, Pasteurella multocida; identical to SEQ ID NO: 1543
  CDS (1)..(1053)

SEQ ID NO: 18986 - protein, 350 aa, Pasteurella multocida; identical to SEQ ID NO: 1544

SEQ ID NO: 18987 - DNA, 1086 bp, Pasteurella multocida; identical to SEQ ID NO: 1545
  CDS (1)..(1086)

SEQ ID NO: 18988 - protein, 361 aa, Pasteurella multocida; identical to SEQ ID NO: 1546

SEQ ID NO: 18989 - DNA, 1125 bp, Emericella nidulans; identical to SEQ ID NO: 1547
  CDS (1)..(1125)

SEQ ID NO: 18990 - protein, 374 aa, Emericella nidulans; identical to SEQ ID NO: 1548

SEQ ID NO: 18991 - DNA, 1089 bp, Emericella nidulans; identical to SEQ ID NO: 1549
  CDS (1)..(1089)

SEQ ID NO: 18992 - protein, 362 aa, Emericella nidulans; identical to SEQ ID NO: 1550

SEQ ID NO: 18993 - DNA, 1239 bp, Vibrio cholerae; identical to SEQ ID NO: 1551
  CDS (114)..(1175)

SEQ ID NO: 18994 - protein, 353 aa, Vibrio cholerae; identical to SEQ ID NO: 1552

SEQ ID NO: 18995 - DNA, 2184 bp, Candida albicans; identical to SEQ ID NO: 1553
  CDS (461)..(1573)

SEQ ID NO: 18996 - protein, 370 aa, Candida albicans; identical to SEQ ID NO: 1554

SEQ ID NO: 18997 - DNA, 1047 bp, Buchnera aphidicola; identical to SEQ ID NO: 1555
  CDS (1)..(1047)

SEQ ID NO: 18998 - protein, 348 aa, Buchnera aphidicola; identical to SEQ ID NO: 1556

SEQ ID NO: 18999 - DNA, 1047 bp, Buchnera aphidicola; identical to SEQ ID NO: 1557
  CDS (1)..(1047)

SEQ ID NO: 19000 - protein, 348 aa, Buchnera aphidicola; identical to SEQ ID NO: 1558

SEQ ID NO: 19001 - DNA, 1047 bp, Erwinia herbicola; identical to SEQ ID NO: 1559
  CDS (1)..(1047)

SEQ ID NO: 19002 - protein, 348 aa, Erwinia herbicola; identical to SEQ ID NO: 1560

SEQ ID NO: 19003 - DNA, 1047 bp, Salmonella typhimurium; identical to SEQ ID NO: 1561
  CDS (1)..(1047)

SEQ ID NO: 19004 - protein, 348 aa, Salmonella typhimurium; identical to SEQ ID NO: 1562

SEQ ID NO: 19005 - DNA, 23 bp, Artificial sequence
  Primer sequence
atgaacagaactgacgaactccg

SEQ ID NO: 19006 - DNA, 24 bp, Artificial sequence
  Primer sequence
ttagaagcgggtatctaccgcaga

SEQ ID NO: 19007 - protein, 352 aa, Artificial sequence
  Consensus
  Variant (2)..(3): Xaa in position 2 to 3 is any amino acid
  Variant (5)..(11): Xaa in position 5 to 11 is any amino acid
  Variant (13)..(24): Xaa in position 13 to 24 is any amino acid
  Variant (26)..(30): Xaa in position 26 to 30 is any amino acid
  Variant (32)..(33): Xaa in position 32 to 33 is any amino acid
  Variant (35)..(35): Xaa in position 35 is any amino acid
  Variant (37)..(40): Xaa in position 37 to 40 is any amino acid
  Variant (42)..(43): Xaa in position 42 to 43 is any amino acid
  Variant (45)..(46): Xaa in position 45 to 46 is any amino acid
  Variant (51)..(51): Xaa in position 51 is any amino acid
  Variant (54)..(55): Xaa in position 54 to 55 is any amino acid
  Variant (58)..(59): Xaa in position 58 to 59 is any amino acid
  Variant (62)..(63): Xaa in position 62 to 63 is any amino acid
  Variant (65)..(76): Xaa in position 65 to 76 is any amino acid
  Variant (78)..(80): Xaa in position 78 to 80 is any amino acid
  Variant (83)..(83): Xaa in position 83 is any amino acid
  Variant (85)..(85): Xaa in position 85 is any amino acid
  Variant (91)..(93): Xaa in position 91 to 93 is any amino acid
  Variant (100)..(100): Xaa in position 100 is any amino acid
  Variant (103)..(112): Xaa in position 103 to 112 is any amino acid
  Variant (115)..(117): Xaa in position 115 to 117 is any amino acid
  Variant (119)..(119): Xaa in position 119 is any amino acid
  Variant (121)..(128): Xaa in position 121 to 128 is any amino acid
  Variant (130)..(130): Xaa in position 130 is any amino acid
  Variant (132)..(132): Xaa in position 132 is any amino acid
  Variant (134)..(134): Xaa in position 134 is any amino acid
  Variant (136)..(136): Xaa in position 136 is any amino acid
  Variant (139)..(142): Xaa in position 139 to 142 is any amino acid
  Variant (144)..(146): Xaa in position 144 to 146 is any amino acid
  Variant (148)..(152): Xaa in position 148 to 152 is any amino acid
  Variant (163)..(163): Xaa in position 163 is any amino acid
  Variant (166)..(167): Xaa in position 166 to 167 is any amino acid
  Variant (170)..(170): Xaa in position 170 is any amino acid
  Variant (173)..(173): Xaa in position 173 is any amino acid
  Variant (175)..(175): Xaa in position 175 is any amino acid
  Variant (180)..(180): Xaa in position 180 is any amino acid
  Variant (182)..(182): Xaa in position 182 is any amino acid
  Variant (184)..(187): Xaa in position 184 to 187 is any amino acid
  Variant (189)..(190): Xaa in position 189 to 190 is any amino acid
  Variant (192)..(194): Xaa in position 192 to 194 is any amino acid
  Variant (196)..(198): Xaa in position 196 to 198 is any amino acid
  Variant (200)..(200): Xaa in position 200 is any amino acid
  Variant (202)..(207): Xaa in position 202 to 207 is any amino acid
  Variant (209)..(214): Xaa in position 209 to 214 is any amino acid
  Variant (216)..(216): Xaa in position 216 is any amino acid
  Variant (219)..(221): Xaa in position 219 to 221 is any amino acid
  Variant (223)..(224): Xaa in position 223 to 224 is any amino acid
  Variant (229)..(237): Xaa in position 229 to 237 is any amino acid
  Variant (240)..(268): Xaa in position 240 to 268 is any amino acid
  Variant (270)..(270): Xaa in position 270 is any amino acid
  Variant (273)..(273): Xaa in position 273 is any amino acid
  Variant (276)..(276): Xaa in position 276 is any amino acid
  Variant (278)..(281): Xaa in position 278 to 281 is any amino acid
  Variant (283)..(284): Xaa in position 283 to 284 is any amino acid
  Variant (286)..(291): Xaa in position 286 to 291 is any amino acid
  Variant (293)..(295): Xaa in position 293 to 295 is any amino acid
  Variant (297)..(304): Xaa in position 297 to 304 is any amino acid
  Variant (306)..(306): Xaa in position 306 is any amino acid
  Variant (308)..(308): Xaa in position 308 is any amino acid
  Variant (311)..(314): Xaa in position 311 to 314 is any amino acid
  Variant (316)..(316): Xaa in position 316 is any amino acid
  Variant (318)..(333): Xaa in position 318 to 333 is any amino acid
  Variant (336)..(336): Xaa in position 336 is any amino acid
  Variant (338)..(338): Xaa in position 338 is any amino acid
  Variant (341)..(341): Xaa in position 341 is any amino acid
  Variant (343)..(344): Xaa in position 343 to 344 is any amino acid
  Variant (346)..(347): Xaa in position 346 to 347 is any amino acid
  Variant (349)..(351): Xaa in position 349 to 351 is any amino acid
LXXPXXXXXXXPXXXXXXXXXXXXRXXXXXIXXGXDXXXXRXXVXXGPCSXHDXXAAXXYAXXLXXXXXXXXXXXXLXXXMRXYXEKPRTXXXGWKGLIXDPXXXXXXXXXXGLXXXRXLXXXXXXXXGXPXAXEXLDXXXXQXXXDXXXXXAIGARTTESQXHRXXASXLSXPXGFKNXTXGXXXXAXXAXXXAXXXHXFXXXXXXGXXXXXXTXGNXXXHXXLRGGXXXXXXXXXNYXXXXXXXXXXXXXXXXXXXXXXXXXXXXXDXSHXNSXKXXXXQXXVXXXXXXQXXXGXXXXXXXXGXMXESXXXXGXQXXXXXXXXXXXXXXXXYGXSXTDXCXXWXXTXXXL

SEQ ID NO: 19008 - protein, 24 aa, Artificial sequence
  Consensus
  Variant (2)..(2): Xaa in position 2 is any amino acid
  Variant (3)..(3): Xaa in position 3 is Leu, Val, Phe, Ile, Ala or Met
  Variant (4)..(4): Xaa in position 4 is Val, Ile, Leu or Ala
  Variant (5)..(5): Xaa in position 5 is Val or Ile
  Variant (6)..(6): Xaa in position 6 is Val, Ile, Cys or Thr
  Variant (11)..(11): Xaa in position 11 is Ile, Val, Ser or Leu
  Variant (12)..(12): Xaa in position 12 is His or Asp
  Variant (13)..(13): Xaa in position 13 is Asp or Asn
  Variant (14)..(15): Xaa in position 14 to 15 is any amino acid
  Variant (16)..(16): Xaa in position 16 is Ala, Ser, Gln or Thr
  Variant (17)..(17): Xaa in position 17 is Ala, Val or Gly
  Variant (18)..(18): Xaa in position 18 is any amino acid
  Variant (19)..(19): Xaa in position 19 is Glu, Asp, Ala or Gln
  Variant (21)..(21): Xaa in position 21 is Ala, Gly, Cys or Ser
  Variant (22)..(22): Xaa in position 22 is any amino acid
  Variant (23)..(23): Xaa in position 23 is Arg, Lys, Gln, His or Leu
  Variant (24)..(24): Xaa in position 24 is Leu, Ile or Phe
RXXXXXGPCSXXXXXXXXXYXXXX

SEQ ID NO: 19009 - protein, 42 aa, Artificial sequence; identical to SEQ ID NO: 2884
  Consensus
  Variant (1)..(1): Xaa in position 1 is Leu, Ile, Phe or Met
  Variant (2)..(2): Xaa in position 2 is any amino acid
  Variant (3)..(3): Xaa in position 3 is Ile, Val, Leu or Met
  Variant (4)..(4): Xaa in position 4 is Val, Ile or Leu
  Variant (7)..(7): Xaa in position 7 is Val, Ala or Thr
  Variant (9)..(9): Xaa in position 9 is Phe, Leu, Thr or Val
  Variant (10)..(10): Xaa in position 10 is Glu or Ala
  Variant (15)..(16): Xaa in position 15 to 16 is any amino acid
  Variant (17)..(17): Xaa in position 17 is any or no amino acid
  Variant (19)..(19): Xaa in position 19 is Trp or Tyr
  Variant (20)..(20): Xaa in position 20 is Lys or Arg
  Variant (22)..(22): Xaa in position 22 is Leu, Phe, Met or Tyr
  Variant (23)..(23): Xaa in position 23 is Ile, Val, Ala or Leu
  Variant (24)..(24): Xaa in position 24 is any amino acid
  Variant (25)..(25): Xaa in position 25 is Asp, Glu or Gln
  Variant (27)..(27): Xaa in position 27 is any amino acid
  Variant (28)..(28): Xaa in position 28 is Leu, Met, Ile, Val, Ala or Thr
  Variant (29)..(29): Xaa in position 29 is Asp, Asn or Ser
  Variant (30)..(33): Xaa in position 30 to 33 is any amino acid
  Variant (34)..(34): Xaa in position 34 is Ile, Val, Leu or Met
  Variant (35)..(36): Xaa in position 35 to 36 is any amino acid
  Variant (38)..(38): Xaa in position 38 is Leu, Ile, Met or Val
  Variant (39)..(40): Xaa in position 39 to 40 is any amino acid
  Variant (41)..(41): Xaa in position 41 is Ala, Ser, Gly, Val or Thr

SEQ ID NO: 19010 - protein, 65 aa, Artificial sequence; identical to SEQ ID NO: 2885
  Consensus
  Variant (2)..(2): Xaa in position 2 is any amino acid
  Variant (4)..(4): Xaa in position 4 is Asp, Tyr, Gln, Asn or Glu
  Variant (5)..(9): Xaa in position 5 to 9 is any amino acid
  Variant (10)..(10): Xaa in position 10 is Tyr, Phe or Leu
  Variant (11)..(12): Xaa in position 11 to 12 is any amino acid
  Variant (13)..(13): Xaa in position 13 is Asp or Glu
  Variant (14)..(15): Xaa in position 14 to 15 is any amino acid
  Variant (16)..(16): Xaa in position 16 is Ser, Ala, Thr or Cys
  Variant (17)..(17): Xaa in position 17 is Trp, Phe, Tyr, Leu or Val
  Variant (18)..(18): Xaa in position 18 is any amino acid
  Variant (19)..(19): Xaa in position 19 is Ala or Ser
  Variant (20)..(20): Xaa in position 20 is Ile or Val
  Variant (24)..(24): Xaa in position 24 is Thr, Ser or Asn
  Variant (25)..(25): Xaa in position 25 is Thr, Val, Ala, Ser or Ile
  Variant (26)..(26): Xaa in position 26 is Glu or Ala
  Variant (27)..(27): Xaa in position 27 is Ser, Asp or Asn
  Variant (29)..(29): Xaa in position 29 is any amino acid
  Variant (32)..(32): Xaa in position 32 is Glu, Gln, Phe or Met
  Variant (33)..(33): Xaa in position 33 is Leu, Met, Val, Ile or Phe
  Variant (34)..(34): Xaa in position 34 is Ala, Ser, Thr, Cys or Val
  Variant (36)..(36): Xaa in position 36 is Gly, Ala or Asn
  Variant (37)..(39): Xaa in position 37 to 39 is any amino acid
  Variant (40)..(40): Xaa in position 40 is Pro or Ala
  Variant (41)..(41): Xaa in position 41 is Val, Ile, Thr or Leu
  Variant (43)..(43): Xaa in position 43 is Phe, Met, Tyr or Ile
  Variant (46)..(46): Xaa in position 46 is any amino acid
  Variant (47)..(47): Xaa in position 47 is Thr, Ser or Arg
  Variant (48)..(48): Xaa in position 48 is any amino acid
  Variant (50)..(53): Xaa in position 50 to 53 is any amino acid
  Variant (54)..(54): Xaa in position 54 is Ala or Met
  Variant (55)..(55): Xaa in position 55 is any amino acid
  Variant (56)..(56): Xaa in position 56 is Asp, Asn or Glu
  Variant (57)..(57): Xaa in position 57 is Ala or Gly
  Variant (58)..(59): Xaa in position 58 to 59 is any amino acid
  Variant (60)..(60): Xaa in position 60 is Ala or Ser
  Variant (61)..(61): Xaa in position 61 is Ala, Ser, Val or Thr
  Variant (62)..(64): Xaa in position 62 to 64 is any amino acid
  Variant (65)..(65): Xaa in position 65 is His or Gln

SEQ ID NO: 19011 - protein, 71 aa, Artificial sequence; identical to SEQ ID NO: 2886
  Consensus
  Variant (1)..(1): Xaa in position 1 is Thr or Ser
  Variant (2)..(2): Xaa in position 2 is any amino acid
  Variant (5)..(7): Xaa in position 5 to 7 is any amino acid
  Variant (8)..(8): Xaa in position 8 is His or Phe
  Variant (9)..(9): Xaa in position 9 is Val, Ile, Leu or Ala
  Variant (10)..(10): Xaa in position 10 is Ile or Val
  Variant (11)..(11): Xaa in position 11 is Leu or Met
  Variant (14)..(14): Xaa in position 14 is Gly, Ser or Ala
  Variant (15)..(16): Xaa in position 15 to 16 is any amino acid
  Variant (17)..(22): Xaa in position 17 to 22 is any or no amino acid
  Variant (23)..(23): Xaa in position 23 is Pro, Thr or Ser
  Variant (25)..(25): Xaa in position 25 is Tyr, Phe or His
  Variant (26)..(29): Xaa in position 26 to 29 is any amino acid
  Variant (30)..(30): Xaa in position 30 is Val, Ile or Leu
  Variant (31)..(36): Xaa in position 31 to 36 is any amino acid
  Variant (37)..(37): Xaa in position 37 is Leu, Met, Ile, Tyr or His
  Variant (38)..(40): Xaa in position 38 to 40 is any amino acid
  Variant (41)..(51): Xaa in position 41 to 51 is any or no amino acid
  Variant (52)..(52): Xaa in position 52 is Leu, Ile or Val
  Variant (53)..(53): Xaa in position 53 is Met, Val, Ile or Leu
  Variant (54)..(54): Xaa in position 54 is Ile or Val
  Variant (56)..(56): Xaa in position 56 is Cys, Phe, Ala, Thr, Tyr or Val
  Variant (57)..(57): Xaa in position 57 is Ser, Asn or Ala
  Variant (59)..(59): Xaa in position 59 is Gly, Ala or Asp
  Variant (61)..(61): Xaa in position 61 is Ser or Cys
  Variant (62)..(62): Xaa in position 62 is any amino acid
  Variant (64)..(66): Xaa in position 64 to 66 is any amino acid
  Variant (67)..(67): Xaa in position 67 is Arg, Asn, Lys, Leu or Glu
  Variant (69)..(70): Xaa in position 69 to 70 is any amino acid
  Variant (71)..(71): Xaa in position 71 is Val or Ile

SEQ ID NO: 19012 - protein, 41 aa, Artificial sequence; identical to SEQ ID NO: 2887
  Consensus
  Variant (2)..(2): Xaa in position 2 is any amino acid
  Variant (4)..(4): Xaa in position 4 is Ile, Leu, Val, Ala or Met
  Variant (7)..(7): Xaa in position 7 is His, Asn, Phe or Tyr
  Variant (8)..(8): Xaa in position 8 is Leu or Ile
  Variant (9)..(10): Xaa in position 9 to 10 is any amino acid
  Variant (12)..(12): Xaa in position 12 is any amino acid
  Variant (14)..(19): Xaa in position 14 to 19 is any amino acid
  Variant (20)..(30): Xaa in position 20 to 30 is any or no amino acid
  Variant (32)..(32): Xaa in position 32 is any amino acid
  Variant (34)..(34): Xaa in position 34 is Ile or Val
  Variant (37)..(37): Xaa in position 37 is Ala, Pro, Gly, Lys, Ser or Glu
  Variant (39)..(39): Xaa in position 39 is Ile, Leu or Val
  Variant (40)..(40): Xaa in position 40 is any amino acid
  Variant (41)..(41): Xaa in position 41 is Trp, Ile, Leu or Phe

SEQ ID NO: 19013 - DNA, 1185 bp, Saccharomyces cerevisiae
  CDS (1)..(1185)
atgtggacaaacactttcaaatggtgcagcaaaactgagaaggagaccactactgcagacgccaaggtgtgtgctagcgtgcagggcctgaaggccctgcagcagcaaattatggatagcaccactgtgcgtgggtccgttaataacacgatgactccaggcgggattaaccagtggcatttccacaataagcgtgcgaacaaagtgtgcacgcctacagtactaatccatggatacgctgcctcgtcgatggcgttctacaggacgtttgagaacctgtcagacaacattaaagatctatatgccatcgacttgccagccaatggtgcctcagaggcgccagcattgcaagtgaacaaaaccaagaagatcaagtctctcaggtttaagcatatagaagatgacgtagtaatccctgtgatagagaagcgccccccagcagaggacatcaagtcacacctggagcagtacgaaagctacttcgtagacaggatagagcaatggcggaaggataacaagcttcgcaaaataaacgtggtgggccattcattcggaggatatatttcattcaaatacgccctcaagtaccctgattccattgagaaactgtgtctcatatctcctcttggtgtggaaaacagtatacatgctatcacccacaaatgggagcccaacaccacctatccacttacgtttaccgacccatcgtcccgatattatacaagaaagctgaacgtaccgcggtttatctttgaaaaccagctaaacgttttgaagtggatgggacccataggctccaaattgtgctcgaactacatctccaccgcatacgtaaaagttccggatcagatatataaggactatcttttgcactcatttgtcgggaagaaccagacggtgcaaccacagacaatcaaggtgttcacccatttgtttgaaaggaatctgatcgctagagatccgataataaacaacgttcgttttttgaacccagcaacgcctgtcatgttcatgtatggcgagcacgattggatggataaatatgcgggctacttgactactgaatcaatgctaaaaaacaaggcaaaggctagctacgttgaagtccctgatgctggccataatcttttcctggacaacccgcagcactttgcctcttctttagtctcgttcctgtcaaagtaa

SEQ ID NO: 19014 - protein, 394 aa, Saccharomyces cerevisiae
MWTNTFKWCSKTEKETTTADAKVCASVQGLKALQQQIMDSTTVRGSVNNTMTPGGINQWHFHNKRANKVCTPTVLIHGYAASSMAFYRTFENLSDNIKDLYAIDLPANGASEAPALQVNKTKKIKSLRFKHIEDDVVIPVIEKRPPAEDIKSHLEQYESYFVDRIEQWRKDNKLRKINVVGHSFGGYISFKYALKYPDSIEKLCLISPLGVENSIHAITHKWEPNTTYPLTFTDPSSRYYTRKLNVPRFIFENQLNVLKWMGPIGSKLCSNYISTAYVKVPDQIYKDYLLHSFVGKNQTVQPQTIKVFTHLFERNLIARDPIINNVRFLNPATPVMFMYGEHDWMDKYAGYLTTESMLKNKAKASYVEVPDAGHNLFLDNPQHFASSLVSFLSK

SEQ ID NO: 19015 - DNA, 1362 bp, Saccharomyces cerevisiae
  CDS (1)..(1362)
atgcttttaataaagaggtacttgatggaccctgaaagtttaaggaggcagataatgaatgtatataaatgttacatgtggaagagagcgttccacagtaatagaagcctactggaagttaaacgtcgtgaaaagagtctccagagaaaaattttggaaaggattcttagacccaaggaggaaaatgctgtcaaaaaatctggattcaagctatggtcaagccatttgaataacccacacaaaacttatatgcggctggaggaattacagagacgtattatggaagaggtacacgttgaaggtattaaaaagaatgataagttattcaacgaaataaatcaatggcatttccaaaatgaaaacacaagtactgttcgaacaccaacattgctgatacatggctatgccgcatcttcaatgtcttttttcagaaattatccaggtctgtccaagcacatccgaaatttatactcaattgacatgccagcgagcggattgtcttcagtaccgtctttagagatcaatacaacaacacctctgccgttagatatcaaatttattggagaaaataaatttaaggttccatatacaataaatgcaaatcacaataaatttgtgattcaaatgtacgaagatttctatctcgacagaatcgagcaatggcgcattgataacaaattgggcaaaatgaatgttgtggggcattcttttggcggatatttatcttttaaatatgctgttaaatatccaaactcggtaaacaaactttgcttggtatccccactaggagtggaaaggaatatctggtctgtaaataataatttccactccaacactctttatactatcgattttaaaaatccaaattccaagttttactccaaaagaaatatgattccaaaatacttatttgaacaacaatttcacattttgagaatgatgggaccattaggagctaagttatgttggaattacataatggcggcatatagccgagtcccatcgttggcatacaaagagtacatatttgaactgttttacggtaagggaggtataccggaggttacgacagatattttcaaagcgttattttcaagatgtatcctagcaaaggaccccttgatggattctctgcaatatttaaatgttaagaaattattgatagtatatgggcaatatgattggatgaataaaaaagccggtatgttcatggtcaaagagttgaacaatttaaagaactgtctagaaggagcaagttatttagaaataccttcttccggtcacaatctttttttagataacccagaatcattcaaccaatctatagtgtccttcttatcagacgaaactaaatcgccttga

SEQ ID NO: 19016 - protein, 453 aa, Saccharomyces cerevisiae
MLLIKRYLMDPESLRRQIMNVYKCYMWKRAFHSNRSLLEVKRREKSLQRKILERILRPKEENAVKKSGFKLWSSHLNNPHKTYMRLEELQRRIMEEVHVEGIKKNDKLFNEINQWHFQNENTSTVRTPTLLIHGYAASSMSFFRNYPGLSKHIRNLYSIDMPASGLSSVPSLEINTTTPLPLDIKFIGENKFKVPYTINANHNKFVIQMYEDFYLDRIEQWRIDNKLGKMNVVGHSFGGYLSFKYAVKYPNSVNKLCLVSPLGVERNIWSVNNNFHSNTLYTIDFKNPNSKFYSKRNMIPKYLFEQQFHILRMMGPLGAKLCWNYIMAAYSRVPSLAYKEYIFELFYGKGGIPEVTTDIFKALFSRCILAKDPLMDSLQYLNVKKLLIVYGQYDWMNKKAGMFMVKELNNLKNCLEGASYLEIPSSGHNLFLDNPESFNQSIVSFLSDETKSP

SEQ ID NO: 19017 - DNA, 1338 bp, Saccharomyces cerevisiae
  CDS (1)..(1338)
atgttcaagtcaactttaaactccataataagaagacccttgaaaggttttcaacttcttagaggggctgactcatcgaatacacggccacagtcccctagagcctccgcaagagatgttacagagaaacagatattaagaactccgtcagcaccaactgcaataccattaagggagattatctatagagtcccaagcttgtttcctcgccctttagaagattctgttaaggacttccgagattttatcaagaacgaggatgcattccagactgaacttttgaaaacgctgccattctaccccactccttcggaatcaaaaacagcaagacttataagaactgttgttgatgatgagggcaattacatcaatgaattttgcatacgccctcgaaaaacctcagtgcctgaggctgacttaaaacatctggttttcattcatgggtatggcgccggattgggttttttcatcaagaattttgaggatattccactattggataacgagtggtgcatacatgccatcgatttgcctgggtatggtttttcttcaagacctaagtttccgttcgagtatccgagagataatattcacagcgttcaagattggtttcacgaaagaatacacacatggtttagtaaaagaaatcttttgaaccgacctgagaaaaacattgttatggcacattctttagggtcttacttgatggctttatatttgcaaaaatataaggaatctccatcttttaaaaagctgatcctttgttccccagcaggcgtgtcttatagagatttcaacaatactgcttcagaggttgaaaaatggaaaccgcctccttggtggtatgtcaagctttgggacagaaatatctcgccttttacactagtaagaaattttcgccagttaggttcgaagattacaagtggatggtcatatcggcgctttaagcacattttgaatggtgatccagaacagtcaaaacggtttgaagccttgcatagatacgcatatgctattttcaataaacgtggttcaggtgaatacttattaagctttgctttgaaatgtggtggtgaaccaagactatcattggagcagcagctattcgatggcaaaaagtctgatattttaaagaatagtaattgtgactggctttggctttatggcgatgacgattggatggatgtgaatggtggacttagagtatcaagattcttgaaagagaagttgaaacaaaaaagtaacgtcatcattgttcctcattcagggcatcacttgtacctggataactataagtttttcaataatattcttacgaaagaaatgcaaaaaatataa

SEQ ID NO: 19018 - protein, 445 aa, Saccharomyces cerevisiae
MFKSTLNSIIRRPLKGFQLLRGADSSNTRPQSPRASARDVTEKQILRTPSAPTAIPLREIIYRVPSLFPRPLEDSVKDFRDFIKNEDAFQTELLKTLPFYPTPSESKTARLIRTVVDDEGNYINEFCIRPRKTSVPEADLKHLVFIHGYGAGLGFFIKNFEDIPLLDNEWCIHAIDLPGYGFSSRPKFPFEYPRDNIHSVQDWFHERIHTWFSKRNLLNRPEKNIVMAHSLGSYLMALYLQKYKESPSFKKLILCSPAGVSYRDFNNTASEVEKWKPPPWWYVKLWDRNISPFTLVRNFRQLGSKITSGWSYRRFKHILNGDPEQSKRFEALHRYAYAIFNKRGSGEYLLSFALKCGGEPRLSLEQQLFDGKKSDILKNSNCDWLWLYGDDDWMDVNGGLRVSRFLKEKLKQKSNVIIVPHSGHHLYLDNYKFFNNILTKEMQKI

SEQ ID NO: 19019 - DNA, 1287 bp, Schizosaccharomyces pombe
  CDS (1)..(1287)
atgagccaagtgaaagtcgcggtgagaagtgaggaagcagctaattcttatacgcaaacgtttggcatgtcctggaggcaatggcgtcaagcatgctctgaagaatatgcgaaacaatgtgagcgtgaagtcctgcacactgtcgattttattcgggaaaatgaaaaggacccagaaaggttagttgaagttgtagattccaaaatctacgataatgatggattggtacatgaggtttgtgttagtgataaagcaacaggaaaagcgaacaagcgaagcattgtttacatgcatgggtatggagctggtcttggtttttactttcggaacatggatggtttgactaagggtgtgacaaaggattttaattcttattttgttgattggctaggcatgggaaactcgtcaagaccgcctttcgatatcaaggggcaaaccgcttcagagaaggtcgaagaaacagagaggtttttcactgagtcattagaaacatggagaatcggtcatggtatcgagaaaatgatccttgtgggccatagtatgggaggttatttgtctgctgtctacgccatgcaatatccggaacgtgttgagaaactcttactagttagtccagttgccattcctgaaaacccttttgcaagcaacgatgatgcggaagtttacaattccgttgcttcctctgctgtgcatgctgttatggatgaacctcctttaagtaatgttactaatgaggttctgcaaacccaagaggaaactacaggtttagagccttcccggccaagcaagccaaagaatcctcttccaagatttatcaccttcttatgggagcaaaatgttacaccattttctctacttcgtttaagcgggcctttaggtcctaaactaatgagtttttggtctagcagaaggttttcaacgcttcccccggaaacgtttagggcattacataattactgctactcaatatttcgtctcaagggttccagcgagtatgcacttggcaatttgctcgctcccggagctttcgctagacgatgtattatgaatcgcttgcgcatgttgaagtgtcgaactatattcatgtatggagataaagattggatggatgatgttgctggtttagaagcgacaaacagattgaaggagatgaatattgaggcggagcaccacataatttcaaatgctggtcaccattgctatcttgataaccctgaagattttaatgagattgtactaaaggagatacgaatgagtttacgttctttttcttcgatttcagagtaa

SEQ ID NO: 19020 - protein, 428 aa, Schizosaccharomyces pombe
MSQVKVAVRSEEAANSYTQTFGMSWRQWRQACSEEYAKQCEREVLHTVDFIRENEKDPERLVEVVDSKIYDNDGLVHEVCVSDKATGKANKRSIVYMHGYGAGLGFYFRNMDGLTKGVTKDFNSYFVDWLGMGNSSRPPFDIKGQTASEKVEETERFFTESLETWRIGHGIEKMILVGHSMGGYLSAVYAMQYPERVEKLLLVSPVAIPENPFASNDDAEVYNSVASSAVHAVMDEPPLSNVTNEVLQTQEETTGLEPSRPSKPKNPLPRFITFLWEQNVTPFSLLRLSGPLGPKLMSFWSSRRFSTLPPETFRALHNYCYSIFRLKGSSEYALGNLLAPGAFARRCIMNRLRMLKCRTIFMYGDKDWMDDVAGLEATNRLKEMNIEAEHHIISNAGHHCYLDNPEDFNEIVLKEIRMSLRSFSSISE

SEQ ID NO: 19021 - DNA, 1621 bp, Arabidopsis thaliana
  CDS (86)..(1342)
agtagcaaacttctcgattccttgattcgtgggaaaaagaaagtctagatttttgtggattttgattttgtgattccgtgattgtatgaacttgagccgttttgcttcgagattaagaatggcggaagaaatctcaaagacgaaggtgggatcttcttctactgcttcggtggctgattcatctgctgctgcgtcggctgcaacgaatgcggccaaatcaagatggaaaattttgtggcctaattcgctccggtggattcctacgtccaccgattacatcatcgccgccgagaaacgtcttctctccatcctcaagacgccttatgtacaagagcaagtcagtattggttcaggaccaccaggttctaaaatcaggtggtttaggtctacgagcaatgagtcacgttacatcaacactgttacatttgatgccaaggagggagctcctacactcgtcatggttcatggttatggtgcttctcaagggtttttcttccgtaattttgatgctcttgccagtcgatttagagtgatcgctattgatcaacttgggtggggtggttcaagtaggcctgattttacatgtagaagcacagaagaaactgaggcatggtttatcgactcctttgaggaatggcgtaaagcccagaatctcagtaactttattctattaggacattcttttggaggctatgttgctgctaaatacgcgcttaagcatcctgaacatgttcaacacttaattctggtgggatctgctgggttctcagcagaagcagatgccaaatcagaatggctcactaaatttagagcaacatggaaaggtgcagtcctaaatcatttatgggagtcaaatttcactcctcagaagctggttagaggattaggtccttggggtccaggtcttgtaaatcggtatacaactgcaagatttggtgcacattcggagggaactgggctaacagaagaggaagccaaattgctaaccgattatgtgtaccatactttggctgcaaaggctagtggagagttatgcttgaaatacatcttctcatttggagcatttgctaggaagcccctcttacaaagtgcatcagagtggaaagtgccaacaacgtttatctatggaatgaatgattggatgaactatcaaggtgcggtggaagcgaggaaatccatgaaggtcccttgcgaaatcattcgggttccacagggtggtcattttgtgttcatagacaacccaattggttttcattctgcagtgctttatgcttgccgcaagtttatatctcaagactcctctcatgatcaacaactcctagatggtctacgattggtttagtcatagtatcttgttccttttaccttccaaatttattctatatgtgtatacaagtatatatgaaaaagaacataaaaaagaattactttctttatttgaatattcggttgtgtattggagtttcaagtcctctttccatgtctaaaagttctatttgtaacgttcttgatttcactctaaaacctcttaaagtgtttcaaatgtgatctcattatcgacatccaagttgtaatctttcacaatccacaataatcttttatctcattttttacattttac

SEQ ID NO: 19022 - protein, 418 aa, Arabidopsis thaliana
MNLSRFASRLRMAEEISKTKVGSSSTASVADSSAAASAATNAAKSRWKILWPNSLRWIPTSTDYIIAAEKRLLSILKTPYVQEQVSIGSGPPGSKIRWFRSTSNESRYINTVTFDAKEGAPTLVMVHGYGASQGFFFRNFDALASRFRVIAIDQLGWGGSSRPDFTCRSTEETEAWFIDSFEEWRKAQNLSNFILLGHSFGGYVAAKYALKHPEHVQHLILVGSAGFSAEADAKSEWLTKFRATWKGAVLNHLWESNFTPQKLVRGLGPWGPGLVNRYTTARFGAHSEGTGLTEEEAKLLTDYVYHTLAAKASGELCLKYIFSFGAFARKPLLQSASEWKVPTTFIYGMNDWMNYQGAVEARKSMKVPCEIIRVPQGGHFVFIDNPIGFHSAVLYACRKFISQDSSHDQQLLDGLRLV

SEQ ID NO: 19023 - DNA, 1068 bp, Caenorhabditis elegans
  CDS (1)..(1068)
atgaccgaaactgatattgcaacttcaaaaccttggttttcaacctcttcatgttcatcaaaaagtgagaaattggcagaagctgaaaatcggatttttaccgcacttggaataaagttttcatctgaactggtccagattccattcaaaaacactgaaatcaacacaattactgtgaattgtgagaacgagagttctgaactaaaatcaaaatatccaattgttttgattcatggatttggagctggagttgctctttggggatctgccattaagaggcttgcacaatttcaaaatgtttatgctatagatctacctggatttggccgctcgagtcgcacaaaattctcaactgatccagagactgctgaaaaggaaatgattgaagcaatcgagcaatggagagttaaaatgaatttggaaaagatgaatctggttggtcactcatttggtggatacctctccacatcttacgccctcaagtatcctaaacgaatagaaaacctaatacttgctgatccatgggggttcacagatgtggacccgagttttttggaaaagttgacgaaacggcaaaaagctctgttttgggttattctgaagtttaatccacttgctgctctaagactcgttggtggatatggcccatctcttatgaagcgtctacgcccggatctagaacaaaaatactctgaagatgtgtatgactacatttacctagctaactcgggaaatccaacaggagaaataattttcaaaagcttgtcagagaatttacgatgggcaaagaacccaatgagcaaaagattccacgagttagataaaaccgttcctgtaaaatttattcacggaggaatgagctgggtggattggaaaaccactagggaaatgtttggaagtatggatcatgtagagtcacatatcatagaaggagccggccaccatgtctacgcagacgatactgatcgatttgtggagctcgtcataggatctttgaaggatggaaagactggagatctggtgccagaagaagtgaatttggaagaagatattgtgactccactgtag

SEQ ID NO: 19024 - protein, 355 aa, Caenorhabditis elegans
MTETDIATSKPWFSTSSCSSKSEKLAEAENRIFTALGIKFSSELVQIPFKNTEINTITVNCENESSELKSKYPIVLIHGFGAGVALWGSAIKRLAQFQNVYAIDLPGFGRSSRTKFSTDPETAEKEMIEAIEQWRVKMNLEKMNLVGHSFGGYLSTSYALKYPKRIENLILADPWGFTDVDPSFLEKLTKRQKALFWVILKFNPLAALRLVGGYGPSLMKRLRPDLEQKYSEDVYDYIYLANSGNPTGEIIFKSLSENLRWAKNPMSKRFHELDKTVPVKFIHGGMSWVDWKTTREMFGSMDHVESHIIEGAGHHVYADDTDRFVELVIGSLKDGKTGDLVPEEVNLEEDIVTPL

SEQ ID NO: 19025 - DNA, 1152 bp, Oryza sativa
  CDS (1)..(1152)
atggtttgtgttagttacaagatacaacctcctaaggttgtattaattgttggtgtggtgtttcttcctggttttatgctctcagctatattgttaacaaatatacttcagttctttcttcattttgctctagatatatctgaggctctttgcaattttctaattggtggtgcactttttatatctctttacagaactggctatgtccaagaacaagttaacattggctcctctccacccggatcaaaagttagatggtttagatcatcaagtgatgagccaagattcatcaatactgtaacatttgatagcgaagaaaatgctcccacccttgtcatggtccatgggtatggtgcttcacagggtttcttctttcgaaactttgatgcccttgcaagccgtttcagggtgattgccattgatcagcttggttggggtggatcaagtagacctgacttcacttgtaaaagtactgaagaaactgaggcatggttcatagattcctttgaggaatggcgcaaagcaaagaatctcagtaattttatattgctcggtcactcttttggaggatatgttgcggcaaagtacgctttacagcatcctgagcacgtccaacacttgatcttggtcggccctgctggcttttcatcagaaacagagcatagctctgagtggttaaccaagttccgagctacatggaaaggcatgctagtgaatcatctatgggagtccaattttactcctcaaagaatagtgagaggattgggtccttggggaccaggcttagttcagagatataccagtgccagatttggctcacattcaacagattacatttaccatactttggctgccaaagctagtggagagttgtgcttaaaacatatattttcctttggggcattcgtgaggaaacctcttctgcaaagtgcatccgattggaaagtgccaactactttcatatatggccaacaagattggatgaattaccaaggtgcacagcaagcacggaaagaaatgaaaggaggacattttgtgttcatagataatccttcggggttccactccgcggtcttccacgcatgccgcaagtttctatctggagatggagaggaaggcctctctcttcctgaaggcctaacatcggcctga

SEQ ID NO: 19026 - protein, 383 aa, Oryza sativa
MVCVSYKIQPPKVVLIVGVVFLPGFMLSAILLTNILQFFLHFALDISEALCNFLIGGALFISLYRTGYVQEQVNIGSSPPGSKVRWFRSSSDEPRFINTVTFDSEENAPTLVMVHGYGASQGFFFRNFDALASRFRVIAIDQLGWGGSSRPDFTCKSTEETEAWFIDSFEEWRKAKNLSNFILLGHSFGGYVAAKYALQHPEHVQHLILVGPAGFSSETEHSSEWLTKFRATWKGMLVNHLWESNFTPQRIVRGLGPWGPGLVQRYTSARFGSHSTDYIYHTLAAKASGELCLKHIFSFGAFVRKPLLQSASDWKVPTTFIYGQQDWMNYQGAQQARKEMKGGHFVFIDNPSGFHSAVFHACRKFLSGDGEEGLSLPEGLTSA

SEQ ID NO: 19027 - DNA, 1485 bp, Debaryomyces hansenii CBS767
  CDS (1)..(1485)
atgttgagtacgaaaaatttgctgaagatacatgtgaatcaaataagatttgctagttttaaggttcccaagtcttatgtacctagtaagctaaacagacatattccttttaaactggctctatcaatatggtaccagtcattgaaaccaggtagattacaaactttacaagatgagcttactgagttgatgttaccaactgaattgaactctcatttagtcaaggaaaataagaaagtgagaatcgacaatgatgggaattatttgaatgaactttcttttgaaataaataacaattcagacaagccaactaagcatgttgtatttatacatggctatggtgcatctttgggatgctttgccagaaattatcaaatcattaatagtttgcaagatcggagatacaattacaaagtccatttcttggataacatttctttcggattgtcatcgaacccaaaaatcacatcatcgctcattaacggaagaataccaacatgtccatcagtaaagatgtatgatcctgaacctactactaaggaaaatgtatacaataagtattacaaattaattgaatcgtacgaaattaataaggaagaattccaagaataccaagacaagtttattcctattttaaatgaaatggagaaatattatattgaggcaattgaaaattggcgtattgagtctaaaatcgataagattgattatttggttggacattcttttggtggttattggacaagttcatatgctgtcaaatacccacaaaatttatcaaatttgattttattatcacctgttggggtcgaaaggcacgtacatgctgtcacaaatcctatcgatgaaattaagactcaacctatcaaacctagcgtggatccaacctcctatcattttttaactcgtatgccaatgcttacaggaaagcatgtaataaactggtacactgtattgccttacttacctaagttactcagatggctaggaccttggggagttagcagatattataaagagaggtatggtaaacttttcaaggttaataaggtgacatcccaacttggtggagcttcagaagtcttccagcatgaaaacgaccttattattggtaccaataaagaatgctatttattatttgaatatctttataattctacaaccattggatcacaatctgacatttatatcaaatatttattaactccttgcacggtcagtaaatggcccctttatgataagtttacgaatttcttcaagaattcaccaacttcggaattcagaattcattttgtttacggagaatatgattttatgaattccgaagcaggcttaaagttagccgaaaagatcaaccatctatccgaaagtcctattgcagattttcataaaattccacaaggagggcataacatgtacttagataatccgtttgatacgaacaaaatgcttcacaatattatccaaaagcaagatgatctttga

SEQ ID NO: 19028 - protein, 494 aa, Debaryomyces hansenii CBS767
MLSTKNLLKIHVNQIRFASFKVPKSYVPSKLNRHIPFKLALSIWYQSLKPGRLQTLQDELTELMLPTELNSHLVKENKKVRIDNDGNYLNELSFEINNNSDKPTKHVVFIHGYGASLGCFARNYQIINSLQDRRYNYKVHFLDNISFGLSSNPKITSSLINGRIPTCPSVKMYDPEPTTKENVYNKYYKLIESYEINKEEFQEYQDKFIPILNEMEKYYIEAIENWRIESKIDKIDYLVGHSFGGYWTSSYAVKYPQNLSNLILLSPVGVERHVHAVTNPIDEIKTQPIKPSVDPTSYHFLTRMPMLTGKHVINWYTVLPYLPKLLRWLGPWGVSRYYKERYGKLFKVNKVTSQLGGASEVFQHENDLIIGTNKECYLLFEYLYNSTTIGSQSDIYIKYLLTPCTVSKWPLYDKFTNFFKNSPTSEFRIHFVYGEYDFMNSEAGLKLAEKINHLSESPIADFHKIPQGGHNMYLDNPFDTNKMLHNIIQKQDDL

SEQ ID NO: 19029 - DNA, 1329 bp, Debaryomyces hansenii CBS767
  CDS (1)..(1329)
atgctagttgtcccgcaaagactatttagcgtttccagggttgttaaaaactcatcgtcgtctgggttccccggtttcaactttaatttaaatcaacttttgaattcaaatctcaaatttttgccaaatattagaaagaaatcaatagtgcatgacgagacggctgctatcgacacgccaaagaagttgaggattattgaaaatcgctacaaaaggtcaacacatcctacttctgtgcctttgaataagctattctcaaacaactttcctttgtcaataagtgattctatcgacgattatgcatacagacgtaatccattaaaattccagcatgacttattatcacttttgccgttttatcctcaggcagattcgtcaggaagatcaagtcaggctcttcaagttaagcttgactcggggaattatattaatgagtttgttatttatccgcctaataaaacagaagccgatgcaagtactatgaatcatttgattatgatccatggatatggtggtggattagggtttttcttaaaaaacttcgatgagatatcttctcttgacaactggtgtattcattccattgatttattggggtatggatgttcatcaaggcctcctttcaagctagctaaggatgatttagagcacgttgaaaagtggttccacgattcatacactgagtggcttataaaaagaaacctcagtcacctaccacctctgcaagtcttagtgatgggtcactctatgggtgcttatttgatggctacgtatggtgttaaggtcaaccctaagttctgccgcaaattgctaatgatatcgccgggggcagtaattaaacacagaaaacaaatatttgtccctaaatattttgcaaaactttgggagcaaaatatttcccctttcactttagtgagaaaagctggtccgttaggctcgaaggtagtaagtggctggtcttccagaaggtttgcaaatttgccatctaaagagtcaaaattattacacaagtatgcctacgggatcttccagagtcccggctcaggggaatatatgctcaattatttacttgctccaggagctgatgcacggttcccattagtagagagagatattcacaagcttgactgcgaagtgttatggtgctatggtaaagaagattggatggacaaacttggtggtgaactatgttcaaaacttataaacaggcaacataaagattctgataaaagtaaggtcttagaaatcgatgatagtggacatcatatatatctcgacaatcctaaaaagtttaataagcttttactagacgaaatgaaaaaattttag

SEQ ID NO: 19030 - protein, 442 aa, Debaryomyces hansenii CBS767
MLVVPQRLFSVSRVVKNSSSSGFPGFNFNLNQLLNSNLKFLPNIRKKSIVHDETAAIDTPKKLRIIENRYKRSTHPTSVPLNKLFSNNFPLSISDSIDDYAYRRNPLKFQHDLLSLLPFYPQADSSGRSSQALQVKLDSGNYINEFVIYPPNKTEADASTMNHLIMIHGYGGGLGFFLKNFDEISSLDNWCIHSIDLLGYGCSSRPPFKLAKDDLEHVEKWFHDSYTEWLIKRNLSHLPPLQVLVMGHSMGAYLMATYGVKVNPKFCRKLLMISPGAVIKHRKQIFVPKYFAKLWEQNISPFTLVRKAGPLGSKVVSGWSSRRFANLPSKESKLLHKYAYGIFQSPGSGEYMLNYLLAPGADARFPLVERDIHKLDCEVLWCYGKEDWMDKLGGELCSKLINRQHKDSDKSKVLEIDDSGHHIYLDNPKKFNKLLLDEMKKF

SEQ ID NO: 19031 - DNA, 1413 bp, Debaryomyces hansenii CBS767
  CDS (1)..(1413)
atgagttctacgcaagttgaaactaagacggagggagttccggaaaaaccgaacgcttggaatgatagaaggaacaaaaaaaacgaattccaagatggaagggtcttaccggtttatacgtggaaagagtcagctagggattggtacaagcagggattacagaaaagttatactgacgagcaagtggaatataatttgcttctgagtttgccgttttatccggaaacagatggaaaaagaaaggcagagattatcaatacagacatcggtggcggaaactatatccatgaattttatattgagaatacagaaaagccgagcacaccagcagtggtagataaggatccggtaaccgatgttgtattgatacacgggtatgctgcttcgttggggttatttatcgataattttgacttgttatcgtcggcacccggtattaagatacatgccattgatcttttagggtttgggttctcgtctaggcccaagtttccaagctttccatcagagaccaaaggggacatattcaagatcgaagattggtttattgatgcggttgaggaatggagaaagaaacgtaacatcaataggtttattttgatgggccattcgtttggcggatacttaagttgtgcgtacgtgttgaagtataacaagagcttagttgatgcagcaggaaaactgcagcctggaatggttgataagttggtgttgattagtcctgtagggcttgagagaaataagttttccttgttgaaggacgaagcatctgaaggtatatccgatgaacgtagaaagctggaaaatcaagacgctccaagtatagcgttagaggatgaagttaacgctgaccaggaatcaatcattcataatgaggaccaagagtctaccgaggaaaaggtatcgaggagtagaaggttgcttgatgcgttatggagacgtaattactcgccattttctatcgttcgtaatatgggacctttaaaatctaagatgatttctagatggactacccatagatttgcccatatatatttcacaaaccctatgcaatttcaagccatgcacgattacatatatagagtattcaacggtaagggttcgggcgaatttgcaattactaggattttagcaactggtgcgttgccaaagttgccattattagacagatgtcccgaaaaatttgtcaagatgaatactccaaccttttggatatatggtgataaagattggatgaatgacgaagccgggttggaaatgacaaatgagatcaataagttgtcaagcatagctatgggaaagaacttggcccaattcagtatattaccaaattcaggacatcatctttatttggataatccaaaagatttcaataaagaaattttcaaatttataggctttaaaagctcatag

SEQ ID NO: 19032 - protein, 470 aa, Debaryomyces hansenii CBS767
MSSTQVETKTEGVPEKPNAWNDRRNKKNEFQDGRVLPVYTWKESARDWYKQGLQKSYTDEQVEYNLLLSLPFYPETDGKRKAEIINTDIGGGNYIHEFYIENTEKPSTPAVVDKDPVTDVVLIHGYAASLGLFIDNFDLLSSAPGIKIHAIDLLGFGFSSRPKFPSFPSETKGDIFKIEDWFIDAVEEWRKKRNINRFILMGHSFGGYLSCAYVLKYNKSLVDAAGKLQPGMVDKLVLISPVGLERNKFSLLKDEASEGISDERRKLENQDAPSIALEDEVNADQESIIHNEDQESTEEKVSRSRRLLDALWRRNYSPFSIVRNMGPLKSKMISRWTTHRFAHIYFTNPMQFQAMHDYIYRVFNGKGSGEFAITRILATGALPKLPLLDRCPEKFVKMNTPTFWIYGDKDWMNDEAGLEMTNEINKLSSIAMGKNLAQFSILPNSGHHLYLDNPKDFNKEIFKFIGFKSS

SEQ ID NO: 19033 - DNA, 1404 bp, Debaryomyces hansenii CBS767
  CDS (1)..(1404)
atgggtgaaagaagaccatcatcaatctcgttaactaaatccctaaccgattggtggtcgtttccaaaatacttgaaaagtggcagtgacagtttaccagacgaaaatcgaagtgaaggaatcgaacaagccaaattgaggaatcggttaattgagtatgaattgttcaaggctattctatcagacgatatctaccttcatcccccaaatagcgaaaatggtattccggaggacgctcaaattacaggagaatttgtagatgttgatattggagggggggtgacgatccatgaattttatttggaaaatagggtgaaagcagtctcccccaacgaagtagttgatattgtgttaattcatggatatatggcagctttgggatatttcgtgaagaatttcgagcagatcgttaaggcaaaaccaggggtacggttgcatgttatagatctaccagggtttgggaactcgtctcggcctaaatttcctaccgaattcttagttaagccttctacaaaaagcgaggagatcgaacagattttgaacatagaagattggtttatcaataagatcgaagagtggagaatccaccgaaacttgaggcattttaaattgataggacattctatgggtggttatttgtctagttgttatttaatgaagtacaacaaccaatactgtgacctgcgagaagatgactccaagattattaccgagttcatcatagtaagtccaatgggaacggaatcaaattacatcagtttgataaataataagctggatttccatgacagtagtgatcctttaaaggatttggttactgtacagacagaggacgaaattatagtccacgacgaagagttcaaagagttgtgggaaaagctaggcaaaccaaagtttccaaaacacattttattgcaaaaactatgggagtggaataagtccccatttcaaatgttacagattttaggaccattttattcgaagttattatcctattggtcatttcaacggttcaggaatttaagagttaatgacggtgaaaatgaagttaatgttgatttaattctcaagctccacaattattcatattccattttcaaccagttccagggatctggagagctagcaattaccaagttgatcaatcatgaaatattggccaaactaccactatgtgatagaggattcgtcaaatacctacatgattcggaaattaggaccttgtggctctacggtgataaagattggatgaatttcaaaggaggatatcacattttcgagcaattatctaagattaattctttgagttcatttcaaatcatcaaggatgccggccatcatatttatttagacaatcctgaagaatttaacaagtcttgtttagaatttttcaatttaatatag

SEQ ID NO: 19034 - protein, 467 aa, Debaryomyces hansenii CBS767
MGERRPSSISLTKSLTDWWSFPKYLKSGSDSLPDENRSEGIEQAKLRNRLIEYELFKAILSDDIYLHPPNSENGIPEDAQITGEFVDVDIGGGVTIHEFYLENRVKAVSPNEVVDIVLIHGYMAALGYFVKNFEQIVKAKPGVRLHVIDLPGFGNSSRPKFPTEFLVKPSTKSEEIEQILNIEDWFINKIEEWRIHRNLRHFKLIGHSMGGYLSSCYLMKYNNQYCDLREDDSKIITEFIIVSPMGTESNYISLINNKLDFHDSSDPLKDLVTVQTEDEIIVHDEEFKELWEKLGKPKFPKHILLQKLWEWNKSPFQMLQILGPFYSKLLSYWSFQRFRNLRVNDGENEVNVDLILKLHNYSYSIFNQFQGSGELAITKLINHEILAKLPLCDRGFVKYLHDSEIRTLWLYGDKDWMNFKGGYHIFEQLSKINSLSSFQIIKDAGHHIYLDNPEEFNKSCLEFFNLI

SEQ ID NO: 19035 - DNA, 1260 bp, Yarrowia lipolytica CLIB99
  CDS (1)..(1260)
atgtcggaacttgaagagaccagaaacgtccgaatgaagcggttcccgtacaaggaggcgctgcgacagtggtggaacgcgccctcggccgagaaggccgaattcgacgttctgtccatgctccccttctttcctaagcccgatgccacccgaacagcaacgtccaaactcgtcgacattggtaaaaacagatacatcaacgagttccacatccaaaacaccaccaatggaaccccccatcgcaacctcgtcatgctccacggctacggaactggcctggggatcttcttccagaactacgaccagatctcctctacacccgattggaacgtcttctctcttgatctactcggtctaggccgatcctcaagacggcccaaattcaagatccagacctcggacacagacaagaagattgtgaacgaaaaaaccggcgaagtcgtctaccctgcggtgatcgagtcagagaactactttatcgacgccattgaggactggagacaggtgcgcaagattgaaaaattcactcttatgggccactccatgggcggctacctcgcagctgcctacgccttcaagtaccccgagagagtagaaaaactcattctggtgtcccccgtaggtgtggagagatcaggagacgtggaggtggacgattcggcttctcttctgcaaggagccaaagaaattgccgctcaacctgttcccgacgaacgtctgttcccagccatcacccacgacgaaggcatgaaggtccatcctggcgctatccctccccaggagaaaatccactggcttatgaagtatctgtggacccaccactactcgcccttcatgctgatccgacaggctcctccgggagtaggagtgcgtctcatgtcagcctggtctttgtggcgattccaggatctcagcgaagaggatcgaatgaaactccatctgtactcctacaagctcatggacagcaaggcgtctggagagctggctctgactcggcttctcaagcctgtagcactggctagaatgcctctactggatcgccttgacaaaatcaagtgtcccaccatgtggatgtacggagagaaggactggatgaatgccgaggcaggagccgaggccacccagactctcaaccgaaacgccagcaatgaaaacaacacccagagcgtgttcaagctggtcaagagagcaggtcaccatatttatcttgataacacccgagcgtttaactctctgattgtcgactttatgacccgatag

SEQ ID NO: 19036 - protein, 419 aa, Yarrowia lipolytica CLIB99
MSELEETRNVRMKRFPYKEALRQWWNAPSAEKAEFDVLSMLPFFPKPDATRTATSKLVDIGKNRYINEFHIQNTTNGTPHRNLVMLHGYGTGLGIFFQNYDQISSTPDWNVFSLDLLGLGRSSRRPKFKIQTSDTDKKIVNEKTGEVVYPAVIESENYFIDAIEDWRQVRKIEKFTLMGHSMGGYLAAAYAFKYPERVEKLILVSPVGVERSGDVEVDDSASLLQGAKEIAAQPVPDERLFPAITHDEGMKVHPGAIPPQEKIHWLMKYLWTHHYSPFMLIRQAPPGVGVRLMSAWSLWRFQDLSEEDRMKLHLYSYKLMDSKASGELALTRLLKPVALARMPLLDRLDKIKCPTMWMYGEKDWMNAEAGAEATQTLNRNASNENNTQSVFKLVKRAGHHIYLDNTRAFNSLIVDFMTR

SEQ ID NO: 19037 - DNA, 1470 bp, Yarrowia lipolytica CLIB99
  CDS (1)..(1470)
atgacccttgccgcctgtcaaaagagagctcttggtgcggtggagacggttctggcgtcggttcgtgttttccagcactcccgcgcccagcataccgcttctgcgtcgtcatcagcgtctggatcgagcaaaaagttccgacctcctactcctccagcgggtattccgctttcgaaaatcttcaacaacttgttcccgctgagctactcggaatcgtttcaacagtggcgagaccgagacgagaagggcgacactgctcaagatgctgtcctgtccatgatgccgttctaccccaacagagagactcagtcggtggtggctcgcacgctgccaggtggcgaacagcaggatctgtaccgtgaagggcgtgtgattcggaccccagtcagtgggtctgagttcatcaacgagtttgagatcagccagtacaaagccgatggtacctctattgcagatcaggacacacatcacattatggtgttacatggctacggtgctgggctgggattcttctttcgcaacttcaacgcgctttccaagatccccaactcccagattcacgcgctggacctcttgggctacggtttgagctctcggccgtctttccacatcagatcgaacccacgcactttgctgttcaagaaatgggaggagcaggtgacgatagccgaaaacttcttcctggactcgattgaggagtggcgccagaagaagggcattaaaaagttcagcgtggtggctcactcgcttggtgcgtatctcatttccgaatacgctgtcaagtacccaggtcacattgacaagattgttctggcctctccagcagctgtctcacacactggaatgcagttccagcaacagactgacagcaattctgacaagggaaaattgtctaacaaaaaggcctccctcaaagacatttctcaatcttccatcgataccaaccccacatttactacagccgagtcgaaaatccccaagattccgctgtggttcaaaattggctgggaactcaacttttcaccgtttgccctggtgcgtcagaccggccctctgggtccccgatttgtgtctgggtggacctcccgaagattccctattgacaaccacaccacggaggaagagagcaaagccatgcacaaatacacgtacgagattttccgacgaaagggctctggagagttctgtctcaactacctgctcgctcctggagctgttcctagacggcctctcgtggaacgggtccataaactgggcgaactgggtatctcgaccacctgggtgtatggctccaacgactgggtggacgtgaatggaggccacgagagtgccagacgaatcaaacgggctggaggtgatgccgaagtgcatgttgtgcccggagctggtcatcagctatacatggaccagcccagccggttcaacgagattgttgtgaatttccttcgacgaaacacctcgagccactag

SEQ ID NO: 19038 - protein, 489 aa, Yarrowia lipolytica CLIB99
MTLAACQKRALGAVETVLASVRVFQHSRAQHTASASSSASGSSKKFRPPTPPAGIPLSKIFNNLFPLSYSESFQQWRDRDEKGDTAQDAVLSMMPFYPNRETQSVVARTLPGGEQQDLYREGRVIRTPVSGSEFINEFEISQYKADGTSIADQDTHHIMVLHGYGAGLGFFFRNFNALSKIPNSQIHALDLLGYGLSSRPSFHIRSNPRTLLFKKWEEQVTIAENFFLDSIEEWRQKKGIKKFSVVAHSLGAYLISEYAVKYPGHIDKIVLASPAAVSHTGMQFQQQTDSNSDKGKLSNKKASLKDISQSSIDTNPTFTTAESKIPKIPLWFKIGWELNFSPFALVRQTGPLGPRFVSGWTSRRFPIDNHTTEEESKAMHKYTYEIFRRKGSGEFCLNYLLAPGAVPRRPLVERVHKLGELGISTTWVYGSNDWVDVNGGHESARRIKRAGGDAEVHVVPGAGHQLYMDQPSRFNEIVVNFLRRNTSSH

SEQ ID NO: 19039 - DNA, 1230 bp, Kluyveromyces lactis NRRL Y
  CDS (1)..(1230)
atgacagttcgcagaagcttggcattgaggctgttgaggaaaggaatgtcgcaaccagacgagctctctttgaagcgttctggctggaaacagtggtggaatagtttaaattacgatgcaaagggtagtttgaagcatttgcaacagaatcttatggaccaattgcagtttgattccgggatatctgtcgaaaattcgatgctattgggcgagatcaaccaatggcggatctcgaatcctacggcaaaagcagtgggggtacctactttgatgatccatgggtatgctgcatcgtcaatgacatttttcaggaatttcgagcagctttcgttgtccttgaaagatgtctacgctgtagatttgcccgggaacgggttgtcgaaagagttacctctctcagtagactctatgcaaaaacctgacagagtagagttcaacgaaactgtgaagggtcagtatttccgtttgcagaatccggttgatgaagagaaatataagaaacatttggctcattatgaggactattacgtcgatgccttggaaaaatggagaaaggaaaacaaattgtccaagattaatttggttggccactcgtacggtggctatctaactttcaaatactctttgaaatacccagataacgtccataaactatgtcttgtgtcaccacttggtgtggaaagaagcatattttctatccataaccatttggaaccggaaagagattatgaaatacaatccgaagaccctagcaaatcgaactactcgaataaaagaaatataccaaaacttatcttacaataccaaaataaagctctaagatggatgggtcccctgggagccaaagcttgttggggttatgtgaatagctcttatggtagagttccaagcgtcccttacagggagtacgtgtttcaattggttttcggtaagggaattatgactgatacctctatcagaatattcaaccaactattctcaagaagcctgttagcatatgatccgatcatggattctttggataaagttaaagtgtcaaaattgatgttggtttatggtgaacacgattggatgaataaagtcgctggaaggctggcgatagaggagttcaatagtataagaaaaagctacgatggaactttcgatatcgtgagtagagctggtcacaatttggttttggataacccatcagagttcaactccaaattggtcgactttctaagggattaa

SEQ ID NO: 19040 - protein, 409 aa, Kluyveromyces lactis NRRL Y
MTVRRSLALRLLRKGMSQPDELSLKRSGWKQWWNSLNYDAKGSLKHLQQNLMDQLQFDSGISVENSMLLGEINQWRISNPTAKAVGVPTLMIHGYAASSMTFFRNFEQLSLSLKDVYAVDLPGNGLSKELPLSVDSMQKPDRVEFNETVKGQYFRLQNPVDEEKYKKHLAHYEDYYVDALEKWRKENKLSKINLVGHSYGGYLTFKYSLKYPDNVHKLCLVSPLGVERSIFSIHNHLEPERDYEIQSEDPSKSNYSNKRNIPKLILQYQNKALRWMGPLGAKACWGYVNSSYGRVPSVPYREYVFQLVFGKGIMTDTSIRIFNQLFSRSLLAYDPIMDSLDKVKVSKLMLVYGEHDWMNKVAGRLAIEEFNSIRKSYDGTFDIVSRAGHNLVLDNPSEFNSKLVDFLRD

SEQ ID NO: 19041 - DNA, 1086 bp, Xenopus laevis
  CDS (1)..(1086)
atggcggagggatccgatatggtttcttcctactccgaaagagggctcataggtgccctaagagcagccgtctggtcttttgtgtcagggtggctttccagttggcttcccgcctggtgccctacatcaatacctcatctcaaagaagcagaagagaaaatgctgaagagtataacgcgtacttacagtaaagaacacatacttatatctggtggaaataaggtatggaccttggcatttaaacaaccattatcaaataaaaccccacttgttctgctacatggatttggtggaggggttggactgtgggtgctcaactttgaaaacatttgccaagacaggacagtttatgcatgtgacatcttgggatttggacgcagtagtaggccacactttcaaggagatgcagagaaagctgaggaacagtttgtacagtcgatcgaagagtggaggaaggaattaggtctggagaaaatgatttttcttggacataatcttggtgcatttttggcctctgcttattctttaaagtatccttcacgggtgaaaagtcttattttagtggagccatggggattcccggacagacctgataatgcagatgaaggaagaccaattccgatctggattaaagcagtaggtgctatgctgagtccatttaatccactagcagggcttcgtctagctggacctttaggtttaagccttgtccagcgtttgcgaccagatttcaagaaaaagtattcctcaatgtttgatgatgatacagtaacagaatatatctaccactgtaatgcacagtcacctagtggtgagacagctttcaggaatatgaccgttccatatggttgggcacaaagaccaatgctgcagcgtattgataaaatgcacctagacattccaatcaccgtgatttatggtgcacgatcttgcattgatggcaattctggaagcaccatacagtcactgcggccaaactcctatgtgaagactattgcaattcgtggtgcaggccattatgtatttgctgatcagcccgaagattttaaccaaaaagtaacagagatatgtgattctgtggactga

SEQ ID NO: 19042 - protein, 361 aa, Xenopus laevis
MAEGSDMVSSYSERGLIGALRAAVWSFVSGWLSSWLPAWCPTSIPHLKEAEEKMLKSITRTYSKEHILISGGNKVWTLAFKQPLSNKTPLVLLHGFGGGVGLWVLNFENICQDRTVYACDILGFGRSSRPHFQGDAEKAEEQFVQSIEEWRKELGLEKMIFLGHNLGAFLASAYSLKYPSRVKSLILVEPWGFPDRPDNADEGRPIPIWIKAVGAMLSPFNPLAGLRLAGPLGLSLVQRLRPDFKKKYSSMFDDDTVTEYIYHCNAQSPSGETAFRNMTVPYGWAQRPMLQRIDKMHLDIPITVIYGARSCIDGNSGSTIQSLRPNSYVKTIAIRGAGHYVFADQPEDFNQKVTEICDSVD

SEQ ID NO: 19043 - DNA, 1161 bp, Candida glabrata CBS138
  CDS (1)..(1161)
atgtggtgcaaaggcgatgacctcgagactttgcaatataaggtgatggaggaagtgcctgtcgagggccagcgggcggtgctgcggtgtggggtgaaccagtggtacttcagaggcggtgaccgggtggtgactccgacgctgctagtgcatgggtatggagcctcttctatggcgtaccaccgctgttttgcgccgctgtcgaggcacatacgggacctgtatgctatagacctcccggccaatgggctgagcgaggcaccgccgctggtggcagagggtgaggcgccaaaggccaagtttaagatcgaggagaacaagttcaccgtggtgcagggcgccagacgtgctgccgagccggtgacggatgcccaggtggatcaggagctgatgctgcgcacacaccgggagaagaggcggtacttgcagcagtacgaggactactatgtggagagcatcgagcagtggcgaaaggagaacaacctagacaagttcaaccttgtgggccactcgtttggcgggtacctgtcctacaagtacgccctgaagtaccctgagtccgtgaacaagctctgcctgctgtcaccgctgggtatggagcgcaacatacactcgataaataacacgtttgaggagaacgtggtctatgaactgcaggagtctgatccttcctcatacctgtacactagaaagcgcaaggctccaaagttcctgttcgagaaccagtttagcgtgctcaggtggatggggccaataggagacaagctgtgtctgtcctttatcaattccagttacgccaaggtacccagccaggcatacaaggactacttgttcgagtccttcctgggcaagaagcatttcgccaagcagaacgtccatgctctgaagcacttgttcacacgcagtctgctcgcaagagaccccatcatggacaccatagacaagttgaaagtgccagatgtatctgtattttacggtgaccacgactggatgaacagctacgctggttatctcatggtcgaacgcttgaagaagtttagagttgccagcacttcaggtggctctgcctcctatttggaagtacctgacgcaggacataacctgttcctagataacccagactacttcagcaagaaacttgtccagtttctcagcgagtaa

SEQ ID NO: 19044 - protein, 386 aa, Candida glabrata CBS138
MWCKGDDLETLQYKVMEEVPVEGQRAVLRCGVNQWYFRGGDRVVTPTLLVHGYGASSMAYHRCFAPLSRHIRDLYAIDLPANGLSEAPPLVAEGEAPKAKFKIEENKFTVVQGARRAAEPVTDAQVDQELMLRTHREKRRYLQQYEDYYVESIEQWRKENNLDKFNLVGHSFGGYLSYKYALKYPESVNKLCLLSPLGMERNIHSINNTFEENVVYELQESDPSSYLYTRKRKAPKFLFENQFSVLRWMGPIGDKLCLSFINSSYAKVPSQAYKDYLFESFLGKKHFAKQNVHALKHLFTRSLLARDPIMDTIDKLKVPDVSVFYGDHDWMNSYAGYLMVERLKKFRVASTSGGSASYLEVPDAGHNLFLDNPDYFSKKLVQFLSE

SEQ ID NO: 19045 - DNA, 1356 bp, Candida glabrata CBS138
  CDS (1)..(1356)
atgtcgatttcaaagtttgggaaaagatcttttagaaatgttgctagcaagttgctgaggttatcctcattgggtgaaaagagttctgaggttgtaggtaaagatggaagtgctattatacatgctactgcccctactgcaaagccactatatgagattgtgagggacctgccgagattatttcctcgctcattagctgagtcaaagcgtgattacgctacctttcacagtaatgttgacttaatgcagttggagttgctccgaacgttgcctttctttgaaaggacaggttacaacaaaagagcatatttgaggaaaactgagatagatagtgatggcaactatatcaatgagcttgttattgaacctgcgaatgtggacccgaataagaagaggaaaagactgatttttgtacacggatatggggctgggcttggtttctatttgaaaaattatgaacacctaccattgctggatgattcttggtctatacatgctattgatctgcccggttatggcttctcgtcaagaatggattttcctttccagttcccaagagatgatacatcagtggtgtgcgactggtttataagtaggctacgaactttgtttgagaaaagaggatttgataaatctgataatatcgtgatggctcactcaatgggtgcatatcttatggctttctatttgaataaatacccagactcagtgaaaaagatggtaatgtgttcgcctgctggtatctcacgaagtcagtatagtattaacaacaatatcactgaagatatttcctctgggaaagaggaaatcaaactaaaaataaagaaggtgccttggtggtacacaaagctatgggatcgcaacatttcaccatttgtgctggtaagaaagacaggaatattaggttctaagattacttcaggctggacctacagaagatttaaaccgatattattgaataaagagaataattatgagcaatttgaaaaattgcacagatattcatttgccatattcaatatgaagggctcgggggagtacctcctcagttttgttctcgagtgcggaggagaccccaggtcacctttggagaatagtttattttccagtgatgccaataaatttggcatcgataatgcaggtatcaaaaacagctcttgtgaatgggtgtgggtttacggtgcaaatgattggatggatatccatggagcagagagggtcacaaaagatttccttatgaacaatcgcaagaaaagtagagtggtgacaattccagaatcgggacatcacctctattttgataactaccccatgttcaattcattgttgattgacgaaatgaaatctttgcagtaa

SEQ ID NO: 19046 - protein, 451 aa, Candida glabrata CBS138
MSISKFGKRSFRNVASKLLRLSSLGEKSSEVVGKDGSAIIHATAPTAKPLYEIVRDLPRLFPRSLAESKRDYATFHSNVDLMQLELLRTLPFFERTGYNKRAYLRKTEIDSDGNYINELVIEPANVDPNKKRKRLIFVHGYGAGLGFYLKNYEHLPLLDDSWSIHAIDLPGYGFSSRMDFPFQFPRDDTSVVCDWFISRLRTLFEKRGFDKSDNIVMAHSMGAYLMAFYLNKYPDSVKKMVMCSPAGISRSQYSINNNITEDISSGKEEIKLKIKKVPWWYTKLWDRNISPFVLVRKTGILGSKITSGWTYRRFKPILLNKENNYEQFEKLHRYSFAIFNMKGSGEYLLSFVLECGGDPRSPLENSLFSSDANKFGIDNAGIKNSSCEWVWVYGANDWMDIHGAERVTKDFLMNNRKKSRVVTIPESGHHLYFDNYPMFNSLLIDEMKSLQ

SEQ ID NO: 19047 - DNA, 1272 bp, Candida glabrata CBS138
  CDS (1)..(1272)
atggttagaaatagttcgcaggtcaggcacttcagtagctatttgagactgtgccagcaacaaaagaaccttgaaaccagggtgatttccagaatacttaaacctgccaatagcactgataacaatgaagcaagatcgggatggaagctttgggcaggtcatttgttcaagaccaagaaggagacttttgacaagctaaagatgctacagagtcgcatcatgggcgatattgaaattgcaggacatagcagcaacaaaattctcttcgatgagatcaatcagtggcatttccacaacaatttagcaaaaaaggtcaggacaccaacagtgcttatacatggttatgctgcaacttcaacagccttctttagaagcataccatacttgaacagagacatcaaggacttgtataccattgatctaccagggaatggtttgtcatttacaccttctcttgatttagaagttagtaaaccattaccattaaagatagaaaatattgatgatggcaacgagtttcagctgccttatgttattgattctgctcatcaccggtacgtattacagaaattgcttgactattatgtcgaccgaatcgagcaatggaggcttgataataagctaggcaagattaacgtggttgctcattcttatggcggttatttatctttcaattatgcactaaaataccctgctaatatcaacaccttaggattgatctctcctcttggtgttgagagaaatatttattcaattaacaatgagttccatagcagaacaatttacaaaagggaatggaacgattgtaactctatgttttatgatagaaaattcaagctcaacgactatcttttccagaaacaactgaaaccactaaggtggttaggccctataggtgcaaagctatgttggaactacatccggtctgcatacgccagagtaccttcaattgattacaaagactacaccttcgagacattctatggaaggggaggcttaccagaacagacttcccaaatttttacttcattattgacaagttccttactagcaagggatccattgcttgaccatgtatcgcaactacaagtcccgaaattaatcatgatgtatggccagtacgactggatgaataaaaacggtggaaagctcatgacccagatattcaacggtgaaacaaaatatatagatataccaaacgccggccacaacttattcctggataacccatccgactttgcttctcagttgacaacattcttggctgactaa

SEQ ID NO: 19048 - protein, 423 aa, Candida glabrata CBS138
MVRNSSQVRHFSSYLRLCQQQKNLETRVISRILKPANSTDNNEARSGWKLWAGHLFKTKKETFDKLKMLQSRIMGDIEIAGHSSNKILFDEINQWHFHNNLAKKVRTPTVLIHGYAATSTAFFRSIPYLNRDIKDLYTIDLPGNGLSFTPSLDLEVSKPLPLKIENIDDGNEFQLPYVIDSAHHRYVLQKLLDYYVDRIEQWRLDNKLGKINVVAHSYGGYLSFNYALKYPANINTLGLISPLGVERNIYSINNEFHSRTIYKREWNDCNSMFYDRKFKLNDYLFQKQLKPLRWLGPIGAKLCWNYIRSAYARVPSIDYKDYTFETFYGRGGLPEQTSQIFTSLLTSSLLARDPLLDHVSQLQVPKLIMMYGQYDWMNKNGGKLMTQIFNGETKYIDIPNAGHNLFLDNPSDFASQLTTFLAD

SEQ ID NO: 19049 - DNA, 1155 bp, Ashbya gossypii
  CDS (1)..(1155)
atggcgcacaacaccaacggaggacctgtggcgctccggatactgcgccgactgctgaatgcagtgcccgcggaccagcaggcatctgggtttattctctggctgcagaaccgggggcagaacggcagcgcgcaggtggagagatggcagacagccttgatggagccgctgggcgccgctggcagagagtccgtggtggggggcctacaccagtggtactttgcgaacgcgggcgcgccgatccgcacgcccacggtgctactgcacgggtacgcgtcgtccgcggtgagcttccaccgcaacctcgcggcgctgggcgcgcaggtggagcagctatacgcgctggacctgccaggcaacggcatgtcgcaggagctgccgctggggcccgcggcggcgcgcgcactggcgcggcgttgtggcgcgcgcgcggacatccgcgcgctggcggactactacctggacgcgctcgagcggtggcgcgcggccaacgggctggagacgctgaacgccgccggccattcgttcggcggctacctggcattcaagtacgcgttgaggcaccccgcgcgcgtgcagcggctatgcctcgtgtccccgctcggcgtcgaggcgcagacagcgggtcggcgcatgcccggcagggcgacgcgccgccggacccgtcctccgaccccggcctcgccgcactacacgcgcgcggccgcgcttccgccgctcctcttcgagcagcagctgcgcgtgctccgctggctcggaccgctgggcgcgcacctgctgtggcaatacgtgaacgcgtcgttctcgcgcgtgccgggccgcgagttccacaggtacacgtttgccctgctgcaccgcctcgcgctgcgcccgttgccgcgcaagctgttcaccggtctcttcaccaacgcgctgctcgcgcgcgacccgctgctggactcgctagcggagctaaaggtcccgaatgtgcagctgctctacggcgaccacgactggatggacgcgcgtgcgggccgggccctggtcgcggagctcaacgctctgcgcggccgcccggacgcctccttagccatagtccccgctgccggccacaatctcttcctcgacaaccctgaggacttccactcctggctcttggattttctacgtgtatag

SEQ ID NO: 19050 - protein, 384 aa, Ashbya gossypii
MAHNTNGGPVALRILRRLLNAVPADQQASGFILWLQNRGQNGSAQVERWQTALMEPLGAAGRESVVGGLHQWYFANAGAPIRTPTVLLHGYASSAVSFHRNLAALGAQVEQLYALDLPGNGMSQELPLGPAAARALARRCGARADIRALADYYLDALERWRAANGLETLNAAGHSFGGYLAFKYALRHPARVQRLCLVSPLGVEAQTAGRRMPGRATRRRTRPPTPASPHYTRAAALPPLLFEQQLRVLRWLGPLGAHLLWQYVNASFSRVPGREFHRYTFALLHRLALRPLPRKLFTGLFTNALLARDPLLDSLAELKVPNVQLLYGDHDWMDARAGRALVAELNALRGRPDASLAIVPAAGHNLFLDNPEDFHSWLLDFLRV

SEQ ID NO: 19051 - DNA, 1602 bp, Neurospora crassa
  CDS (1)..(1602)
atgtcggcttccgacaccactcttcctccttcctcgtcgcgggcaacgcagacaaaggccgagaaggattcaaaggctcgcggcgccggctctgccttttttcctcttggttacaaggaagccgcacaacaatggtggtccagcgtaaccgctcgccaagccgagcgcaacgtcctctccttcatccccttcctccgcgaagccaccgccgataacgcttccacagcctctcaactttccgatctcgccaacgccgacccattcggccaccgcgtatggcgtcaaaccatggtccctctttccggcaaagaccgagccctgaacgagttctcgatcgagcgagtcggcgagcaagtcgacgacaccctcgtcatgctgcacggctacggcgccggcctcggctttttctacaagaactacgagccgctcagccgcgttcccggctggaagctctactccctcgacatgctcggcatgggcaactctgcgcgcccaccgttcaagatccacgccaaggaccaacagggcaagatccgcgaggccgaggcctggtttattgatgcgttggaggagtggcgaaaagcccgcaagatcgagcgcttcacgctcatgggtcattcgttgggtggctacctggccgtctcgtatgcgctcaagtaccccggccgtctgaacaagctgatcctcgcctcgcctgcgggtatcccggaggacccgtgggccgttaacgccgcgatgccggagcctgaagagtccgcgtacggcaacgagtttacgcaggaccaggaaagcatcgtcaacagggagacgcccgagggaggggctaatacggctttcatccaggctgatcccaaggataagaaagctgtcgcctcatcagccgggaaacccaacaacaacaataacaacggcaccaacaccaaaaaggacacagccccaccccgccgtcccattcccggctggatctcctggctctgggacgccaatgtttcccccttctccatcgtgcgcatgaccggccctctcggtccccgcttcgtctcgggctggacctctcgccggttcaaccacctccctcccgacgaaaaagaagcccttcacacatattcctactcgcttttccgccaaaagggttcaggcgaatacgtcctcccctacctcctcgccccgggtgcgtttgctcggtcccccgtgatcaaccgtatccaagacgtcggccgccaaataatcgctcaacccccctcctcgggttctactccagaacaaccggcagcagctccagtccgtgaagcaggtttccccatcgtcttcctctacggtgaaaacgactggatggacgttgcgggcgggtacgcggctgaagagaaaatcagaaagagggtggagcaggccttgactgaccagacccgaaccgaagaagaaaggaagagggagaacggcagtgccaaggtggtggtgattaggagggcgggacatcatttgtatatcgacaacccggacgagtttaatgaggttgtcatgaaagagttggaggagacgaaggagtggggaaggaggatgagggcggaagggttgctgccacctatgccggttgagaaataa

SEQ ID NO: 19052 - protein, 533 aa, Neurospora crassa
MSASDTTLPPSSSRATQTKAEKDSKARGAGSAFFPLGYKEAAQQWWSSVTARQAERNVLSFIPFLREATADNASTASQLSDLANADPFGHRVWRQTMVPLSGKDRALNEFSIERVGEQVDDTLVMLHGYGAGLGFFYKNYEPLSRVPGWKLYSLDMLGMGNSARPPFKIHAKDQQGKIREAEAWFIDALEEWRKARKIERFTLMGHSLGGYLAVSYALKYPGRLNKLILASPAGIPEDPWAVNAAMPEPEESAYGNEFTQDQESIVNRETPEGGANTAFIQADPKDKKAVASSAGKPNNNNNNGTNTKKDTAPPRRPIPGWISWLWDANVSPFSIVRMTGPLGPRFVSGWTSRRFNHLPPDEKEALHTYSYSLFRQKGSGEYVLPYLLAPGAFARSPVINRIQDVGRQIIAQPPSSGSTPEQPAAAPVREAGFPIVFLYGENDWMDVAGGYAAEEKIRKRVEQALTDQTRTEEERKRENGSAKVVVIRRAGHHLYIDNPDEFNEVVMKELEETKEWGRRMRAEGLLPPMPVEK

SEQ ID NO: 19053 - DNA, 1080 bp, Caenorhabditis elegans
  CDS (1)..(1080)
atgtcaatttttgaatatacttggtacttatcttggattccttccaggtttccatacttttcgtgtccatcgaaaagtcagcggttagctgaagcagaaggacggatactttcagcacttggcatcaaatatctggctagacttattcagattccattcaaaaacactgaaatcagtacgataactgtcaactgtgaaagtgagcagcccattgtgaaggcgaaatatccgattgtcttgattcatggatttggagcaggagttgcgttgtggggttctgcgatcaagcgtcttgctcaatttcagacagttcacgcttttgatctaccaggattcggtagatcatctcgccccaaattctcatcagacccagaaactgccgaaactgaaatgatcgactcaatcgaacaatggagagataaaatgaacttggagaagatgaacctggttggtcattcattcggaggatacctagccacatcctacgctctgaagtatcctaaaagagtcgagaatctcatacttgccgatccttggggcttcaatgagatggatccagaattcgcgcaaaaactcactagtcgtcagaaaaacattttttgggtcattcaacagttcaatccactggcggttctgagacttgttggaggatatggaccatctctcgtgagacgtcttcgtccagatcttgcactgaagtactctgaagacgtgtatgactacatttacttggcaaactccagggatccaacgggagaagaggttttcaagtgtttatcggaaaacttgggatgggctaagcaaccaatgagcaagaggttccacgaacttgacaacaccgttccagtcacatttattcacggagagcgcagttggattgactggagaacaacgagaagattgttcggagagctcgagcacgtcgagtcacatatcatggacagtgctggtcatcatgtctacgcagatgatgccgacaaatttgtgcaactcgtgataggatctttaaaggacgggaagacgggagagctggtgccagaggaagtgaacttggaagaagaaatcgtgacaccgatttag

SEQ ID NO: 19054 - protein, 359 aa, Caenorhabditis elegans
MSIFEYTWYLSWIPSRFPYFSCPSKSQRLAEAEGRILSALGIKYLARLIQIPFKNTEISTITVNCESEQPIVKAKYPIVLIHGFGAGVALWGSAIKRLAQFQTVHAFDLPGFGRSSRPKFSSDPETAETEMIDSIEQWRDKMNLEKMNLVGHSFGGYLATSYALKYPKRVENLILADPWGFNEMDPEFAQKLTSRQKNIFWVIQQFNPLAVLRLVGGYGPSLVRRLRPDLALKYSEDVYDYIYLANSRDPTGEEVFKCLSENLGWAKQPMSKRFHELDNTVPVTFIHGERSWIDWRTTRRLFGELEHVESHIMDSAGHHVYADDADKFVQLVIGSLKDGKTGELVPEEVNLEEEIVTPI

SEQ ID NO: 19055 - DNA, 1029 bp, Mus musculus
  CDS (1)..(1029)
atggctgatgatctggagcagcagcctcagggctggctgagtagctggctccccacttggcgccccacttccatgtctcaactgaagaatgtggaagccaggatcctccagtgtctccagaacaagttcctggcccgttatgtatccctcccaaaccagaacaagatctggacggtgactgtgagcccagaacaaaaggatcgcacccctctggtgatggtacatggctttgggggcggtgtgggcctctggatcctcaacatggattcactgagtgcccgccgcacacttcatacctttgatctgcttggttttgggcgaagctcaaggccaacattcccaagggacccagaaggagctgaagatgagtttgtggcctcaatagagacatggcgggagaccatgggaatccccaccatgatcctcctggggcacagtttgggaggattcctggccacttcttactctatcaagtaccctgaaagagttaaacatcttatcctggtggatccatggggctttcccctacgaccaactgaccctagtgagatccgtgcacctccaacctgggtcaaggctgtggcatctgtcctgggacgttccaatccactggctgttcttcgagtggctgggccttgggggcctgggctggtgcagagattccgtccagacttcaagcgcaagtttgcagacttctttgaggatgacaccatctcggaatacatctaccactgcaatgcacagaatcccagtggggaaacggcattcaaagccatgatggagtcctttggctgggcccggcgccccatgttggagcgaatccacttaattcgaaaagatgtgcccatcaccatgatctatggggccaacacctggatagataccagcacagggaagaaggtgaagatgcaaaggccggattcctacgtccgagacatggagatcgagggcgcatcccaccacgtctatgctgaccagccacacatcttcaatgctgtggtagaagagatctgcaactcagttgactga

SEQ ID NO: 19056 - protein, 342 aa, Mus musculus
MADDLEQQPQGWLSSWLPTWRPTSMSQLKNVEARILQCLQNKFLARYVSLPNQNKIWTVTVSPEQKDRTPLVMVHGFGGGVGLWILNMDSLSARRTLHTFDLLGFGRSSRPTFPRDPEGAEDEFVASIETWRETMGIPTMILLGHSLGGFLATSYSIKYPERVKHLILVDPWGFPLRPTDPSEIRAPPTWVKAVASVLGRSNPLAVLRVAGPWGPGLVQRFRPDFKRKFADFFEDDTISEYIYHCNAQNPSGETAFKAMMESFGWARRPMLERIHLIRKDVPITMIYGANTWIDTSTGKKVKMQRPDSYVRDMEIEGASHHVYADQPHIFNAVVEEICNSVD

SEQ ID NO: 19057 - DNA, 1029 bp, Homo sapiens
  CDS (1)..(1029)
atggccgatgatctggagcagcagtctcaaggctggctgagtagctggctgcccacgtggcgccccacttccatgtctcagctgaagaatgtggaagccaggatcctccagtgtctccagaataagttcctggccagatatgtatccctcccaaaccagaataagatctggacggtgactgtgagccccgagcaaaacgaccgcacccccttggtgatggtgcatggttttgggggcggcgtgggtctctggatcctcaacatggactcactgagtgcccgccgcacactgcacaccttcgatctgcttggcttcgggcgaagctcaaggccagcattcccaagggacccggagggggctgaggatgagtttgtgacatcgatagagacatggcgggagaccatggggatccccagcatgatcctcctggggcacagtttgggaggattcctggccacttcttactcaatcaagtaccctgatagagttaaacacctcatcctggtggacccatggggctttcccctccgaccaactaaccccagtgggatctgtgcacccccagcctgggtcaaagccgtggcatctgtcctaggacgttccaatccattggctgttcttcgagtagctgggccctgggggcctggtctggtgcagcgattccggccggacttcaaacgcaagtttgcagacttctttgaagatgataccatatcagagtatatttaccactgcaacgcacagaatcccagtggtgagacagcattcaaagccatgatggagtcctttggctgggcccggcgccctatgctggagcgaattcacttgattcgaaaagatgtgcctatcactatgatctacgggtccgacacctggatagataccagtacgggaaaaaaggtgaagatgcagcggccggattcctatgtccgagacatggagattaagggtgcctcccaccatgtctatgctgaccagccacacatcttcaatgctgtggtggaggagatctgcgactcagttgattga

SEQ ID NO: 19058 - protein, 342 aa, Homo sapiens
MADDLEQQSQGWLSSWLPTWRPTSMSQLKNVEARILQCLQNKFLARYVSLPNQNKIWTVTVSPEQNDRTPLVMVHGFGGGVGLWILNMDSLSARRTLHTFDLLGFGRSSRPAFPRDPEGAEDEFVTSIETWRETMGIPSMILLGHSLGGFLATSYSIKYPDRVKHLILVDPWGFPLRPTNPSGICAPPAWVKAVASVLGRSNPLAVLRVAGPWGPGLVQRFRPDFKRKFADFFEDDTISEYIYHCNAQNPSGETAFKAMMESFGWARRPMLERIHLIRKDVPITMIYGSDTWIDTSTGKKVKMQRPDSYVRDMEIKGASHHVYADQPHIFNAVVEEICDSVD

SEQ ID NO: 19059 - DNA, 1328 bp, Homo sapiens
  CDS (7)..(1056)
gcggctatggcggcggaggaggaggaggtggactctgccgacaccggagagaggtcaggatggctaactggttggctccccacatggtgccctacgtctatatcacaccttaaagaagctgaagagaagatgttaaaatgtgtgccttgcacatacaaaaaagaacctgttcgtatatctaatggaaataaaatatggacactgaagttctctcataatatttcaaataagactccacttgtccttctccatggttttggaggaggtcttgggctctgggcactgaattttggagatctttgcaccaacagacctgtctatgcttttgacctattgggttttggacgaagtagtagacccaggtttgacagtgatgcagaagaagtggagaatcagtttgtggaatccattgaagagtggagatgtgccctaggattggacaaaatgatcttgcttgggcacaacctaggtggattcttggctgctgcttactcgctgaagtacccatcaagggttaatcatctcattttagtggagccttggggtttccctgaacgaccagaccttgctgatcaagacagaccaattccagtttggatcagagccttgggagcagcattgactccctttaaccctttagctggcctaaggattgcaggaccctttggtttaagtctagtgcagcgtttaaggcctgatttcaaacgaaagtattcttcaatgttcgaagacgatactgtgacagaatacatctaccactgtaatgtgcagactccaagtggtgagacagcttcaaagaatatgactattccttatggatgggcaaaaaggccaatgctccagcgaattggtaaaatgcaccctgacattccagtttcagtgatctttggcgcccgatcctgcatagatggcaattctggcaccagcatccagtccttacgaccacattcatatgtgaagacaatagctattcttggggcaggacattatgtatatgcagatcaaccagaagaattcaaccagaaagtaaaggagatctgcgacactgtggactgaacacactgaagctctgatgggaaaacctggtgactgatatagttgttcagcaataattcatagtctgtgatgaagagtagtgaatacaacacacaaccaggcagccttcttgactatactttgcacatgttttctttaggaattcactcacacatttaaaccagttagtgccttctagaagaatggctttcctttctcctacacaaaattgaaatatacaagtctctaaatataatacctttaaataaaaggttatttgtccctctgaaaaa

SEQ ID NO: 19060 - protein, 349 aa, Homo sapiens
MAAEEEEVDSADTGERSGWLTGWLPTWCPTSISHLKEAEEKMLKCVPCTYKKEPVRISNGNKIWTLKFSHNISNKTPLVLLHGFGGGLGLWALNFGDLCTNRPVYAFDLLGFGRSSRPRFDSDAEEVENQFVESIEEWRCALGLDKMILLGHNLGGFLAAAYSLKYPSRVNHLILVEPWGFPERPDLADQDRPIPVWIRALGAALTPFNPLAGLRIAGPFGLSLVQRLRPDFKRKYSSMFEDDTVTEYIYHCNVQTPSGETASKNMTIPYGWAKRPMLQRIGKMHPDIPVSVIFGARSCIDGNSGTSIQSLRPHSYVKTIAILGAGHYVYADQPEEFNQKVKEICDTVD

SEQ ID NO: 19061 - DNA, 25 bp, Artificial sequence
  Primer sequence
atgtggacaaacactttcaaatggt

SEQ ID NO: 19062 - DNA, 25 bp, Artificial sequence
  Primer sequence
ttactttgacaggaacgagactaaa

SEQ ID NO: 19063 - protein, 474 aa, Artificial sequence
  Consensus
  Variant (9)..(12): Xaa in position 9 to 12 is any amino acid
  Variant (14)..(19): Xaa in position 14 to 19 is any amino acid
  Variant (21)..(29): Xaa in position 21 to 29 is any amino acid
  Variant (30)..(35): Xaa in position 30 to 35 is any or no amino acid
  Variant (38)..(38): Xaa in position 38 is any amino acid
  Variant (40)..(40): Xaa in position 40 is any amino acid
  Variant (42)..(42): Xaa in position 42 is any amino acid
  Variant (44)..(55): Xaa in position 44 to 55 is any amino acid
  Variant (56)..(108): Xaa in position 56 to 108 is any or no amino acid
  Variant (110)..(111): Xaa in position 110 to 111 is any amino acid
  Variant (114)..(115): Xaa in position 114 to 115 is any amino acid
  Variant (118)..(118): Xaa in position 118 is any amino acid
  Variant (121)..(124): Xaa in position 121 to 124 is any amino acid
  Variant (126)..(129): Xaa in position 126 to 129 is any amino acid
  Variant (130)..(134): Xaa in position 130 to 134 is any or no amino acid
  Variant (140)..(140): Xaa in position 140 is any amino acid
  Variant (145)..(147): Xaa in position 145 to 147 is any amino acid
  Variant (149)..(149): Xaa in position 149 is any amino acid
  Variant (153)..(164): Xaa in position 153 to 164 is any or no amino acid
  Variant (166)..(167): Xaa in position 166 to 167 is any amino acid
  Variant (169)..(170): Xaa in position 169 to 170 is any amino acid
  Variant (172)..(172): Xaa in position 172 is any amino acid
  Variant (174)..(175): Xaa in position 174 to 175 is any amino acid
  Variant (177)..(177): Xaa in position 177 is any amino acid
  Variant (179)..(205): Xaa in position 179 to 205 is any amino acid
  Variant (206)..(279): Xaa in position 206 to 279 is any or no amino acid
  Variant (282)..(283): Xaa in position 282 to 283 is any amino acid
  Variant (286)..(286): Xaa in position 286 is any amino acid
  Variant (287)..(287): Xaa in position 287 is any or no amino acid
  Variant (289)..(290): Xaa in position 289 to 290 is any amino acid
  Variant (292)..(324): Xaa in position 292 to 324 is any amino acid
  Variant (325)..(354): Xaa in position 325 to 354 is any or no amino acid
  Variant (356)..(362): Xaa in position 356 to 362 is any amino acid
  Variant (364)..(364): Xaa in position 364 is any amino acid
  Variant (367)..(379): Xaa in position 367 to 379 is any amino acid
  Variant (380)..(405): Xaa in position 380 to 405 is any or no amino acid
  Variant (409)..(411): Xaa in position 409 to 411 is any amino acid
  Variant (414)..(417): Xaa in position 414 to 417 is any amino acid
  Variant (419)..(427): Xaa in position 419 to 427 is any amino acid
  Variant (428)..(454): Xaa in position 428 to 454 is any or no amino acid
  Variant (456)..(457): Xaa in position 456 to 457 is any or no amino acid
  Variant (461)..(461): Xaa in position 461 is any amino acid
  Variant (464)..(464): Xaa in position 464 is any amino acid
  Variant (467)..(469): Xaa in position 467 to 469 is any amino acid
  Variant (471)..(473): Xaa in position 471 to 473 is any amino acid
VLIHGYGAXXXXFXXXXXXLXXXXXXXXXXXXXXXDLXGXGXSXXXXXXXXXXXXXXXXXXXXXXXXXXXXXXXXXXXXXXXXXXXXXXXXXXXXXXXXXXXXXXXXXEXXFIXXIEXWRXXXXLXXXXXXXXXLVGHSXGGYLXXXYXLKYXXXXXXXXXXXXPXXVXXLXLXXPXGXXXXXXXXXXXXXXXXXXXXXXXXXXXXXXXXXXXXXXXXXXXXXXXXXXXXXXXXXXXXXXXXXXXXXXXXXXXXXXXXXXXXXXXXXXXXXXXXXXXXXLRXXGPXXGXXLXXXXXXXXXXXXXXXXXXXXXXXXXXXXXXXXXXXXXXXXXXXXXXXXXXXXXXXXXXXXXXXLXXXXXXXRXPLXXXXXXXXXXXXXXXXXXXXXXXXXXXXXXXXXXXXXXXIYGXXXWMXXXXGXXXXXXXXXXXXXXXXXXXXXXXXXXXXXXXXXXXXIXXAGHXLYXDNXXXFXXXV

SEQ ID NO: 19064 - protein, 9 aa, Artificial sequence
  Consensus
  Variant (2)..(2): Xaa in position 2 is any or no amino acid
  Variant (4)..(4): Xaa in position 4 is any or no amino acid
  Variant (6)..(6): Xaa in position 6 is any amino acid
  Variant (8)..(8): Xaa in position 8 is any amino acid
DXLXGXGXS

SEQ ID NO: 19065 - protein, 26 aa, Artificial sequence
  Consensus
  Variant (3)..(3): Xaa in position 3 is Phe or Tyr
  Variant (4)..(4): Xaa in position 4 is any amino acid
  Variant (5)..(5): Xaa in position 5 is Ala, Ser or Thr
  Variant (6)..(7): Xaa in position 6 to 7 is any amino acid
  Variant (9)..(9): Xaa in position 9 is any amino acid
  Variant (10)..(10): Xaa in position 10 is Phe, Ile, Leu, Met or Val
  Variant (11)..(11): Xaa in position 11 is any amino acid
  Variant (12)..(12): Xaa in position 12 is His or Tyr
  Variant (13)..(13): Xaa in position 13 is Asn or Pro
  Variant (14)..(18): Xaa in position 14 to 18 is any amino acid
  Variant (19)..(19): Xaa in position 19 is Ala or Leu
  Variant (20)..(23): Xaa in position 20 to 23 is any amino acid
  Variant (24)..(24): Xaa in position 24 is Pro, Gln or Ser
  Variant (25)..(25): Xaa in position 25 is any amino acid
  Variant (26)..(26): Xaa in position 26 is Ala, Gly or Ile
GGXXXXXYXXXXXXXXXXXXXXXXXX

SEQ ID NO: 19066 - protein, 12 aa, Artificial sequence
  Consensus
  Variant (3)..(3): Xaa in position 3 is Ala, Asp, Glu, Gln or Ser
  Variant (4)..(4): Xaa in position 4 is any amino acid
  Variant (5)..(5): Xaa in position 5 is Asp, Ser or Thr
  Variant (6)..(6): Xaa in position 6 is any amino acid
  Variant (7)..(7): Xaa in position 7 is Ile, Met or Val
  Variant (8)..(8): Xaa in position 8 is Asp or Asn
  Variant (9)..(10): Xaa in position 9 to 10 is any amino acid
  Variant (11)..(11): Xaa in position 11 is Ala, Gly, Ser or Thr
  Variant (12)..(12): Xaa in position 12 is Ala or Gly
YGXXXXXXXXXX

SEQ ID NO: 19067 - protein, 13 aa, Artificial sequence
  Consensus
  Variant (2)..(2): Xaa in position 2 is any or no amino acid
  Variant (4)..(4): Xaa in position 4 is any amino acid
  Variant (5)..(5): Xaa in position 5 is Ile, Leu or Val
  Variant (6)..(6): Xaa in position 6 is Phe or Tyr
  Variant (7)..(7): Xaa in position 7 is any amino acid
  Variant (9)..(9): Xaa in position 9 is Asp, Asn or Gln
  Variant (10)..(12): Xaa in position 10 to 12 is any amino acid
GXHXXXXDXXXXF

SEQ ID NO: 19068 - DNA, 1818 bp, Escherichia coli; identical to SEQ ID NO: 13510
  CDS (1)..(1818)

SEQ ID NO: 19069 - protein, 605 aa, Escherichia coli; identical to SEQ ID NO: 13511

SEQ ID NO: 19070 - DNA, 1665 bp, Mesorhizobium loti MAFF303099; identical to SEQ ID NO: 13512
  CDS (1)..(1665): transl_table=11

SEQ ID NO: 19071 - protein, 554 aa, Mesorhizobium loti MAFF303099; identical to SEQ ID NO: 13513

SEQ ID NO: 19072 - DNA, 1635 bp, Mesorhizobium loti MAFF303099; identical to SEQ ID NO: 13514
  CDS (1)..(1635): transl_table=11

SEQ ID NO: 19073 - protein, 544 aa, Mesorhizobium loti MAFF303099; identical to SEQ ID NO: 13515

SEQ ID NO: 19074 - DNA, 1851 bp, Thermoplasma volcanium GSS1; identical to SEQ ID NO: 13516
  CDS (1)..(1851): transl_table=11

SEQ ID NO: 19075 - protein, 616 aa, Thermoplasma volcanium GSS1; identical to SEQ ID NO: 13517

SEQ ID NO: 19076 - DNA, 1422 bp, Thermotoga maritima MSB8; identical to SEQ ID NO: 13518
  CDS (1)..(1422): transl_table=11

SEQ ID NO: 19077 - protein, 473 aa, Thermotoga maritima MSB8; identical to SEQ ID NO: 13519

SEQ ID NO: 19078 - DNA, 1671 bp, Thermotoga maritima MSB8; identical to SEQ ID NO: 13520
  CDS (1)..(1671): transl_table=11

SEQ ID NO: 19079 - protein, 556 aa, Thermotoga maritima MSB8; identical to SEQ ID NO: 13521

SEQ ID NO: 19080 - DNA, 1737 bp, Bacillus halodurans C-125; identical to SEQ ID NO: 13522
  CDS (1)..(1737): transl_table=11

SEQ ID NO: 19081 - protein, 578 aa, Bacillus halodurans C-125; identical to SEQ ID NO: 13523

SEQ ID NO: 19082 - DNA, 1704 bp, Streptococcus pyogenes M1 GAS; identical to SEQ ID NO: 13524
  CDS (1)..(1704): transl_table=11

SEQ ID NO: 19083 - protein, 567 aa, Streptococcus pyogenes M1 GAS; identical to SEQ ID NO: 13525

SEQ ID NO: 19084 - DNA, 1614 bp, Streptococcus pyogenes M1 GAS; identical to SEQ ID NO: 13526
  CDS (1)..(1614): transl_table=11

SEQ ID NO: 19085 - protein, 537 aa, Streptococcus pyogenes M1 GAS; identical to SEQ ID NO: 13527

SEQ ID NO: 19086 - DNA, 1974 bp, Deinococcus radiodurans R1; identical to SEQ ID NO: 13528
  CDS (1)..(1974): transl_table=11

SEQ ID NO: 19087 - protein, 657 aa, Deinococcus radiodurans R1; identical to SEQ ID NO: 13529

SEQ ID NO: 19088 - DNA, 1497 bp, Deinococcus radiodurans R1; identical to SEQ ID NO: 13530
  CDS (1)..(1497): transl_table=11

SEQ ID NO: 19089 - protein, 498 aa, Deinococcus radiodurans R1; identical to SEQ ID NO: 13531

SEQ ID NO: 19090 - DNA, 1695 bp, Deinococcus radiodurans R1; identical to SEQ ID NO: 13532
  CDS (1)..(1695): transl_table=11

SEQ ID NO: 19091 - protein, 564 aa, Deinococcus radiodurans R1; identical to SEQ ID NO: 13533

SEQ ID NO: 19092 - DNA, 1452 bp, Deinococcus radiodurans R1; identical to SEQ ID NO: 13534
  CDS (1)..(1452): transl_table=11

SEQ ID NO: 19093 - protein, 483 aa, Deinococcus radiodurans R1; identical to SEQ ID NO: 13535

SEQ ID NO: 19094 - DNA, 1659 bp, Deinococcus radiodurans R1; identical to SEQ ID NO: 13536
  CDS (1)..(1659): transl_table=11

SEQ ID NO: 19095 - protein, 552 aa, Deinococcus radiodurans R1; identical to SEQ ID NO: 13537

SEQ ID NO: 19096 - DNA, 1824 bp, Mycoplasma pulmonis UAB CTIP; identical to SEQ ID NO: 13538
  CDS (1)..(1824): transl_table=4

SEQ ID NO: 19097 - protein, 607 aa, Mycoplasma pulmonis UAB CTIP; identical to SEQ ID NO: 13539

SEQ ID NO: 19098 - DNA, 1806 bp, Mycobacterium tuberculosis CDC1551; identical to SEQ ID NO: 13540
  CDS (1)..(1806): transl_table=11

SEQ ID NO: 19099 - protein, 601 aa, Mycobacterium tuberculosis CDC1551; identical to SEQ ID NO: 13541

SEQ ID NO: 19100 - DNA, 1641 bp, Mycobacterium tuberculosis CDC1551; identical to SEQ ID NO: 13542
  CDS (1)..(1641): transl_table=11

SEQ ID NO: 19101 - protein, 546 aa, Mycobacterium tuberculosis CDC1551; identical to SEQ ID NO: 13543

SEQ ID NO: 19102 - DNA, 1356 bp, Clostridium acetobutylicum ATCC 824; identical to SEQ ID NO: 13544
  CDS (1)..(1356): transl_table=11

SEQ ID NO: 19103 - protein, 451 aa, Clostridium acetobutylicum ATCC 824; identical to SEQ ID NO: 13545

SEQ ID NO: 19104 - DNA, 1785 bp, Agrobacterium tumefaciens str. C58; identical to SEQ ID NO: 13546
  CDS (1)..(1785): transl_table=11

SEQ ID NO: 19105 - protein, 594 aa, Agrobacterium tumefaciens str. C58; identical to SEQ ID NO: 13547

SEQ ID NO: 19106 - DNA, 1608 bp, Streptococcus pneumoniae R6; identical to SEQ ID NO: 13548
  CDS (1)..(1608): transl_table=11

SEQ ID NO: 19107 - protein, 535 aa, Streptococcus pneumoniae R6; identical to SEQ ID NO: 13549

SEQ ID NO: 19108 - DNA, 1764 bp, Streptococcus pneumoniae R6; identical to SEQ ID NO: 13550
  CDS (1)..(1764): transl_table=11

SEQ ID NO: 19109 - protein, 587 aa, Streptococcus pneumoniae R6; identical to SEQ ID NO: 13551

SEQ ID NO: 19110 - DNA, 1851 bp, Thermoplasma acidophilum DSM 1728; identical to SEQ ID NO: 13552
  CDS (1)..(1851): transl_table=11

SEQ ID NO: 19111 - protein, 616 aa, Thermoplasma acidophilum DSM 1728; identical to SEQ ID NO: 13553

SEQ ID NO: 19112 - DNA, 1527 bp, Synechocystis sp. PCC 6803; identical to SEQ ID NO: 13554
  CDS (1)..(1527): transl_table=11

SEQ ID NO: 19113 - protein, 508 aa, Synechocystis sp. PCC 6803; identical to SEQ ID NO: 13555

SEQ ID NO: 19114 - DNA, 1818 bp, Salmonella typhimurium LT2; identical to SEQ ID NO: 13556
  CDS (1)..(1818): transl_table=11

SEQ ID NO: 19115 - protein, 605 aa, Salmonella typhimurium LT2; identical to SEQ ID NO: 13557

SEQ ID NO: 19116 - DNA, 1662 bp, Listeria monocytogenes EGD-e; identical to SEQ ID NO: 13558
  CDS (1)..(1662): transl_table=11

SEQ ID NO: 19117 - protein, 553 aa, Listeria monocytogenes EGD-e; identical to SEQ ID NO: 13559

SEQ ID NO: 19118 - DNA, 1776 bp, Listeria monocytogenes EGD-e; identical to SEQ ID NO: 13560
  CDS (1)..(1776): transl_table=11

SEQ ID NO: 19119 - protein, 591 aa, Listeria monocytogenes EGD-e; identical to SEQ ID NO: 13561

SEQ ID NO: 19120 - DNA, 1467 bp, Nostoc sp. PCC 7120; identical to SEQ ID NO: 13562
  CDS (1)..(1467): transl_table=11

SEQ ID NO: 19121 - protein, 488 aa, Nostoc sp. PCC 7120; identical to SEQ ID NO: 13563

SEQ ID NO: 19122 - DNA, 3483 bp, Ralstonia solanacearum GMI1000; identical to SEQ ID NO: 13564
  CDS (1)..(3483): transl_table=11

SEQ ID NO: 19123 - protein, 1160 aa, Ralstonia solanacearum GMI1000; identical to SEQ ID NO: 13565

SEQ ID NO: 19124 - DNA, 1821 bp, Clostridium perfringens str. 13; identical to SEQ ID NO: 13566
  CDS (1)..(1821): transl_table=11

SEQ ID NO: 19125 - protein, 606 aa, Clostridium perfringens str. 13; identical to SEQ ID NO: 13567

SEQ ID NO: 19126 - DNA, 1665 bp, Clostridium perfringens str. 13; identical to SEQ ID NO: 13568
  CDS (1)..(1665): transl_table=11

SEQ ID NO: 19127 - protein, 554 aa, Clostridium perfringens str. 13; identical to SEQ ID NO: 13569

SEQ ID NO: 19128 - DNA, 1833 bp, Clostridium perfringens str. 13; identical to SEQ ID NO: 13570
  CDS (1)..(1833): transl_table=11

SEQ ID NO: 19129 - protein, 610 aa, Clostridium perfringens str. 13; identical to SEQ ID NO: 13571

SEQ ID NO: 19130 - DNA, 1938 bp, Pyrococcus furiosus DSM 3638; identical to SEQ ID NO: 13572
  CDS (1)..(1938): transl_table=11

SEQ ID NO: 19131 - protein, 645 aa, Pyrococcus furiosus DSM 3638; identical to SEQ ID NO: 13573

SEQ ID NO: 19132 - DNA, 1614 bp, Streptococcus pyogenes MGAS8232; identical to SEQ ID NO: 13574
  CDS (1)..(1614): transl_table=11

SEQ ID NO: 19133 - protein, 537 aa, Streptococcus pyogenes MGAS8232; identical to SEQ ID NO: 13575

SEQ ID NO: 19134 - DNA, 1725 bp, Thermoanaerobacter tengcongensis MB4; identical to SEQ ID NO: 13576
  CDS (1)..(1725): transl_table=11

SEQ ID NO: 19135 - protein, 574 aa, Thermoanaerobacter tengcongensis MB4; identical to SEQ ID NO: 13577

SEQ ID NO: 19136 - DNA, 1575 bp, Thermoanaerobacter tengcongensis MB4; identical to SEQ ID NO: 13578
  CDS (1)..(1575): transl_table=11

SEQ ID NO: 19137 - protein, 524 aa, Thermoanaerobacter tengcongensis MB4; identical to SEQ ID NO: 13579

SEQ ID NO: 19138 - DNA, 1719 bp, Streptomyces coelicolor A3(2); identical to SEQ ID NO: 13580
  CDS (1)..(1719)

SEQ ID NO: 19139 - protein, 572 aa, Streptomyces coelicolor A3(2); identical to SEQ ID NO: 13581

SEQ ID NO: 19140 - DNA, 3351 bp, Xanthomonas campestris pv. campestris str. ATCC 33913; identical to SEQ ID NO: 13582
  CDS (1)..(3351): transl_table=11

SEQ ID NO: 19141 - protein, 1116 aa, Xanthomonas campestris pv. campestris str. ATCC 33913; identical to SEQ ID NO: 13583

SEQ ID NO: 19142 - DNA, 1617 bp, Xanthomonas campestris pv. campestris str. ATCC 33913; identical to SEQ ID NO: 13584
  CDS (1)..(1617): transl_table=11

SEQ ID NO: 19143 - protein, 538 aa, Xanthomonas campestris pv. campestris str. ATCC 33913; identical to SEQ ID NO: 13585

SEQ ID NO: 19144 - DNA, 1617 bp, Xanthomonas axonopodis pv. citri str. 306; identical to SEQ ID NO: 13586
  CDS (1)..(1617): transl_table=11

SEQ ID NO: 19145 - protein, 538 aa, Xanthomonas axonopodis pv. citri str. 306; identical to SEQ ID NO: 13587

SEQ ID NO: 19146 - DNA, 3327 bp, Chlorobium tepidum TLS; identical to SEQ ID NO: 13588
  CDS (1)..(3327): transl_table=11

SEQ ID NO: 19147 - protein, 1108 aa, Chlorobium tepidum TLS; identical to SEQ ID NO: 13589

SEQ ID NO: 19148 - DNA, 1668 bp, Yersinia pestis KIM; identical to SEQ ID NO: 13590
  CDS (1)..(1668): transl_table=11

SEQ ID NO: 19149 - protein, 555 aa, Yersinia pestis KIM; identical to SEQ ID NO: 13591

SEQ ID NO: 19150 - DNA, 1830 bp, Yersinia pestis KIM; identical to SEQ ID NO: 13592
  CDS (1)..(1830): transl_table=11

SEQ ID NO: 19151 - protein, 609 aa, Yersinia pestis KIM; identical to SEQ ID NO: 13593

SEQ ID NO: 19152 - DNA, 1608 bp, Streptococcus agalactiae 2603V/R; identical to SEQ ID NO: 13594
  CDS (1)..(1608): transl_table=11

SEQ ID NO: 19153 - protein, 535 aa, Streptococcus agalactiae 2603V/R; identical to SEQ ID NO: 13595

SEQ ID NO: 19154 - DNA, 1497 bp, Oceanobacillus iheyensis HTE831; identical to SEQ ID NO: 13596
  CDS (1)..(1497): transl_table=11

SEQ ID NO: 19155 - protein, 498 aa, Oceanobacillus iheyensis HTE831; identical to SEQ ID NO: 13597

SEQ ID NO: 19156 - DNA, 1752 bp, Oceanobacillus iheyensis HTE831; identical to SEQ ID NO: 13598
  CDS (1)..(1752): transl_table=11

SEQ ID NO: 19157 - protein, 583 aa, Oceanobacillus iheyensis HTE831; identical to SEQ ID NO: 13599

SEQ ID NO: 19158 - DNA, 1398 bp, Bifidobacterium longum NCC2705; identical to SEQ ID NO: 13600
  CDS (1)..(1398): transl_table=11

SEQ ID NO: 19159 - protein, 465 aa, Bifidobacterium longum NCC2705; identical to SEQ ID NO: 13601

SEQ ID NO: 19160 - DNA, 1818 bp, Shigella flexneri 2a str. 301; identical to SEQ ID NO: 13602
  CDS (1)..(1818): transl_table=11

SEQ ID NO: 19161 - protein, 605 aa, Shigella flexneri 2a str. 301; identical to SEQ ID NO: 13603

SEQ ID NO: 19162 - DNA, 1746 bp, Leptospira interrogans serovar Lai str. 56601; identical to SEQ ID NO: 13604
  CDS (1)..(1746): transl_table=11

SEQ ID NO: 19163 - protein, 581 aa, Leptospira interrogans serovar Lai str. 56601; identical to SEQ ID NO: 13605

SEQ ID NO: 19164 - DNA, 1839 bp, Corynebacterium efficiens YS-314; identical to SEQ ID NO: 13606
  CDS (1)..(1839): transl_table=11

SEQ ID NO: 19165 - protein, 612 aa, Corynebacterium efficiens YS-314; identical to SEQ ID NO: 13607

SEQ ID NO: 19166 - DNA, 1839 bp, Vibrio vulnificus CMCP6; identical to SEQ ID NO: 13608
  CDS (1)..(1839): transl_table=11

SEQ ID NO: 19167 - protein, 612 aa, Vibrio vulnificus CMCP6; identical to SEQ ID NO: 13609

SEQ ID NO: 19168 - DNA, 2064 bp, Vibrio vulnificus CMCP6; identical to SEQ ID NO: 13610
  CDS (1)..(2064): transl_table=11

SEQ ID NO: 19169 - protein, 687 aa, Vibrio vulnificus CMCP6; identical to SEQ ID NO: 13611

SEQ ID NO: 19170 - DNA, 1464 bp, Bradyrhizobium japonicum USDA 110; identical to SEQ ID NO: 13612
  CDS (1)..(1464)

SEQ ID NO: 19171 - protein, 487 aa, Bradyrhizobium japonicum USDA 110; identical to SEQ ID NO: 13613

SEQ ID NO: 19172 - DNA, 1698 bp, Bradyrhizobium japonicum USDA 110; identical to SEQ ID NO: 13614
  CDS (1)..(1698)

SEQ ID NO: 19173 - protein, 565 aa, Bradyrhizobium japonicum USDA 110; identical to SEQ ID NO: 13615

SEQ ID NO: 19174 - DNA, 1626 bp, Lactobacillus plantarum WCFS1; identical to SEQ ID NO: 13616
  CDS (1)..(1626): transl_table=11

SEQ ID NO: 19175 - protein, 541 aa, Lactobacillus plantarum WCFS1; identical to SEQ ID NO: 13617

SEQ ID NO: 19176 - DNA, 1827 bp, Vibrio parahaemolyticus RIMD 2210633; identical to SEQ ID NO: 13618
  CDS (1)..(1827): transl_table=11

SEQ ID NO: 19177 - protein, 608 aa, Vibrio parahaemolyticus RIMD 2210633; identical to SEQ ID NO: 13619

SEQ ID NO: 19178 - DNA, 1818 bp, Salmonella enterica subsp. enterica serovar Typhi Ty2; identical to SEQ ID NO: 13620
  CDS (1)..(1818): transl_table=11

SEQ ID NO: 19179 - protein, 605 aa, Salmonella enterica subsp. enterica serovar Typhi Ty2; identical to SEQ ID NO: 13621

SEQ ID NO: 19180 - DNA, 2079 bp, Bacteroides thetaiotaomicron VPI-5482; identical to SEQ ID NO: 13622
  CDS (1)..(2079): transl_table=11

SEQ ID NO: 19181 - protein, 692 aa, Bacteroides thetaiotaomicron VPI-5482; identical to SEQ ID NO: 13623

SEQ ID NO: 19182 - DNA, 1854 bp, Bacteroides thetaiotaomicron VPI-5482; identical to SEQ ID NO: 13624
  CDS (1)..(1854): transl_table=11

SEQ ID NO: 19183 - protein, 617 aa, Bacteroides thetaiotaomicron VPI-5482; identical to SEQ ID NO: 13625

SEQ ID NO: 19184 - DNA, 1767 bp, Enterococcus faecalis V583; identical to SEQ ID NO: 13626
  CDS (1)..(1767): transl_table=11

SEQ ID NO: 19185 - protein, 588 aa, Enterococcus faecalis V583; identical to SEQ ID NO: 13627

SEQ ID NO: 19186 - DNA, 1614 bp, Enterococcus faecalis V583; identical to SEQ ID NO: 13628
  CDS (1)..(1614): transl_table=11

SEQ ID NO: 19187 - protein, 537 aa, Enterococcus faecalis V583; identical to SEQ ID NO: 13629

SEQ ID NO: 19188 - DNA, 1674 bp, Enterococcus faecalis V583; identical to SEQ ID NO: 13630
  CDS (1)..(1674): transl_table=11

SEQ ID NO: 19189 - protein, 557 aa, Enterococcus faecalis V583; identical to SEQ ID NO: 13631

SEQ ID NO: 19190 - DNA, 1719 bp, Streptomyces avermitilis MA-4680; identical to SEQ ID NO: 13632
  CDS (1)..(1719)

SEQ ID NO: 19191 - protein, 572 aa, Streptomyces avermitilis MA-4680; identical to SEQ ID NO: 13633

SEQ ID NO: 19192 - DNA, 1752 bp, Streptomyces avermitilis MA-4680; identical to SEQ ID NO: 13634
  CDS (1)..(1752)

SEQ ID NO: 19193 - protein, 583 aa, Streptomyces avermitilis MA-4680; identical to SEQ ID NO: 13635

SEQ ID NO: 19194 - DNA, 1665 bp, Bacillus anthracis str. Ames; identical to SEQ ID NO: 13636
  CDS (1)..(1665): transl_table=11

SEQ ID NO: 19195 - protein, 554 aa, Bacillus anthracis str. Ames; identical to SEQ ID NO: 13637

SEQ ID NO: 19196 - DNA, 1761 bp, Bacillus anthracis str. Ames; identical to SEQ ID NO: 13638
  CDS (1)..(1761): transl_table=11

SEQ ID NO: 19197 - protein, 586 aa, Bacillus anthracis str. Ames; identical to SEQ ID NO: 13639

SEQ ID NO: 19198 - DNA, 1641 bp, Mycobacterium bovis AF2122/97; identical to SEQ ID NO: 13640
  CDS (1)..(1641): transl_table=11

SEQ ID NO: 19199 - protein, 546 aa, Mycobacterium bovis AF2122/97; identical to SEQ ID NO: 13641

SEQ ID NO: 19200 - DNA, 1761 bp, Rhodopirellula baltica SH 1; identical to SEQ ID NO: 13642
  CDS (1)..(1761): transl_table=11

SEQ ID NO: 19201 - protein, 586 aa, Rhodopirellula baltica SH 1; identical to SEQ ID NO: 13643

SEQ ID NO: 19202 - DNA, 3342 bp, Bordetella pertussis Tohama I; identical to SEQ ID NO: 13644
  CDS (1)..(3342): transl_table=11

SEQ ID NO: 19203 - protein, 1113 aa, Bordetella pertussis Tohama I; identical to SEQ ID NO: 13645

SEQ ID NO: 19204 - DNA, 3342 bp, Bordetella bronchiseptica RB50; identical to SEQ ID NO: 13646
  CDS (1)..(3342)

SEQ ID NO: 19205 - protein, 1113 aa, Bordetella bronchiseptica RB50; identical to SEQ ID NO: 13647

SEQ ID NO: 19206 - DNA, 1452 bp, Prochlorococcus marinus str. MIT 9313; identical to SEQ ID NO: 13648
  CDS (1)..(1452): transl_table=11

SEQ ID NO: 19207 - protein, 483 aa, Prochlorococcus marinus str. MIT 9313; identical to SEQ ID NO: 13649

SEQ ID NO: 19208 - DNA, 1407 bp, Synechococcus sp. WH 8102; identical to SEQ ID NO: 13650
  CDS (1)..(1407): transl_table=11

SEQ ID NO: 19209 - protein, 468 aa, Synechococcus sp. WH 8102; identical to SEQ ID NO: 13651

SEQ ID NO: 19210 - DNA, 1662 bp, Synechococcus sp. WH 8102; identical to SEQ ID NO: 13652
  CDS (1)..(1662): transl_table=11

SEQ ID NO: 19211 - protein, 553 aa, Synechococcus sp. WH 8102; identical to SEQ ID NO: 13653

SEQ ID NO: 19212 - DNA, 1863 bp, Gloeobacter violaceus PCC 7421; identical to SEQ ID NO: 13654
  CDS (1)..(1863): transl_table=11

SEQ ID NO: 19213 - protein, 620 aa, Gloeobacter violaceus PCC 7421; identical to SEQ ID NO: 13655

SEQ ID NO: 19214 - DNA, 1443 bp, Gloeobacter violaceus PCC 7421; identical to SEQ ID NO: 13656
  CDS (1)..(1443): transl_table=11

SEQ ID NO: 19215 - protein, 480 aa, Gloeobacter violaceus PCC 7421; identical to SEQ ID NO: 13657

SEQ ID NO: 19216 - DNA, 1635 bp, Vibrio vulnificus YJ016; identical to SEQ ID NO: 13658
  CDS (1)..(1635): transl_table=11

SEQ ID NO: 19217 - protein, 544 aa, Vibrio vulnificus YJ016; identical to SEQ ID NO: 13659

SEQ ID NO: 19218 - DNA, 3303 bp, Rhodopseudomonas palustris CGA009; identical to SEQ ID NO: 13660
  CDS (1)..(3303): transl_table=11

SEQ ID NO: 19219 - protein, 1100 aa, Rhodopseudomonas palustris CGA009; identical to SEQ ID NO: 13661

SEQ ID NO: 19220 - DNA, 1617 bp, Rhodopseudomonas palustris CGA009; identical to SEQ ID NO: 13662
  CDS (1)..(1617): transl_table=11

SEQ ID NO: 19221 - protein, 538 aa, Rhodopseudomonas palustris CGA009; identical to SEQ ID NO: 13663

SEQ ID NO: 19222 - DNA, 3336 bp, Geobacter sulfurreducens PCA; identical to SEQ ID NO: 13664
  CDS (1)..(3336): transl_table=11

SEQ ID NO: 19223 - protein, 1111 aa, Geobacter sulfurreducens PCA; identical to SEQ ID NO: 13665

SEQ ID NO: 19224 - DNA, 1335 bp, Mycobacterium avium subsp. paratuberculosis str. k10; identical to SEQ ID NO: 13666
  CDS (1)..(1335): transl_table=11

SEQ ID NO: 19225 - protein, 444 aa, Mycobacterium avium subsp. paratuberculosis str. k10; identical to SEQ ID NO: 13667

SEQ ID NO: 19226 - DNA, 1773 bp, Mycobacterium avium subsp. paratuberculosis str. k10; identical to SEQ ID NO: 13668
  CDS (1)..(1773): transl_table=11

SEQ ID NO: 19227 - protein, 590 aa, Mycobacterium avium subsp. paratuberculosis str. k10; identical to SEQ ID NO: 13669

SEQ ID NO: 19228 - DNA, 1725 bp, Lactobacillus johnsonii NCC 533; identical to SEQ ID NO: 13670
  CDS (1)..(1725): transl_table=11

SEQ ID NO: 19229 - protein, 574 aa, Lactobacillus johnsonii NCC 533; identical to SEQ ID NO: 13671

SEQ ID NO: 19230 - DNA, 1668 bp, Lactobacillus johnsonii NCC 533; identical to SEQ ID NO: 13672
  CDS (1)..(1668): transl_table=11

SEQ ID NO: 19231 - protein, 555 aa, Lactobacillus johnsonii NCC 533; identical to SEQ ID NO: 13673

SEQ ID NO: 19232 - DNA, 1665 bp, Bacillus cereus ATCC 10987; identical to SEQ ID NO: 13674
  CDS (1)..(1665): transl_table=11

SEQ ID NO: 19233 - protein, 554 aa, Bacillus cereus ATCC 10987; identical to SEQ ID NO: 13675

SEQ ID NO: 19234 - DNA, 1710 bp, Anopheles gambiae str. PEST; identical to SEQ ID NO: 13676
  CDS (1)..(1710)

SEQ ID NO: 19235 - protein, 569 aa, Anopheles gambiae str. PEST; identical to SEQ ID NO: 13677

SEQ ID NO: 19236 - DNA, 1800 bp, Anopheles gambiae str. PEST; identical to SEQ ID NO: 13678
  CDS (1)..(1800)

SEQ ID NO: 19237 - protein, 599 aa, Anopheles gambiae str. PEST; identical to SEQ ID NO: 13679

SEQ ID NO: 19238 - DNA, 1509 bp, Anopheles gambiae str. PEST; identical to SEQ ID NO: 13680
  CDS (1)..(1509)

SEQ ID NO: 19239 - protein, 502 aa, Anopheles gambiae str. PEST; identical to SEQ ID NO: 13681

SEQ ID NO: 19240 - DNA, 1716 bp, Gibberella zeae PH-1; identical to SEQ ID NO: 13682
  CDS (1)..(1716)

SEQ ID NO: 19241 - protein, 571 aa, Gibberella zeae PH-1; identical to SEQ ID NO: 13683

SEQ ID NO: 19242 - DNA, 1635 bp, Leptospira interrogans serovar Copenhageni str. Fiocruz L1-130; identical to SEQ ID NO: 13684
  CDS (1)..(1635): transl_table=11

SEQ ID NO: 19243 - protein, 544 aa, Leptospira interrogans serovar Copenhageni str. Fiocruz L1-130; identical to SEQ ID NO: 13685

SEQ ID NO: 19244 - DNA, 1251 bp, Thermus thermophilus HB27; identical to SEQ ID NO: 13686
  CDS (1)..(1251): transl_table=11

SEQ ID NO: 19245 - protein, 416 aa, Thermus thermophilus HB27 [sequence omitted]

SEQ ID NO: 19246 - DNA, 1662 bp, Listeria monocytogenes str. 4b F2365; identical to SEQ ID NO: 13688
  CDS (1)..(1662): transl_table=11

SEQ ID NO: 19247 - protein, 553 aa, Listeria monocytogenes str. 4b F2365; identical to SEQ ID NO: 13689

SEQ ID NO: 19248 - DNA, 1533 bp, Listeria monocytogenes str. 4b F2365; identical to SEQ ID NO: 13690
  CDS (1)..(1533): transl_table=11

SEQ ID NO: 19249 - protein, 510 aa, Listeria monocytogenes str. 4b F2365; identical to SEQ ID NO: 13691

SEQ ID NO: 19250 - DNA, 1761 bp, Bacillus thuringiensis serovar konkukian str. 97-27; identical to SEQ ID NO: 13692
  CDS (1)..(1761): transl_table=11

SEQ ID NO: 19251 - protein, 586 aa, Bacillus thuringiensis serovar konkukian str. 97-27; identical to SEQ ID NO: 13693

SEQ ID NO: 19252 - DNA, 1710 bp, Leifsonia xyli subsp. xyli str. CTCB07; identical to SEQ ID NO: 13694
  CDS (1)..(1710): transl_table=11

SEQ ID NO: 19253 - protein, 569 aa, Leifsonia xyli subsp. xyli str. CTCB07; identical to SEQ ID NO: 13695

SEQ ID NO: 19254 - DNA, 1683 bp, Bacillus licheniformis ATCC 14580; identical to SEQ ID NO: 13696
  CDS (1)..(1683): transl_table=11

SEQ ID NO: 19255 - protein, 560 aa, Bacillus licheniformis ATCC 14580; identical to SEQ ID NO: 13697

SEQ ID NO: 19256 - DNA, 1764 bp, Bacillus licheniformis ATCC 14580; identical to SEQ ID NO: 13698
  CDS (1)..(1764): transl_table=11

SEQ ID NO: 19257 - protein, 587 aa, Bacillus licheniformis ATCC 14580; identical to SEQ ID NO: 13699

SEQ ID NO: 19258 - DNA, 1620 bp, Methylococcus capsulatus str. Bath; identical to SEQ ID NO: 13700
  CDS (1)..(1620): transl_table=11

SEQ ID NO: 19259 - protein, 539 aa, Methylococcus capsulatus str. Bath; identical to SEQ ID NO: 13701

SEQ ID NO: 19260 - DNA, 1866 bp, Photobacterium profundum SS9; identical to SEQ ID NO: 13702
  CDS (1)..(1866): transl_table=11

SEQ ID NO: 19261 - protein, 621 aa, Photobacterium profundum SS9; identical to SEQ ID NO: 13703

SEQ ID NO: 19262 - DNA, 1656 bp, Thermus thermophilus HB8; identical to SEQ ID NO: 13704
  CDS (1)..(1656): transl_table=11

SEQ ID NO: 19263 - protein, 551 aa, Thermus thermophilus HB8; identical to SEQ ID NO: 13705

SEQ ID NO: 19264 - DNA, 1767 bp, Geobacillus kaustophilus HTA426; identical to SEQ ID NO: 13706
  CDS (1)..(1767): transl_table=11

SEQ ID NO: 19265 - protein, 588 aa, Geobacillus kaustophilus HTA426; identical to SEQ ID NO: 13707

SEQ ID NO: 19266 - DNA, 1542 bp, Geobacillus kaustophilus HTA426; identical to SEQ ID NO: 13708
  CDS (1)..(1542): transl_table=11

SEQ ID NO: 19267 - protein, 513 aa, Geobacillus kaustophilus HTA426; identical to SEQ ID NO: 13709

SEQ ID NO: 19268 - DNA, 4983 bp, Geobacillus kaustophilus HTA426; identical to SEQ ID NO: 13710
  CDS (1)..(4983): transl_table=11

SEQ ID NO: 19269 - protein, 1660 aa, Geobacillus kaustophilus HTA426; identical to SEQ ID NO: 13711

SEQ ID NO: 19270 - DNA, 1689 bp, Azoarcus sp. EbN1; identical to SEQ ID NO: 13712
  CDS (1)..(1689): transl_table=11

SEQ ID NO: 19271 - protein, 562 aa, Azoarcus sp. EbN1; identical to SEQ ID NO: 13713

SEQ ID NO: 19272 - DNA, 1770 bp, Bacillus clausii KSM-K16; identical to SEQ ID NO: 13714
  CDS (1)..(1770): transl_table=11

SEQ ID NO: 19273 - protein, 589 aa, Bacillus clausii KSM-K16; identical to SEQ ID NO: 13715

SEQ ID NO: 19274 - DNA, 2298 bp, Thermococcus kodakarensis KOD1; identical to SEQ ID NO: 13716
  CDS (1)..(2298): transl_table=11

SEQ ID NO: 19275 - protein, 765 aa, Thermococcus kodakarensis KOD1; identical to SEQ ID NO: 13717

SEQ ID NO: 19276 - DNA, 2724 bp, Xanthomonas oryzae pv. oryzae KACC10331; identical to SEQ ID NO: 13718
  CDS (1)..(2724): transl_table=11

SEQ ID NO: 19277 - protein, 907 aa, Xanthomonas oryzae pv. oryzae KACC10331; identical to SEQ ID NO: 13719

SEQ ID NO: 19278 - DNA, 1260 bp, Vibrio fischeri ES114; identical to SEQ ID NO: 13720
  CDS (1)..(1260): transl_table=11

SEQ ID NO: 19279 - protein, 419 aa, Vibrio fischeri ES114; identical to SEQ ID NO: 13721

SEQ ID NO: 19280 - DNA, 1815 bp, Corynebacterium glutamicum ATCC 13032; identical to SEQ ID NO: 13722
  CDS (1)..(1815): transl_table=11

SEQ ID NO: 19281 - protein, 604 aa, Corynebacterium glutamicum ATCC 13032; identical to SEQ ID NO: 13723

SEQ ID NO: 19282 - DNA, 3327 bp, Pseudomonas syringae pv. syringae B728a; identical to SEQ ID NO: 13724
  CDS (1)..(3327)

SEQ ID NO: 19283 - protein, 1108 aa, Pseudomonas syringae pv. syringae B728a; identical to SEQ ID NO: 13725

SEQ ID NO: 19284 - DNA, 1659 bp, Lactobacillus gasseri; identical to SEQ ID NO: 13726
  CDS (1)..(1659)

SEQ ID NO: 19285 - protein, 552 aa, Lactobacillus gasseri; identical to SEQ ID NO: 13727

SEQ ID NO: 19286 - DNA, 1467 bp, Nostoc punctiforme PCC 73102; identical to SEQ ID NO: 13728
  CDS (1)..(1467)

SEQ ID NO: 19287 - protein, 488 aa, Nostoc punctiforme PCC 73102; identical to SEQ ID NO: 13729

SEQ ID NO: 19288 - DNA, 1674 bp, Nostoc punctiforme PCC 73102; identical to SEQ ID NO: 13730
  CDS (1)..(1674)

SEQ ID NO: 19289 - protein, 557 aa, Nostoc punctiforme PCC 73102; identical to SEQ ID NO: 13731

SEQ ID NO: 19290 - DNA, 1266 bp, Bifidobacterium longum DJO10A; identical to SEQ ID NO: 13732
  CDS (1)..(1266)

SEQ ID NO: 19291 - protein, 421 aa, Bifidobacterium longum DJO10A; identical to SEQ ID NO: 13733

SEQ ID NO: 19292 - DNA, 3333 bp, Desulfovibrio desulfuricans G20; identical to SEQ ID NO: 13734
  CDS (1)..(3333)

SEQ ID NO: 19293 - protein, 1110 aa, Desulfovibrio desulfuricans G20; identical to SEQ ID NO: 13735

SEQ ID NO: 19294 - DNA, 1467 bp, Anabaena variabilis ATCC 29413; identical to SEQ ID NO: 13736
  CDS (1)..(1467)

SEQ ID NO: 19295 - protein, 488 aa, Anabaena variabilis ATCC 29413; identical to SEQ ID NO: 13737

SEQ ID NO: 19296 - DNA, 3366 bp, Ralstonia eutropha JMP134; identical to SEQ ID NO: 13738
  CDS (1)..(3366)

SEQ ID NO: 19297 - protein, 1121 aa, Ralstonia eutropha JMP134; identical to SEQ ID NO: 13739

SEQ ID NO: 19298 - DNA, 2586 bp, Rhodobacter sphaeroides 2.4.1; identical to SEQ ID NO: 13740
  CDS (1)..(2586)

SEQ ID NO: 19299 - protein, 861 aa, Rhodobacter sphaeroides 2.4.1; identical to SEQ ID NO: 13741

SEQ ID NO: 19300 - DNA, 3417 bp, Burkholderia cepacia R18194; identical to SEQ ID NO: 13742
  CDS (1)..(3417)

SEQ ID NO: 19301 - protein, 1138 aa, Burkholderia cepacia R18194; identical to SEQ ID NO: 13743

SEQ ID NO: 19302 - DNA, 1776 bp, Listeria monocytogenes str. 4b H7858; identical to SEQ ID NO: 13744
  CDS (1)..(1776): transl_table=11

SEQ ID NO: 19303 - protein, 591 aa, Listeria monocytogenes str. 4b H7858; identical to SEQ ID NO: 13745

SEQ ID NO: 19304 - DNA, 1533 bp, Listeria monocytogenes str. 1/2a F6854; identical to SEQ ID NO: 13746
  CDS (1)..(1533): transl_table=11

SEQ ID NO: 19305 - protein, 510 aa, Listeria monocytogenes str. 1/2a F6854; identical to SEQ ID NO: 13747

SEQ ID NO: 19306 - DNA, 1662 bp, Listeria monocytogenes str. 1/2a F6854; identical to SEQ ID NO: 13748
  CDS (1)..(1662): transl_table=11

SEQ ID NO: 19307 - protein, 553 aa, Listeria monocytogenes str. 1/2a F6854; identical to SEQ ID NO: 13749

SEQ ID NO: 19308 - DNA, 3342 bp, Pseudomonas fluorescens PfO-1; identical to SEQ ID NO: 13750
  CDS (1)..(3342)

SEQ ID NO: 19309 - protein, 1113 aa, Pseudomonas fluorescens PfO-1; identical to SEQ ID NO: 13751

SEQ ID NO: 19310 - DNA, 1629 bp, Rhodospirillum rubrum; identical to SEQ ID NO: 13752
  CDS (1)..(1629)

SEQ ID NO: 19311 - protein, 542 aa, Rhodospirillum rubrum; identical to SEQ ID NO: 13753

SEQ ID NO: 19312 - DNA, 3303 bp, Rhodospirillum rubrum; identical to SEQ ID NO: 13754
  CDS (1)..(3303)

SEQ ID NO: 19313 - protein, 1100 aa, Rhodospirillum rubrum; identical to SEQ ID NO: 13755

SEQ ID NO: 19314 - DNA, 3465 bp, Burkholderia fungorum LB400; identical to SEQ ID NO: 13756
  CDS (1)..(3465)

SEQ ID NO: 19315 - protein, 1154 aa, Burkholderia fungorum LB400; identical to SEQ ID NO: 13757

SEQ ID NO: 19316 - DNA, 1821 bp, Thermobifida fusca; identical to SEQ ID NO: 13758
  CDS (1)..(1821)

SEQ ID NO: 19317 - protein, 606 aa, Thermobifida fusca; identical to SEQ ID NO: 13759

SEQ ID NO: 19318 - DNA, 1563 bp, Microbulbifer degradans 2-40; identical to SEQ ID NO: 13760
  CDS (1)..(1563)

SEQ ID NO: 19319 - protein, 520 aa, Microbulbifer degradans 2-40; identical to SEQ ID NO: 13761

SEQ ID NO: 19320 - DNA, 1671 bp, Oenococcus oeni PSU-1; identical to SEQ ID NO: 13762
  CDS (1)..(1671)

SEQ ID NO: 19321 - protein, 556 aa, Oenococcus oeni PSU-1; identical to SEQ ID NO: 13763

SEQ ID NO: 19322 - DNA, 1482 bp, Trichodesmium erythraeum IMS101; identical to SEQ ID NO: 13764
  CDS (1)..(1482)

SEQ ID NO: 19323 - protein, 493 aa, Trichodesmium erythraeum IMS101; identical to SEQ ID NO: 13765

SEQ ID NO: 19324 - DNA, 3288 bp, Thiobacillus denitrificans ATCC 25259; identical to SEQ ID NO: 13766
  CDS (1)..(3288)

SEQ ID NO: 19325 - protein, 1095 aa, Thiobacillus denitrificans ATCC 25259; identical to SEQ ID NO: 13767

SEQ ID NO: 19326 - DNA, 1815 bp, Chloroflexus aurantiacus; identical to SEQ ID NO: 13768
  CDS (1)..(1815)

SEQ ID NO: 19327 - protein, 604 aa, Chloroflexus aurantiacus; identical to SEQ ID NO: 13769

SEQ ID NO: 19328 - DNA, 4140 bp, Chloroflexus aurantiacus; identical to SEQ ID NO: 13770
  CDS (1)..(4140)

SEQ ID NO: 19329 - protein, 1379 aa, Chloroflexus aurantiacus; identical to SEQ ID NO: 13771

SEQ ID NO: 19330 - DNA, 3363 bp, Chloroflexus aurantiacus; identical to SEQ ID NO: 13772
  CDS (1)..(3363)

SEQ ID NO: 19331 - protein, 1120 aa, Chloroflexus aurantiacus; identical to SEQ ID NO: 13773

SEQ ID NO: 19332 - DNA, 1803 bp, Lactococcus lactis subsp. cremoris SK11; identical to SEQ ID NO: 13774
  CDS (1)..(1803)

SEQ ID NO: 19333 - protein, 600 aa, Lactococcus lactis subsp. cremoris SK11; identical to SEQ ID NO: 13775

SEQ ID NO: 19334 - DNA, 1755 bp, Lactococcus lactis subsp. cremoris SK11; identical to SEQ ID NO: 13776
  CDS (1)..(1755)

SEQ ID NO: 19335 - protein, 584 aa, Lactococcus lactis subsp. cremoris SK11; identical to SEQ ID NO: 13777

SEQ ID NO: 19336 - DNA, 1695 bp, Lactobacillus casei ATCC 334; identical to SEQ ID NO: 13778
  CDS (1)..(1695)

SEQ ID NO: 19337 - protein, 564 aa, Lactobacillus casei ATCC 334; identical to SEQ ID NO: 13779

SEQ ID NO: 19338 - DNA, 1779 bp, Lactobacillus casei ATCC 334; identical to SEQ ID NO: 13780
  CDS (1)..(1779)

SEQ ID NO: 19339 - protein, 592 aa, Lactobacillus casei ATCC 334; identical to SEQ ID NO: 13781

SEQ ID NO: 19340 - DNA, 1668 bp, Lactobacillus casei ATCC 334; identical to SEQ ID NO: 13782
  CDS (1)..(1668)

SEQ ID NO: 19341 - protein, 555 aa, Lactobacillus casei ATCC 334; identical to SEQ ID NO: 13783

SEQ ID NO: 19342 - DNA, 570 bp, Lactobacillus delbrueckii subsp. bulgaricus ATCC BAA-365; identical to SEQ ID NO: 13784
  CDS (1)..(570)

SEQ ID NO: 19343 - protein, 189 aa, Lactobacillus delbrueckii subsp. bulgaricus ATCC BAA-365; identical to SEQ ID NO: 13785

SEQ ID NO: 19344 - DNA, 1827 bp, Deinococcus geothermalis DSM 11300; identical to SEQ ID NO: 13786
  CDS (1)..(1827): transl_table=11

SEQ ID NO: 19345 - protein, 608 aa, Deinococcus geothermalis DSM 11300; identical to SEQ ID NO: 13787

SEQ ID NO: 19346 - DNA, 1491 bp, Deinococcus geothermalis DSM 11300; identical to SEQ ID NO: 13788
  CDS (1)..(1491): transl_table=11

SEQ ID NO: 19347 - protein, 496 aa, Deinococcus geothermalis DSM 11300; identical to SEQ ID NO: 13789

SEQ ID NO: 19348 - DNA, 2097 bp, Deinococcus geothermalis DSM 11300; identical to SEQ ID NO: 13790
  CDS (1)..(2097): transl_table=11

SEQ ID NO: 19349 - protein, 698 aa, Deinococcus geothermalis DSM 11300; identical to SEQ ID NO: 13791

SEQ ID NO: 19350 - DNA, 1662 bp, Anaeromyxobacter dehalogenans 2CP-C; identical to SEQ ID NO: 13792
  CDS (1)..(1662): transl_table=11

SEQ ID NO: 19351 - protein, 553 aa, Anaeromyxobacter dehalogenans 2CP-C; identical to SEQ ID NO: 13793

SEQ ID NO: 19352 - DNA, 1638 bp, Anaeromyxobacter dehalogenans 2CP-C; identical to SEQ ID NO: 13794
  CDS (1)..(1638): transl_table=11

SEQ ID NO: 19353 - protein, 545 aa, Anaeromyxobacter dehalogenans 2CP-C; identical to SEQ ID NO: 13795

SEQ ID NO: 19354 - DNA, 1602 bp, Anaeromyxobacter dehalogenans 2CP-C; identical to SEQ ID NO: 13796
  CDS (1)..(1602): transl_table=11

SEQ ID NO: 19355 - protein, 533 aa, Anaeromyxobacter dehalogenans 2CP-C; identical to SEQ ID NO: 13797

SEQ ID NO: 19356 - DNA, 1188 bp, Streptococcus pneumoniae TIGR4; identical to SEQ ID NO: 13798
  CDS (1)..(1188)

SEQ ID NO: 19357 - protein, 395 aa, Streptococcus pneumoniae TIGR4; identical to SEQ ID NO: 13799

SEQ ID NO: 19358 - DNA, 1407 bp, Arthrobacter sp. FB24; identical to SEQ ID NO: 13800
  CDS (1)..(1407): transl_table=11

SEQ ID NO: 19359 - protein, 468 aa, Arthrobacter sp. FB24; identical to SEQ ID NO: 13801

SEQ ID NO: 19360 - DNA, 1968 bp, Arthrobacter sp. FB24; identical to SEQ ID NO: 13802
  CDS (1)..(1968): transl_table=11

SEQ ID NO: 19361 - protein, 655 aa, Arthrobacter sp. FB24; identical to SEQ ID NO: 13803

SEQ ID NO: 19362 - DNA, 1797 bp, Arthrobacter sp. FB24; identical to SEQ ID NO: 13804
  CDS (1)..(1797): transl_table=11

SEQ ID NO: 19363 - protein, 598 aa, Arthrobacter sp. FB24; identical to SEQ ID NO: 13805

SEQ ID NO: 19364 - DNA, 3327 bp, Azotobacter vinelandii AvOP; identical to SEQ ID NO: 13806
  CDS (1)..(3327): transl_table=11

SEQ ID NO: 19365 - protein, 1108 aa, Azotobacter vinelandii AvOP; identical to SEQ ID NO: 13807

SEQ ID NO: 19366 - DNA, 3414 bp, Burkholderia vietnamiensis G4; identical to SEQ ID NO: 13808
  CDS (1)..(3414): transl_table=11

SEQ ID NO: 19367 - protein, 1137 aa, Burkholderia vietnamiensis G4; identical to SEQ ID NO: 13809

SEQ ID NO: 19368 - DNA, 3414 bp, Burkholderia cenocepacia HI2424; identical to SEQ ID NO: 13810
  CDS (1)..(3414): transl_table=11

SEQ ID NO: 19369 - protein, 1137 aa, Burkholderia cenocepacia HI2424; identical to SEQ ID NO: 13811

SEQ ID NO: 19370 - DNA, 1614 bp, Chromohalobacter salexigens DSM 3043; identical to SEQ ID NO: 13812
  CDS (1)..(1614): transl_table=11

SEQ ID NO: 19371 - protein, 537 aa, Chromohalobacter salexigens DSM 3043; identical to SEQ ID NO: 13813

SEQ ID NO: 19372 - DNA, 3396 bp, Burkholderia pseudomallei S13; identical to SEQ ID NO: 13814
  CDS (1)..(3396)

SEQ ID NO: 19373 - protein, 1131 aa, Burkholderia pseudomallei S13; identical to SEQ ID NO: 13815

SEQ ID NO: 19374 - DNA, 1728 bp, Clostridium thermocellum ATCC 27405; identical to SEQ ID NO: 13816
  CDS (1)..(1728): transl_table=11

SEQ ID NO: 19375 - protein, 575 aa, Clostridium thermocellum ATCC 27405; identical to SEQ ID NO: 13817

SEQ ID NO: 19376 - DNA, 1461 bp, Crocosphaera watsonii WH 8501; identical to SEQ ID NO: 13818
  CDS (1)..(1461): transl_table=11

SEQ ID NO: 19377 - protein, 486 aa, Crocosphaera watsonii WH 8501; identical to SEQ ID NO: 13819

SEQ ID NO: 19378 - DNA, 3318 bp, Chlorobium phaeobacteroides BS1; identical to SEQ ID NO: 13820
  CDS (1)..(3318): transl_table=11

SEQ ID NO: 19379 - protein, 1105 aa, Chlorobium phaeobacteroides BS1; identical to SEQ ID NO: 13821

SEQ ID NO: 19380 - DNA, 3339 bp, Geobacter metallireducens GS-15; identical to SEQ ID NO: 13822
  CDS (1)..(3339): transl_table=11

SEQ ID NO: 19381 - protein, 1112 aa, Geobacter metallireducens GS-15; identical to SEQ ID NO: 13823

SEQ ID NO: 19382 - DNA, 1785 bp, Exiguobacterium sp. 255-15; identical to SEQ ID NO: 13824
  CDS (1)..(1785): transl_table=11

SEQ ID NO: 19383 - protein, 594 aa, Exiguobacterium sp. 255-15; identical to SEQ ID NO: 13825

SEQ ID NO: 19384 - DNA, 1674 bp, Exiguobacterium sp. 255-15; identical to SEQ ID NO: 13826
  CDS (1)..(1674): transl_table=11

SEQ ID NO: 19385 - protein, 557 aa, Exiguobacterium sp. 255-15; identical to SEQ ID NO: 13827

SEQ ID NO: 19386 - DNA, 1611 bp, Exiguobacterium sp. 255-15; identical to SEQ ID NO: 13828
  CDS (1)..(1611): transl_table=11

SEQ ID NO: 19387 - protein, 536 aa, Exiguobacterium sp. 255-15; identical to SEQ ID NO: 13829

SEQ ID NO: 19388 - DNA, 1788 bp, Exiguobacterium sp. 255-15; identical to SEQ ID NO: 13830
  CDS (1)..(1788): transl_table=11

SEQ ID NO: 19389 - protein, 595 aa, Exiguobacterium sp. 255-15; identical to SEQ ID NO: 13831

SEQ ID NO: 19390 - DNA, 1803 bp, Frankia sp. CcI3; identical to SEQ ID NO: 13832
  CDS (1)..(1803): transl_table=11

SEQ ID NO: 19391 - protein, 600 aa, Frankia sp. CcI3; identical to SEQ ID NO: 13833

SEQ ID NO: 19392 - DNA, 3582 bp, Desulfitobacterium hafniense DCB-2; identical to SEQ ID NO: 13834
  CDS (1)..(3582): transl_table=11

SEQ ID NO: 19393 - protein, 1193 aa, Desulfitobacterium hafniense DCB-2; identical to SEQ ID NO: 13835

SEQ ID NO: 19394 - DNA, 1719 bp, Frankia sp. EAN1pec; identical to SEQ ID NO: 13836
  CDS (1)..(1719): transl_table=11

SEQ ID NO: 19395 - protein, 572 aa, Frankia sp. EAN1pec; identical to SEQ ID NO: 13837

SEQ ID NO: 19396 - DNA, 1761 bp, Moorella thermoacetica ATCC 39073; identical to SEQ ID NO: 13838
  CDS (1)..(1761): transl_table=11

SEQ ID NO: 19397 - protein, 586 aa, Moorella thermoacetica ATCC 39073; identical to SEQ ID NO: 13839

SEQ ID NO: 19398 - DNA, 1623 bp, Shewanella baltica OS155; identical to SEQ ID NO: 13840
  CDS (1)..(1623): transl_table=11

SEQ ID NO: 19399 - protein, 540 aa, Shewanella baltica OS155; identical to SEQ ID NO: 13841

SEQ ID NO: 19400 - DNA, 1635 bp, Shewanella amazonensis SB2B; identical to SEQ ID NO: 13842
  CDS (1)..(1635): transl_table=11

SEQ ID NO: 19401 - protein, 544 aa, Shewanella amazonensis SB2B; identical to SEQ ID NO: 13843

SEQ ID NO: 19402 - DNA, 3297 bp, Pelodictyon phaeoclathratiforme BU-1; identical to SEQ ID NO: 13844
  CDS (1)..(3297): transl_table=11

SEQ ID NO: 19403 - protein, 1098 aa, Pelodictyon phaeoclathratiforme BU-1; identical to SEQ ID NO: 13845

SEQ ID NO: 19404 - DNA, 3414 bp, Prosthecochloris aestuarii DSM 271; identical to SEQ ID NO: 13846
  CDS (1)..(3414): transl_table=11

SEQ ID NO: 19405 - protein, 1137 aa, Prosthecochloris aestuarii DSM 271; identical to SEQ ID NO: 13847

SEQ ID NO: 19406 - DNA, 1593 bp, Rubrobacter xylanophilus DSM 9941; identical to SEQ ID NO: 13848
  CDS (1)..(1593): transl_table=11

SEQ ID NO: 19407 - protein, 530 aa, Rubrobacter xylanophilus DSM 9941; identical to SEQ ID NO: 13849

SEQ ID NO: 19408 - DNA, 5328 bp, Rubrobacter xylanophilus DSM 9941; identical to SEQ ID NO: 13850
  CDS (1)..(5328): transl_table=11

SEQ ID NO: 19409 - protein, 1775 aa, Rubrobacter xylanophilus DSM 9941; identical to SEQ ID NO: 13851

SEQ ID NO: 19410 - DNA, 1755 bp, Mesorhizobium sp. BNC1; identical to SEQ ID NO: 13852
  CDS (1)..(1755): transl_table=11

SEQ ID NO: 19411 - protein, 584 aa, Mesorhizobium sp. BNC1; identical to SEQ ID NO: 13853

SEQ ID NO: 19412 - DNA, 3348 bp, Mesorhizobium sp. BNC1; identical to SEQ ID NO: 13854
  CDS (1)..(3348): transl_table=11

SEQ ID NO: 19413 - protein, 1115 aa, Mesorhizobium sp. BNC1; identical to SEQ ID NO: 13855

SEQ ID NO: 19414 - DNA, 1653 bp, Silicibacter sp. TM1040; identical to SEQ ID NO: 13856
  CDS (1)..(1653): transl_table=11

SEQ ID NO: 19415 - protein, 550 aa, Silicibacter sp. TM1040; identical to SEQ ID NO: 13857

SEQ ID NO: 19416 - DNA, 3267 bp, Nitrobacter hamburgensis X14; identical to SEQ ID NO: 13858
  CDS (1)..(3267): transl_table=11

SEQ ID NO: 19417 - protein, 1088 aa, Nitrobacter hamburgensis X14; identical to SEQ ID NO: 13859

SEQ ID NO: 19418 - DNA, 1926 bp, Shewanella denitrificans OS-217; identical to SEQ ID NO: 13860
  CDS (1)..(1926): transl_table=11

SEQ ID NO: 19419 - protein, 641 aa, Shewanella denitrificans OS-217; identical to SEQ ID NO: 13861

SEQ ID NO: 19420 - DNA, 1419 bp, Thermotoga neapolitana; identical to SEQ ID NO: 13862
  CDS (1)..(1419): transl_table=11

SEQ ID NO: 19421 - protein, 472 aa, Thermotoga neapolitana; identical to SEQ ID NO: 13863

SEQ ID NO: 19422 - DNA, 1701 bp, Bacteroides thetaiotaomicron; identical to SEQ ID NO: 13864
  CDS (1)..(1701): transl_table=11

SEQ ID NO: 19423 - protein, 566 aa, Bacteroides thetaiotaomicron; identical to SEQ ID NO: 13865

SEQ ID NO: 19424 - DNA, 3906 bp, Alicyclobacillus acidocaldarius; identical to SEQ ID NO: 13866
  CDS (1)..(3906): transl_table=11

SEQ ID NO: 19425 - protein, 1301 aa, Alicyclobacillus acidocaldarius; identical to SEQ ID NO: 13867

SEQ ID NO: 19426 - DNA, 1797 bp, Klebsiella oxytoca; identical to SEQ ID NO: 13868
  CDS (1)..(1797): transl_table=11

SEQ ID NO: 19427 - protein, 598 aa, Klebsiella oxytoca; identical to SEQ ID NO: 13869

SEQ ID NO: 19428 - DNA, 1581 bp, Bacillus sp; identical to SEQ ID NO: 13870
  CDS (1)..(1581): transl_table=11

SEQ ID NO: 19429 - protein, 526 aa, Bacillus sp; identical to SEQ ID NO: 13871

SEQ ID NO: 19430 - DNA, 1761 bp, Anoxybacillus flavithermus; identical to SEQ ID NO: 13872
  CDS (1)..(1761): transl_table=11

SEQ ID NO: 19431 - protein, 586 aa, Anoxybacillus flavithermus; identical to SEQ ID NO: 13873

SEQ ID NO: 19432 - DNA, 1749 bp, Thermoactinomyces thalpophilus; identical to SEQ ID NO: 13874
  CDS (1)..(1749): transl_table=11

SEQ ID NO: 19433 - protein, 582 aa, Thermoactinomyces thalpophilus; identical to SEQ ID NO: 13875

SEQ ID NO: 19434 - DNA, 1332 bp, Anaerobranca gottschalkii; identical to SEQ ID NO: 13876
  CDS (1)..(1332): transl_table=11

SEQ ID NO: 19435 - protein, 443 aa, Anaerobranca gottschalkii; identical to SEQ ID NO: 13877

SEQ ID NO: 19436 - DNA, 1740 bp, Aedes albopictus; identical to SEQ ID NO: 13878
  CDS (1)..(1740)

SEQ ID NO: 19437 - protein, 579 aa, Aedes albopictus; identical to SEQ ID NO: 13879

SEQ ID NO: 19438 - DNA, 1170 bp, Aeromonas hydrophila; identical to SEQ ID NO: 13880
  misc_feature (866)..(866): n is a, c, g, or t
  CDS (1)..(1170): transl_table=11

SEQ ID NO: 19439 - protein, 389 aa, Aeromonas hydrophila; identical to SEQ ID NO: 13881
  misc_feature (289)..(289): Xaa can be any naturally occuring amino acid

SEQ ID NO: 19440 - DNA, 1449 bp, Thermoactinomyces vulgaris; identical to SEQ ID NO: 13882
  CDS (1)..(1449): transl_table=11

SEQ ID NO: 19441 - protein, 482 aa, Thermoactinomyces vulgaris; identical to SEQ ID NO: 13883

SEQ ID NO: 19442 - DNA, 1581 bp, Xanthomonas campestris; identical to SEQ ID NO: 13884
  CDS (1)..(1581): transl_table=11

SEQ ID NO: 19443 - protein, 526 aa, Xanthomonas campestris; identical to SEQ ID NO: 13885

SEQ ID NO: 19444 - DNA, 3309 bp, Rhodobacter sphaeroides f; identical to SEQ ID NO: 13886
  CDS (1)..(3309): transl_table=11

SEQ ID NO: 19445 - protein, 1102 aa, Rhodobacter sphaeroides f; identical to SEQ ID NO: 13887

SEQ ID NO: 19446 - DNA, 1548 bp, Ostreococcus tauri; identical to SEQ ID NO: 13888
  CDS (1)..(1548)

SEQ ID NO: 19447 - protein, 515 aa, Ostreococcus tauri; identical to SEQ ID NO: 13889

SEQ ID NO: 19448 - DNA, 1554 bp, uncultured bacterium; identical to SEQ ID NO: 13890
  CDS (1)..(1554)

SEQ ID NO: 19449 - protein, 517 aa, uncultured bacterium; identical to SEQ ID NO: 13891

SEQ ID NO: 19450 - DNA, 2628 bp, Chlamydomonas reinhardtii; identical to SEQ ID NO: 13892
  CDS (1)..(2628)

SEQ ID NO: 19451 - protein, 875 aa, Chlamydomonas reinhardtii; identical to SEQ ID NO: 13893

SEQ ID NO: 19452 - DNA, 1962 bp, Paenibacillus sp; identical to SEQ ID NO: 13894
  CDS (1)..(1962): transl_table=11

SEQ ID NO: 19453 - protein, 653 aa, Paenibacillus sp; identical to SEQ ID NO: 13895

SEQ ID NO: 19454 - DNA, 1548 bp, Halothermothrix orenii; identical to SEQ ID NO: 13896
  CDS (1)..(1548): transl_table=11

SEQ ID NO: 19455 - protein, 515 aa, Halothermothrix orenii; identical to SEQ ID NO: 13897

SEQ ID NO: 19456 - DNA, 1533 bp, Paenibacillus sp; identical to SEQ ID NO: 13898
  CDS (1)..(1533): transl_table=11

SEQ ID NO: 19457 - protein, 510 aa, Paenibacillus sp; identical to SEQ ID NO: 13899

SEQ ID NO: 19458 - DNA, 1767 bp, Bacillus stearothermophilus; identical to SEQ ID NO: 13900
  CDS (1)..(1767): transl_table=11

SEQ ID NO: 19459 - protein, 588 aa, Bacillus stearothermophilus; identical to SEQ ID NO: 13901

SEQ ID NO: 19460 - DNA, 6057 bp, Bacillus stearothermophilus; identical to SEQ ID NO: 13902
  CDS (1)..(6057): transl_table=11

SEQ ID NO: 19461 - protein, 2018 aa, Bacillus stearothermophilus; identical to SEQ ID NO: 13903

SEQ ID NO: 19462 - DNA, 1983 bp, Thermococcus sp; identical to SEQ ID NO: 13904
  CDS (1)..(1983): transl_table=11

SEQ ID NO: 19463 - protein, 660 aa, Thermococcus sp; identical to SEQ ID NO: 13905

SEQ ID NO: 19464 - DNA, 2181 bp, Thermococcus sp; identical to SEQ ID NO: 13906
  CDS (1)..(2181)

SEQ ID NO: 19465 - protein, 726 aa, Thermococcus sp; identical to SEQ ID NO: 13907

SEQ ID NO: 19466 - DNA, 2220 bp, Thermococcus sp; identical to SEQ ID NO: 13908
  CDS (1)..(2220): transl_table=11

SEQ ID NO: 19467 - protein, 739 aa, Thermococcus sp; identical to SEQ ID NO: 13909

SEQ ID NO: 19468 - DNA, 1737 bp, Alicyclobacillus acidocaldarius; identical to SEQ ID NO: 13910
  CDS (1)..(1737): transl_table=11

SEQ ID NO: 19469 - protein, 578 aa, Alicyclobacillus acidocaldarius; identical to SEQ ID NO: 13911

SEQ ID NO: 19470 - DNA, 1548 bp, Paenibacillus polymyxa; identical to SEQ ID NO: 13912
  CDS (1)..(1548): transl_table=11

SEQ ID NO: 19471 - protein, 515 aa, Paenibacillus polymyxa; identical to SEQ ID NO: 13913

SEQ ID NO: 19472 - DNA, 1689 bp, Dictyoglomus thermophilum; identical to SEQ ID NO: 13914
  CDS (1)..(1689): transl_table=11

SEQ ID NO: 19473 - protein, 562 aa, Dictyoglomus thermophilum; identical to SEQ ID NO: 13915

SEQ ID NO: 19474 - DNA, 1497 bp, Dictyoglomus thermophilum; identical to SEQ ID NO: 13916
  CDS (1)..(1497): transl_table=11

SEQ ID NO: 19475 - protein, 498 aa, Dictyoglomus thermophilum; identical to SEQ ID NO: 13917

SEQ ID NO: 19476 - DNA, 1242 bp, Triticum aestivum; identical to SEQ ID NO: 13918
  CDS (1)..(1242)

SEQ ID NO: 19477 - protein, 413 aa, Triticum aestivum; identical to SEQ ID NO: 13919

SEQ ID NO: 19478 - DNA, 1761 bp, Bacillus acidopullulyticus; identical to SEQ ID NO: 13920
  CDS (1)..(1761): transl_table=11

SEQ ID NO: 19479 - protein, 586 aa, Bacillus acidopullulyticus; identical to SEQ ID NO: 13921

SEQ ID NO: 19480 - DNA, 1563 bp, Bacillus megaterium; identical to SEQ ID NO: 13922
  CDS (1)..(1563): transl_table=11

SEQ ID NO: 19481 - protein, 520 aa, Bacillus megaterium; identical to SEQ ID NO: 13923

SEQ ID NO: 19482 - DNA, 4428 bp, Thermoanaerobacter thermohydrosulfuricus; identical to SEQ ID NO: 13924
  CDS (1)..(4428): transl_table=11

SEQ ID NO: 19483 - protein, 1475 aa, Thermoanaerobacter thermohydrosulfuricus; identical to SEQ ID NO: 13925

SEQ ID NO: 19484 - DNA, 1776 bp, Bacillus sphaericus; identical to SEQ ID NO: 13926
  CDS (1)..(1776): transl_table=11

SEQ ID NO: 19485 - protein, 591 aa, Bacillus sphaericus; identical to SEQ ID NO: 13927

SEQ ID NO: 19486 - DNA, 1725 bp, Thermoanaerobacter ethanolicus; identical to SEQ ID NO: 13928
  CDS (1)..(1725): transl_table=11

SEQ ID NO: 19487 - protein, 574 aa, Thermoanaerobacter ethanolicus; identical to SEQ ID NO: 13929

SEQ ID NO: 19488 - DNA, 1761 bp, Drosophila virilis; identical to SEQ ID NO: 13930
  CDS (1)..(1761)

SEQ ID NO: 19489 - protein, 586 aa, Drosophila virilis; identical to SEQ ID NO: 13931

SEQ ID NO: 19490 - DNA, 1329 bp, Thermotoga neapolitana; identical to SEQ ID NO: 13932
  CDS (1)..(1329): transl_table=11

SEQ ID NO: 19491 - protein, 442 aa, Thermotoga neapolitana; identical to SEQ ID NO: 13933

SEQ ID NO: 19492 - DNA, 2001 bp, Thermoactinomyces vulgaris; identical to SEQ ID NO: 13934
  CDS (1)..(2001): transl_table=11

SEQ ID NO: 19493 - protein, 666 aa, Thermoactinomyces vulgaris; identical to SEQ ID NO: 13935

SEQ ID NO: 19494 - DNA, 1758 bp, Thermoactinomyces vulgaris; identical to SEQ ID NO: 13936
  CDS (1)..(1758): transl_table=11

SEQ ID NO: 19495 - protein, 585 aa, Thermoactinomyces vulgaris; identical to SEQ ID NO: 13937

SEQ ID NO: 19496 - DNA, 24 bp, Artificial sequence
  Primer sequence
atgatgttaaatgcatggcacctg

SEQ ID NO: 19497 - DNA, 24 bp, Artificial sequence
  Primer sequence
ttagttcatccataccgtagccga

SEQ ID NO: 19498 - protein, 917 aa, Artificial sequence; identical to SEQ ID NO: 13940
  Consensus
  Variant (2)..(2): Xaa in position 2 is any amino acid
  Variant (6)..(6): Xaa in position 6 is any amino acid
  Variant (15)..(16): Xaa in position 15 to 16 is any amino acid
  Variant (18)..(18): Xaa in position 18 is any amino acid
  Variant (22)..(22): Xaa in position 22 is any amino acid
  Variant (25)..(25): Xaa in position 25 is any amino acid
  Variant (26)..(85): Xaa in position 26 to 85 is any or no amino acid
  Variant (89)..(89): Xaa in position 89 is any amino acid
  Variant (93)..(93): Xaa in position 93 is any amino acid
  Variant (99)..(99): Xaa in position 99 is any amino acid
  Variant (101)..(108): Xaa in position 101 to 108 is any or no amino acid
  Variant (112)..(112): Xaa in position 112 is any amino acid
  Variant (117)..(117): Xaa in position 117 is any amino acid
  Variant (121)..(121): Xaa in position 121 is any amino acid
  Variant (124)..(125): Xaa in position 124 to 125 is any amino acid
  Variant (126)..(152): Xaa in position 126 to 152 is any or no amino acid
  Variant (158)..(158): Xaa in position 158 is any amino acid
  Variant (161)..(162): Xaa in position 161 to 162 is any amino acid
  Variant (166)..(166): Xaa in position 166 is any amino acid
  Variant (171)..(171): Xaa in position 171 is any amino acid
  Variant (174)..(175): Xaa in position 174 to 175 is any amino acid
  Variant (178)..(179): Xaa in position 178 to 179 is any amino acid
  Variant (182)..(182): Xaa in position 182 is any amino acid
  Variant (186)..(189): Xaa in position 186 to 189 is any or no amino acid
  Variant (195)..(195): Xaa in position 195 is any amino acid
  Variant (197)..(197): Xaa in position 197 is any amino acid
  Variant (203)..(203): Xaa in position 203 is any amino acid
  Variant (205)..(205): Xaa in position 205 is any amino acid
  Variant (208)..(208): Xaa in position 208 is any amino acid
  Variant (211)..(214): Xaa in position 211 to 214 is any amino acid
  Variant (215)..(256): Xaa in position 215 to 256 is any or no amino acid
  Variant (258)..(258): Xaa in position 258 is any or no amino acid
  Variant (266)..(266): Xaa in position 266 is any or no amino acid
  Variant (268)..(269): Xaa in position 268 to 269 is any amino acid
  Variant (270)..(394): Xaa in position 270 to 394 is any or no amino acid
  Variant (397)..(399): Xaa in position 397 to 399 is any or no amino acid
  Variant (401)..(402): Xaa in position 401 to 402 is any amino acid
  Variant (403)..(404): Xaa in position 403 to 404 is any or no amino acid
  Variant (413)..(413): Xaa in position 413 is any amino acid
  Variant (415)..(417): Xaa in position 415 to 417 is any amino acid
  Variant (420)..(420): Xaa in position 420 is any amino acid
  Variant (421)..(426): Xaa in position 421 to 426 is any or no amino acid
  Variant (433)..(433): Xaa in position 433 is any amino acid
  Variant (434)..(434): Xaa in position 434 is any or no amino acid
  Variant (436)..(441): Xaa in position 436 to 441 is any or no amino acid
  Variant (449)..(449): Xaa in position 449 is any amino acid
  Variant (451)..(452): Xaa in position 451 to 452 is any amino acid
  Variant (454)..(458): Xaa in position 454 to 458 is any amino acid
  Variant (459)..(487): Xaa in position 459 to 487 is any or no amino acid
  Variant (489)..(490): Xaa in position 489 to 490 is any amino acid
  Variant (492)..(495): Xaa in position 492 to 495 is any amino acid
  Variant (498)..(498): Xaa in position 498 is any amino acid
  Variant (504)..(509): Xaa in position 504 to 509 is any amino acid
  Variant (510)..(529): Xaa in position 510 to 529 is any or no amino acid
  Variant (532)..(534): Xaa in position 532 to 534 is any amino acid
  Variant (535)..(538): Xaa in position 535 to 538 is any or no amino acid
  Variant (540)..(544): Xaa in position 540 to 544 is any amino acid
  Variant (547)..(554): Xaa in position 547 to 554 is any amino acid
  Variant (555)..(592): Xaa in position 555 to 592 is any or no amino acid
  Variant (594)..(607): Xaa in position 594 to 607 is any amino acid
  Variant (608)..(611): Xaa in position 608 to 611 is any or no amino acid
  Variant (613)..(613): Xaa in position 613 is any amino acid
  Variant (617)..(618): Xaa in position 617 to 618 is any amino acid
  Variant (620)..(620): Xaa in position 620 is any amino acid
  Variant (623)..(623): Xaa in position 623 is any amino acid
  Variant (625)..(627): Xaa in position 625 to 627 is any amino acid
  Variant (628)..(667): Xaa in position 628 to 667 is any or no amino acid
  Variant (672)..(674): Xaa in position 672 to 674 is any amino acid
  Variant (684)..(684): Xaa in position 684 is any amino acid
  Variant (694)..(697): Xaa in position 694 to 697 is any amino acid
  Variant (698)..(737): Xaa in position 698 to 737 is any or no amino acid
  Variant (739)..(739): Xaa in position 739 is any amino acid
  Variant (740)..(740): Xaa in position 740 is any or no amino acid
  Variant (742)..(742): Xaa in position 742 is any or no amino acid
  Variant (745)..(745): Xaa in position 745 is any or no amino acid
  Variant (747)..(750): Xaa in position 747 to 750 is any amino acid
  Variant (752)..(797): Xaa in position 752 to 797 is any or no amino acid
  Variant (801)..(801): Xaa in position 801 is any amino acid
  Variant (803)..(803): Xaa in position 803 is any amino acid
  Variant (805)..(805): Xaa in position 805 is any amino acid
  Variant (808)..(808): Xaa in position 808 is any amino acid
  Variant (812)..(814): Xaa in position 812 to 814 is any amino acid
  Variant (817)..(817): Xaa in position 817 is any amino acid
  Variant (818)..(818): Xaa in position 818 is any or no amino acid
  Variant (820)..(827): Xaa in position 820 to 827 is any amino acid
  Variant (828)..(840): Xaa in position 828 to 840 is any or no amino acid
  Variant (845)..(845): Xaa in position 845 is any amino acid
  Variant (847)..(850): Xaa in position 847 to 850 is any amino acid
  Variant (852)..(852): Xaa in position 852 is any amino acid
  Variant (857)..(857): Xaa in position 857 is any amino acid
  Variant (859)..(864): Xaa in position 859 to 864 is any amino acid
  Variant (865)..(886): Xaa in position 865 to 886 is any or no amino acid
  Variant (888)..(898): Xaa in position 888 to 898 is any amino acid
  Variant (899)..(909): Xaa in position 899 to 909 is any or no amino acid
  Variant (911)..(915): Xaa in position 911 to 915 is any amino acid
  Variant (916)..(916): Xaa in position 916 is any or no amino acid

SEQ ID NO: 19499 - protein, 8 aa, Artificial sequence
  Consensus
  Variant (2)..(2): Xaa in position 2 is Glu or Gln
  Variant (3)..(3): Xaa in position 3 is Ile, Leu or Val
  Variant (4)..(7): Xaa in position 4 to 7 is any amino acid
YXXXXXXF

SEQ ID NO: 19500 - protein, 72 aa, Artificial sequence; identical to SEQ ID NO: 13942
  Consensus
  Variant (2)..(12): Xaa in position 2 to 12 is any amino acid
  Variant (14)..(16): Xaa in position 14 to 16 is any amino acid
  Variant (17)..(17): Xaa in position 17 is Phe, Ile, Leu, Met or Val
  Variant (18)..(18): Xaa in position 18 is Trp or Tyr
  Variant (19)..(19): Xaa in position 19 is Phe, Ile, Leu, Met or Val
  Variant (20)..(20): Xaa in position 20 is any amino acid
  Variant (22)..(30): Xaa in position 22 to 30 is any amino acid
  Variant (31)..(31): Xaa in position 31 is any or no amino acid
  Variant (33)..(35): Xaa in position 33 to 35 is any amino acid
  Variant (36)..(36): Xaa in position 36 is Asp, Glu, Asn or Thr
  Variant (37)..(39): Xaa in position 37 to 39 is any amino acid
  Variant (40)..(40): Xaa in position 40 is Phe, Ile, Leu or Val
  Variant (41)..(44): Xaa in position 41 to 44 is any amino acid
  Variant (46)..(52): Xaa in position 46 to 52 is any amino acid
  Variant (53)..(53): Xaa in position 53 is Phe, Leu, Met or Val
  Variant (54)..(61): Xaa in position 54 to 61 is any amino acid
  Variant (62)..(62): Xaa in position 62 is Phe, Ile, Leu, Met or Val
  Variant (63)..(63): Xaa in position 63 is any amino acid
  Variant (64)..(64): Xaa in position 64 is Ile, Leu or Val
  Variant (65)..(66): Xaa in position 65 to 66 is any amino acid
  Variant (67)..(67): Xaa in position 67 is Asp or Glu
  Variant (68)..(71): Xaa in position 68 to 71 is any amino acid

SEQ ID NO: 19501 - protein, 14 aa, Artificial sequence
  Consensus
  Variant (2)..(6): Xaa in position 2 to 6 is any amino acid
  Variant (7)..(8): Xaa in position 7 to 8 is any or no amino acid
  Variant (10)..(10): Xaa in position 10 is Ala or Gly
  Variant (11)..(11): Xaa in position 11 is any amino acid
  Variant (13)..(13): Xaa in position 13 is Phe, Ile, Leu, Met or Val
WXXXXXXXDXXRXD

SEQ ID NO: 19502 - protein, 12 aa, Artificial sequence
  Consensus
  Variant (2)..(2): Xaa in position 2 is any amino acid
  Variant (3)..(3): Xaa in position 3 is Ala, Ile, Pro or Val
  Variant (4)..(5): Xaa in position 4 to 5 is any amino acid
  Variant (7)..(7): Xaa in position 7 is any amino acid
  Variant (9)..(9): Xaa in position 9 is Asp, Glu, Gly, Asn, Gln, Ser or Thr
  Variant (11)..(11): Xaa in position 11 is any amino acid
GXXXXYXGXEXG

SEQ ID NO: 19503 - DNA, 456 bp, Escherichia coli K12
  CDS (1)..(456): transl_table=11
atggagttaatggtcgttcatccacatattttctggctcagtctcggcggtttgctgctggcagccgagatgctgggcggaaatggttatttgttgtggagcggcgtggcagcggtgattaccggcctggtggtctggctggtgccgctgggttgggagtggcaaggggtaatgtttgccatcctgacgctgctcgccgcctggctgtggtggaaatggttgtcgcggcgggtgcgcgaacaaaagcacagcgatagtcatttaaaccagcgcgggcagcagctgattggccgacgttttgtgctggaatctccgctggtcaacgggcgcggtcatatgcgcgtcggtgacagttcatggcctgtcagcgccagcgaggatctcggtgcaggtacgcatgttgaagtcattgcgatagaagggataaccctacatatccgagccgtctcgtcttaa

SEQ ID NO: 19504 - protein, 151 aa, Escherichia coli K12
MELMVVHPHIFWLSLGGLLLAAEMLGGNGYLLWSGVAAVITGLVVWLVPLGWEWQGVMFAILTLLAAWLWWKWLSRRVREQKHSDSHLNQRGQQLIGRRFVLESPLVNGRGHMRVGDSSWPVSASEDLGAGTHVEVIAIEGITLHIRAVSS

SEQ ID NO: 19505 - DNA, 444 bp, Escherichia coli
  CDS (1)..(444): transl_table=11
atgttctggtttacgctgtttcttctttgtattgcccttgaaattataaccggaacgggatggttactcgtaatcagtcttggtgcattatcaagtgccattgttgactttttccttcctatatcacaagaagcaaatatatgcttctttgcgtcaataagcatactgacgtcgataattaagttcgtctatgacaaaaaacataagaaattagatacacccctggtgaacacaggacatacacgttttaaaggaaaagaatttactctcagtgacgatattgtgaacggcaaggggcaattacttattggtgatacattctggcctgttgagacgttacacgatgaaaactaccctgcgggaacaagagttattgttacagacatgcaaggaataactcttaaagtaatgaccatcgaagacaagagtgaaaacaaggaataa

SEQ ID NO: 19506 - protein, 147 aa, Escherichia coli
MFWFTLFLLCIALEIITGTGWLLVISLGALSSAIVDFFLPISQEANICFFASISILTSIIKFVYDKKHKKLDTPLVNTGHTRFKGKEFTLSDDIVNGKGQLLIGDTFWPVETLHDENYPAGTRVIVTDMQGITLKVMTIEDKSENKE

SEQ ID NO: 19507 - DNA, 465 bp, Mesorhizobium loti MAFF303099
  CDS (1)..(465): transl_table=11
atgttcgatcgcatcatttccgaactcggaccctggaactggatggttctgggcttcgtgctgctggtcatggaaatcatcgcgcctggcatcttcatgctgtggatcggcatcgccgcgctcatcatcggcgcggtgtcgctgctgatctgggatgcggcgatctggacctggcaggtccaggtccttgccttcctggcgctgtcgctggtttcagcctacgtcggcaagaaactcatgggcggacgcgaccagccgaccgaccagccgctgctcaaccggcgcggcgcccagatggtcggccgcatggcgacgcttgccgagccgatcaaggacggccgcggccgcatcaagctcggcgacacgctgtggcgcgtctccggccccgacctgcccgccggcacgcaggtgcgtgtgacaagtgccgcggatacggacctggaactgacggtggagcgcgtctga

SEQ ID NO: 19508 - protein, 154 aa, Mesorhizobium loti MAFF303099
MFDRIISELGPWNWMVLGFVLLVMEIIAPGIFMLWIGIAALIIGAVSLLIWDAAIWTWQVQVLAFLALSLVSAYVGKKLMGGRDQPTDQPLLNRRGAQMVGRMATLAEPIKDGRGRIKLGDTLWRVSGPDLPAGTQVRVTSAADTDLELTVERV

SEQ ID NO: 19509 - DNA, 423 bp, Thermotoga maritima MSB8
  CDS (1)..(423): transl_table=11
atggaagcctgggtgttctggcttgttctcggtgtgatccttatggttgcagaaattctcacacccacattcttcatattctggtttggagtgggtgcccttgccgcttctctggtgtcactctatcttggggtgtacgttcaaatcatagtctttgcagctgtatctatagtactcgtcttcctcacgagaaggttggttcagaactgggaatctccgagaaagatccatgttgaagagatcgctggaaaggtagctctcgttattgagacaatagataacagaaagggaactggccttgtgaagatcgatggagatgtgtggagagcgtacgcagaagacgacgatgaggtcatagagaaaggagaacacgtgaagataatgaaggtagaaggtgctcatgtggttgtaaaaagagtatga

SEQ ID NO: 19510 - protein, 140 aa, Thermotoga maritima MSB8
MEAWVFWLVLGVILMVAEILTPTFFIFWFGVGALAASLVSLYLGVYVQIIVFAAVSIVLVFLTRRLVQNWESPRKIHVEEIAGKVALVIETIDNRKGTGLVKIDGDVWRAYAEDDDEVIEKGEHVKIMKVEGAHVVVKRV

SEQ ID NO: 19511 - DNA, 570 bp, Vibrio cholerae O1 biovar eltor str. N16961
  CDS (1)..(570): transl_table=11
ttggtcaagcagagaatggtaagatcatcatgctgccacttgaagcaacaggcctcatgggttctgtcgctggaattgcagaaatgtttaaatcatcacaaaccactaagtaggtgccccgtggtagagctactctcacaattgaatttctggcattggttggccttgggcctacttctattagccgctgagctactcggcactgcaggttattttttgtggcttggcctatcagcactattagttggggtattgctggccgtaatgcctcttggttggcaactgcagtggctggcttttgcgagtttttctctggtcacgacttggctttggtggcgacgtcaatttagccgagataaaaagcaagatacagaacgcgaccttaaccagaaagaaaaacagttactcggacgtattattccgataactcaagataccccagcaggagagtttcaagtaacactgggtgatacggcttggacagcgcgctgcgatcagcagcttgcggctgggagccgtgtttctgtcgttgctgtggatgggattatcttagtcgtccaacctatctaa

SEQ ID NO: 19512 - protein, 189 aa, Vibrio cholerae O1 biovar eltor str. N16961
MVKQRMVRSSCCHLKQQASWVLSLELQKCLNHHKPLSRCPVVELLSQLNFWHWLALGLLLLAAELLGTAGYFLWLGLSALLVGVLLAVMPLGWQLQWLAFASFSLVTTWLWWRRQFSRDKKQDTERDLNQKEKQLLGRIIPITQDTPAGEFQVTLGDTAWTARCDQQLAAGSRVSVVAVDGIILVVQPI

SEQ ID NO: 19513 - DNA, 450 bp, Pasteurella multocida subsp. multocida str. Pm70
  CDS (1)..(450): transl_table=11
atggaatggttttccacttggagcctttggcattggcttattttaggttttgttttattaattgctgaattagtgatcccaggggtgtttttactttggtggggattagccgccattgtgattgctggtgtgatggcactgataccaagcttatcgttaaccgttttagctattagctatgcgattttagcgattattttgagtgtgtcatggtggaaatatcagcatggtcaagacaaaagtgatcagttacattcgtcattaaatcaacgtgatcacgcgatgctaggcacaagaggtactgtgcaagaaatcgcggctaatggcattggacgtgggcattttggcgatacgacgtggcgcattcaaggcacggatttacaggtcggtgatttagttgaagtgcaccaagtggatggtattacgttaaaagtgaaaaaagtgaattaa

SEQ ID NO: 19514 - protein, 149 aa, Pasteurella multocida subsp. multocida str. Pm70
MEWFSTWSLWHWLILGFVLLIAELVIPGVFLLWWGLAAIVIAGVMALIPSLSLTVLAISYAILAIILSVSWWKYQHGQDKSDQLHSSLNQRDHAMLGTRGTVQEIAANGIGRGHFGDTTWRIQGTDLQVGDLVEVHQVDGITLKVKKVN

SEQ ID NO: 19515 - DNA, 453 bp, Pseudomonas aeruginosa PAO1
  CDS (1)..(453): transl_table=11
atggaaatcctgctgctacgcctggacttctgggactggctggccttcggtaccgtcctcctgctcctggaaatcttcggtgccggcggctatctgctgcgggtcggcctcaccgccgcttgtgtcggtgcgctcggcgcgctcctgccgggactggcctggccttggcaggtagggctgttcgtcctgctctccgggctggtcgccgccttgcatcgacgccgtcgccgcaaggccggtagcgtcgaggaaacgccagggttgcagcgacgcggcgacgacctgttcggccgcacctttcccttgcaccgggcgatcgtcggcgggctcggcgagctgcgcgtcgaggacgcgtcgtggctggtcagcggtcccgacctgccgcgcggcgccctggtccgggtcaccggccaggacggcgccctgctgcacgtcgagcctgccgcgccctga

SEQ ID NO: 19516 - protein, 150 aa, Pseudomonas aeruginosa PAO1
MEILLLRLDFWDWLAFGTVLLLLEIFGAGGYLLRVGLTAACVGALGALLPGLAWPWQVGLFVLLSGLVAALHRRRRRKAGSVEETPGLQRRGDDLFGRTFPLHRAIVGGLGELRVEDASWLVSGPDLPRGALVRVTGQDGALLHVEPAAP

SEQ ID NO: 19517 - DNA, 480 bp, Deinococcus radiodurans R1
  CDS (1)..(480): transl_table=11
gtgcctgactggctccccacctggcaagcggtccacccctggcactggtgggtgttcggggcgctgctgctgattctggaaattctggcccccggcgtgtttttcgtgtggctcgcgctctcggctttcggcgtgggcctcctgaccttcgtgttgccctttctggacgtgccggggcagttgctgctctttgcgggcctgagcgtggccgccgtgtggctgggccgccgctacgtgtcgcgcctcgtcctcggcggcagtgagggcgagcagctcaacaccggcgctcagcgcctcatcgggcgcaccgtcaccgtcgtgacccccatcgaacacggtgtgggccgcgtccgggtgggcgacagcgactggcgggcgcgggggccggagctgcccgccggcaccccggtgcgaattgtcggcgtggaaggcgccactctggtcgtgcaggaagaaaagcggctggtggaggcgggttaa

SEQ ID NO: 19518 - protein, 159 aa, Deinococcus radiodurans R1
MPDWLPTWQAVHPWHWWVFGALLLILEILAPGVFFVWLALSAFGVGLLTFVLPFLDVPGQLLLFAGLSVAAVWLGRRYVSRLVLGGSEGEQLNTGAQRLIGRTVTVVTPIEHGVGRVRVGDSDWRARGPELPAGTPVRIVGVEGATLVVQEEKRLVEAG

SEQ ID NO: 19519 - DNA, 435 bp, Xylella fastidiosa 9a5c
  CDS (1)..(435): transl_table=11
atgatgcgctggaatgctatgggatgggcagccgccgcactgctattgctcgctgccgaaacactgatacctggagcgttcatgctgtggatggggattgcagcaacagctgtgttcgtcggcgtgctgctgctcccggatacttcactgctactgcaaatgttcgcttttgttgttcttagcttcgtttcaatctatctctaccggacttggttccgccgtgtcgatcatgacagtgaccatccgctgctaaatcgccgtgctgatcagctagtcggtcgtgtcatcatccttgatcacgctatcgttgacggcaacgctcgaatcaaaatagacgacacattttgggatatcactggtcctgatttacccatcggcactcaaatccggatcgttgctttagatggcgcaacactcaaggtacaccccacttaa

SEQ ID NO: 19520 - protein, 144 aa, Xylella fastidiosa 9a5c
MMRWNAMGWAAAALLLLAAETLIPGAFMLWMGIAATAVFVGVLLLPDTSLLLQMFAFVVLSFVSIYLYRTWFRRVDHDSDHPLLNRRADQLVGRVIILDHAIVDGNARIKIDDTFWDITGPDLPIGTQIRIVALDGATLKVHPT

SEQ ID NO: 19521 - DNA, 456 bp, Sinorhizobium meliloti 1021
  CDS (1)..(456): transl_table=11
atgatcacgcgcatcatcctcgaactcggcccctggagctggtgggtactcggcctcctgctgctggcggcggagctgatcctgcccggcgtattcctcgtgtggatcgcactcgccgcgctcgtcaccggggccctctcgcttttcttctgggaggcgccgttctggagctggcaggtgcagttcgtcgccttcgccttgctttcggtcgcctccgtccttatcgggcggcgcttcgtctcctcttccgccgagagcgacgagccgctgctcaacaggcgcggcgaaagcctggtcggacggacggcagtgctcgagcagccgatcgcggaaggccgcggacgcgtccggctcgacgacacgacctggtccgtcgaaggccccgaccttccggtcggcgcacgcgttcgcatcgtcgcgagcagcggccgccacctgacggtcgagcagatctga

SEQ ID NO: 19522 - protein, 151 aa, Sinorhizobium meliloti 1021
MITRIILELGPWSWWVLGLLLLAAELILPGVFLVWIALAALVTGALSLFFWEAPFWSWQVQFVAFALLSVASVLIGRRFVSSSAESDEPLLNRRGESLVGRTAVLEQPIAEGRGRVRLDDTTWSVEGPDLPVGARVRIVASSGRHLTVEQI

SEQ ID NO: 19523 - DNA, 465 bp, Caulobacter crescentus CB15
  CDS (1)..(465): transl_table=11
gtgatggacgcgatcgccggcttccacgcccttcatccgttctggctgtggctggccgtggcggccgccttcctggccgtcgaggtcgccaccggcacgggctggcttctgtggccggccgccagcgcctttgtcgtcggggtcatcgcgcaactgctgccgaccagtttcgtgatcgagcttgggctgttcgcggcgctggcgatcgcctcgacctatctggccaagcgctttctgcgaccggtgctggaggcgtccgggccggatctgaacgatccgatgcagcggctgatcggtcagcggggccaggtgctgtcgaccttcgagcaggggcgcggccgcgtcttcatcgacggcaaggactgggcggccgagaccgacgagccgatcccggcgatcagccaggaagtcgtggtggtcggcgtggacggcgcgatcctgaaggtgcgcaagatcccgacctga

SEQ ID NO: 19524 - protein, 154 aa, Caulobacter crescentus CB15
MMDAIAGFHALHPFWLWLAVAAAFLAVEVATGTGWLLWPAASAFVVGVIAQLLPTSFVIELGLFAALAIASTYLAKRFLRPVLEASGPDLNDPMQRLIGQRGQVLSTFEQGRGRVFIDGKDWAAETDEPIPAISQEVVVVGVDGAILKVRKIPT

SEQ ID NO: 19525 - DNA, 465 bp, Agrobacterium tumefaciens str. C58
  CDS (1)..(465): transl_table=11
atgttgcaacggcttgccactgagctgggaccctggagctggtggatcgtcggcttcgtgctgctggccgccgaactcatcgcgcccggcgtcttcctgatatggatcgggcttgccgcacttgtcatcggcgtggtttcgctgtttttctgggaagcggcattctgggcgtggcaattgcagctggtgctgtttgccgcactttccgtggtgttcgccctgctcggccggagatatttcggccgaaaccacgcgacaagcgacgagcccttcctgaaccagcgcgaagcaagccttgtcggccgcaccgcaactctgcaggaaccaatcgtcgagggtcgaggtcggataaggctggatgatacctggtggccggtgaatggcgaagacctgccggccggaacccgcgtcaggattgcctcggcacgcgggcgcacgctgacaatcgaaccgatagatcggtaa

SEQ ID NO: 19526 - protein, 154 aa, Agrobacterium tumefaciens str. C58
MLQRLATELGPWSWWIVGFVLLAAELIAPGVFLIWIGLAALVIGVVSLFFWEAAFWAWQLQLVLFAALSVVFALLGRRYFGRNHATSDEPFLNQREASLVGRTATLQEPIVEGRGRIRLDDTWWPVNGEDLPAGTRVRIASARGRTLTIEPIDR

SEQ ID NO: 19527 - DNA, 417 bp, Xanthomonas axonopodis pv. citri str. 306
  CDS (1)..(417): transl_table=11
atgcgctgggacgtggcggtctggggcagtgctggcgctgctgctgattgcggcccagaccctggtgcgtgtgcgttcctgctgtggatggggatcgctgccgcagcggtgtgcttattggtgccggtgttgccggacatcgcgttgctgtggcagatcgtggcgcttgtgctgctcagcttcgtcttggtgcaggtgtatcgcacctggtttcgcggcaagggctcccagagcgatcgcccgctactcgatcggcgtgccgagcagttgatcggccgttgcgtgccgctcgatcaggccatccacgatggtcgcgtccgcgccaaggtcgatgatgcgttctgggtggtggccggcccggacctgcctgctggcacttcggcacgccggtgcgcatcgtcggcgtcgatggcatga

SEQ ID NO: 19528 - protein, 138 aa, Xanthomonas axonopodis pv. citri str. 306
MRWDVAVWGSAGAAADCGPDPGACAFLLWMGIAAAAVCLLVPVLPDIALLWQIVALVLLSFVLVQVYRTWFRGKGSQSDRPLLDRRAEQLIGRCVPLDQAIHDGRVRAKVDDAFWVVAGPDLPAGTSARRCASSASMA

SEQ ID NO: 19529 - DNA, 468 bp, Brucella suis 1330
  CDS (1)..(468): transl_table=11
atgattcccgaattcctgtttcaacttggcatctggaactggctcgttttcgggctgatcctgctcatcctggaaattctggcgcccggctttttcttcatctggttcggccttgccgcgcttgtcacaggcgcgctggccttccttctgtcgtccaccgccggttttggctggcagttgcaaacagttatctttctggtgctggcaattgtcttcacgcttgccgggcgccgttttttcggctcaaaaagcaatgatacgggcgaacccctgctcaaccgccgcggcgaacagctcgtcggccagcgtgccacgctgacggaacccatcgtcaatggccatggccgcatccacatcaacgatacaacatggcgcgtgaaaggcccggaccttcccgccggaacggaaatccgcatcgtggccttcgatccggtgtcgttggagatagaggtcggtttaggggaatag

SEQ ID NO: 19530 - protein, 155 aa, Brucella suis 1330
MIPEFLFQLGIWNWLVFGLILLILEILAPGFFFIWFGLAALVTGALAFLLSSTAGFGWQLQTVIFLVLAIVFTLAGRRFFGSKSNDTGEPLLNRRGEQLVGQRATLTEPIVNGHGRIHINDTTWRVKGPDLPAGTEIRIVAFDPVSLEIEVGLGE

SEQ ID NO: 19531 - DNA, 432 bp, Pseudomonas putida KT2440
  CDS (1)..(432): transl_table=11
atgcaatggtggatctggctggtcttcggcattgcgctgatcctgcttgaactggtcctcccgacgttcttcatactctggttcggcatcggcgccgtgctggtctcgcttatctcgctcgccgcacccagcctgcaactggacatgcaggtcctgctgtgggtactgctgtcgtcggccaccaccgtgctgtggttcaaagtgttccggcgcaagcagccggatgtgcgctggaccgccgacagcgtgatcggcgaagtgggcctgctgaccgctcccgtgtcggagttccagaaaggccgcgtacgcttccagaagccgatcctcggcaacgaagagtggacctgcgtcgccgatagccagatcgccgccggcgagcgggtacgcctgaccgccatcgaggggaacaccgcccgcgttatccgggcctga

SEQ ID NO: 19532 - protein, 143 aa, Pseudomonas putida KT2440
MQWWIWLVFGIALILLELVLPTFFILWFGIGAVLVSLISLAAPSLQLDMQVLLWVLLSSATTVLWFKVFRRKQPDVRWTADSVIGEVGLLTAPVSEFQKGRVRFQKPILGNEEWTCVADSQIAAGERVRLTAIEGNTARVIRA

SEQ ID NO: 19533 - DNA, 453 bp, Vibrio vulnificus CMCP6
  CDS (1)..(453): transl_table=11
gtgattgagttattagatggcatcaatcactggcattggctagctctcgggctagccttattggcagtggaattgttgggcaccgcaggttactttctttggcttggtttgtcggctttactggttggtctgttgctgtctcttatccctatgagttggcaactgcagtggagcgcgttcgcagtgttctcactcgtgacgacttggctttggtggcgcaaacagcttgcaaaagatcagcaagatgattcatcacgcgatcttaatcagaagcaaaaacaactggttggccaagaaattattctaaaagaggatatccatgctggcatgaatcgaattcaagtggcagacaccacttggtcagcacattccgatattgatattccagcaggcagtaaaattaaaattatcgccttagatggaattgtgttgaaggttgaagtgagcgcttag

SEQ ID NO: 19534 - protein, 150 aa, Vibrio vulnificus CMCP6
MIELLDGINHWHWLALGLALLAVELLGTAGYFLWLGLSALLVGLLLSLIPMSWQLQWSAFAVFSLVTTWLWWRKQLAKDQQDDSSRDLNQKQKQLVGQEIILKEDIHAGMNRIQVADTTWSAHSDIDIPAGSKIKIIALDGIVLKVEVSA

SEQ ID NO: 19535 - DNA, 444 bp, Bradyrhizobium japonicum USDA 110
  CDS (1)..(444): transl_table=11
atgaccgacacgttcgtatcgctcggcacctggaactggctgatctttgccttcatcctgatggcgctggagacgatcgcaccgggcgtattcctgttctggctcgggctcgccgctttgctggtgggcctgatctcgttcgccgttcatctgtcctggcagactcagctcgtgatgttcgcgatcttcgctgccgccgccgtgccggtgtggcggcggctcgcccggccgaggcccgatgcaagcgcaagccccttcctcaacaagcgcaccgaggcgctgctcggccgtgagttcacgctggagaagccgatcgtcgacggcaacggcaccatgcgcatcggcgacacggtctggcgcgtcgcaggtcccgatacgccggccgggacgcgcgtgaaggtggtgcaggtggacggcgtgaatctgacggtagcggtggcgtag

SEQ ID NO: 19536 - protein, 147 aa, Bradyrhizobium japonicum USDA 110
MTDTFVSLGTWNWLIFAFILMALETIAPGVFLFWLGLAALLVGLISFAVHLSWQTQLVMFAIFAAAAVPVWRRLARPRPDASASPFLNKRTEALLGREFTLEKPIVDGNGTMRIGDTVWRVAGPDTPAGTRVKVVQVDGVNLTVAVA

SEQ ID NO: 19537 - DNA, 435 bp, Xylella fastidiosa Temecula1
  CDS (1)..(435): transl_table=11
gtgatgcgctgggatgctatgggatgggcagctgccgcactgctattgctcgctgccgaaacactgatacctggagcgttcatgctatggatggggattgcagcagcagctgtgttcgtcggcgtgctgctgctcccggatatttcactgctactgcaaatgttcgcttttgttgttcttagcttcgtttcaatctatctctaccggacttggttccgccatatcgatcatgacagtgaccatccgctgctaaatcgccgtgctgatcagctagtcggtcgtatcatcatccttgatcacgctatcgttgacggcaacgctcgaatcaaaatagacgacacattttgggatatcactggtcctgatttacccatcggcactcaaatccggatcgttgctttagatggcacaacactcaaggtacaccccacttaa

SEQ ID NO: 19538 - protein, 144 aa, Xylella fastidiosa Temecula1
MMRWDAMGWAAAALLLLAAETLIPGAFMLWMGIAAAAVFVGVLLLPDISLLLQMFAFVVLSFVSIYLYRTWFRHIDHDSDHPLLNRRADQLVGRIIILDHAIVDGNARIKIDDTFWDITGPDLPIGTQIRIVALDGTTLKVHPT

SEQ ID NO: 19539 - DNA, 462 bp, Vibrio parahaemolyticus RIMD 2210633
  CDS (1)..(462): transl_table=11
atggacttgttcaacctgcttgatggcataacattttggcactggcttgcattcggctttgtgctgcttgccgttgagctacttggtacagcgggttactttctgtggttggggttatcggcgttattagtgggagcgttattggcagtgctccctttcggctggcaacttcaatggttatctttcgcgactttcagtttgctgacaacttggttatggtggcgacgccagtggtcaagagacaaacaagatgatcaaacaagagatctcaaccaaaagtacaagcagttgattggccgcagcgtgatacttgaggaagatttttcaattgggttaaacagaattcgcatcgccgataccacctggtctgcacagtgtgagcaaaatatccgagctggtactcgtgtaaaaatcgtcgcgatcgatggaataatcctcattgtggagcctatttctgagtaa

SEQ ID NO: 19540 - protein, 153 aa, Vibrio parahaemolyticus RIMD 2210633
MDLFNLLDGITFWHWLAFGFVLLAVELLGTAGYFLWLGLSALLVGALLAVLPFGWQLQWLSFATFSLLTTWLWWRRQWSRDKQDDQTRDLNQKYKQLIGRSVILEEDFSIGLNRIRIADTTWSAQCEQNIRAGTRVKIVAIDGIILIVEPISE

SEQ ID NO: 19541 - DNA, 429 bp, Bacillus cereus ATCC 14579
  CDS (1)..(429): transl_table=11
atggctgcttgggtaatttggtttataatagctggtattttatttatcgcggaaatgttgtcgattacattttacatgctttggcttggaattggagctgttgtcggaggtcttattgctttgtttgctcctgatgcactactgttacaagttactgttggtgcaattgtaagtttaactttgacattctttacgaaaagaatttcaaaaaactttcgagaagcaaaaggttttactgatacagtagatatgcttgttggtaaaagagggattgttatgcaagcgattacaaatgaagcgaatggtattgtgaaggtggatggagatacttggacagctattgcagattcttcaattgatgctggagaaaaagtcgttgttataaagaggcatagtactatattacaagtgaaaaaggagagtgaataa

SEQ ID NO: 19542 - protein, 142 aa, Bacillus cereus ATCC 14579
MAAWVIWFIIAGILFIAEMLSITFYMLWLGIGAVVGGLIALFAPDALLLQVTVGAIVSLTLTFFTKRISKNFREAKGFTDTVDMLVGKRGIVMQAITNEANGIVKVDGDTWTAIADSSIDAGEKVVVIKRHSTILQVKKESE

SEQ ID NO: 19543 - DNA, 444 bp, Prochlorococcus marinus str. MIT 9313
  CDS (1)..(444): transl_table=11
ttgccttcgcccacctggattcctctgatctggctcgccgtagctggcctactcctagccattgagctggctcaaccgagcttcgatggcctgatgttcgcagcgcttggggccttagtggtatcgattttggctgcaatcactcccatgccactgattttgcagatgatcttctttctgctgatcacggttttagggactctctggctgactcgttggtcagcccgccgcaaccccagtccagatgggcttcgccaacgcgaggatatcgccgaagtgctgacgccaatcaaagctggaggagatgggcgtgtgcgttggcatgggcaaagctgggccgccagttcgatcgacctggagactccaataaacgccggtgatcaggtcgtggtaatgggccgtgaaggcacacaactacaggttctgccactgccgcgtcgctga

SEQ ID NO: 19544 - protein, 147 aa, Prochlorococcus marinus str. MIT 9313
MPSPTWIPLIWLAVAGLLLAIELAQPSFDGLMFAALGALVVSILAAITPMPLILQMIFFLLITVLGTLWLTRWSARRNPSPDGLRQREDIAEVLTPIKAGGDGRVRWHGQSWAASSIDLETPINAGDQVVVMGREGTQLQVLPLPRR

SEQ ID NO: 19545 - DNA, 456 bp, Photorhabdus luminescens subsp. laumondii TTO1
  CDS (1)..(456): transl_table=11
atgattgcacagattgcggcgcaaactccttggctctggttctctttcggcggcttactgttaattgcagagcttctgggaactggcggctatctgttatggacgggcatagccgctatcgttgttgcgtttgtcacctggctgctaccaggaatagattgggaatggcaaggcattttgtttgccactctgacgctgctttctgcaatgctatggcgctactggttacgtcgccgcccatcaaaaggcggcgataccctgaaccagaaagagcaccagctcatcggtatccgagccaaactgactaccgatactgaaaatggttacagccgggtcaagctagctgatggaagctggcgagttcactgtaatagtgaactaccagcccacaccgaagtagaagtgatcgctgttgatggcattaccctgaaagtaaaaccggtcagttctcagtga

SEQ ID NO: 19546 - protein, 151 aa, Photorhabdus luminescens subsp. laumondii TTO1
MIAQIAAQTPWLWFSFGGLLLIAELLGTGGYLLWTGIAAIVVAFVTWLLPGIDWEWQGILFATLTLLSAMLWRYWLRRRPSKGGDTLNQKEHQLIGIRAKLTTDTENGYSRVKLADGSWRVHCNSELPAHTEVEVIAVDGITLKVKPVSSQ

SEQ ID NO: 19547 - DNA, 459 bp, Vibrio vulnificus YJ016
  CDS (1)..(459): transl_table=11
gtgattgagttactagatggcatcaatcactggcattggctagctctcgggctagccttattggcagtggaactgttgggcaccgcaggttactttctttggcttggtttgtcggctttactggttggtctgttattgtctcttatccctatgagttggcaactgcagtggagcgcatttgcagtgttctcactcgtgacgacttggctttggtggcgcagacagcttgcaaaagatcagcaagatgattcatcacgcgatcttaatcagaagcaaaaacaactggttggccaagaaattattctaaaagaggatatccatgccggcatgaatcgaattcaagtggcagacacgacttggtcagcacattccgatagtgatattccggcaggcagtaaaattaaaattatcgccttagatggaattgtgttgaaggtagaagtacaggctacgccataa

SEQ ID NO: 19548 - protein, 152 aa, Vibrio vulnificus YJ016
MIELLDGINHWHWLALGLALLAVELLGTAGYFLWLGLSALLVGLLLSLIPMSWQLQWSAFAVFSLVTTWLWWRRQLAKDQQDDSSRDLNQKQKQLVGQEIILKEDIHAGMNRIQVADTTWSAHSDSDIPAGSKIKIIALDGIVLKVEVQATP

SEQ ID NO: 19549 - DNA, 450 bp, Rhodopseudomonas palustris CGA009
  CDS (1)..(450): transl_table=11
atgaccgcgatactcaccgcgctcggcgcctggaactggctgatcctcggtctggtgctgatggcgctggagctgctggcgcctggcgtgtttctgttctggctcggcctcgcggcgctgctggtcggcgtgctggcgctgctgctggagccgggatggcagttgcaaatcctgctgttcggcctgttcgcggccgccgccgtgccgctgtggcggcggatggcgcgcggcggcgacgtcgaggtgcatgccaccaacccgttcctcaaccgccgcaccgatgctctggtggggcgggagttcaccctggagaagccgatcgagggcggcgtcggaacggtgcggatcgacgatacggtctggcgtgtgtccggccccgacacccccgccggcagccgcattcgtatcgttgcggcggatggcgtgacgctgacggtggcggcgctgtag

SEQ ID NO: 19550 - protein, 149 aa, Rhodopseudomonas palustris CGA009
MTAILTALGAWNWLILGLVLMALELLAPGVFLFWLGLAALLVGVLALLLEPGWQLQILLFGLFAAAAVPLWRRMARGGDVEVHATNPFLNRRTDALVGREFTLEKPIEGGVGTVRIDDTVWRVSGPDTPAGSRIRIVAADGVTLTVAAL

SEQ ID NO: 19551 - DNA, 429 bp, Bacillus cereus ATCC 10987
  CDS (1)..(429): transl_table=11
atggctgcttgggtaatttggtttataatagctggtattttatttattgcggaaatgctgtcgattacattttacatgctttggcttggaattggagctgttgtcggaggtcttattgctttgtttgttcctgaagcactactgttacaagttgttgctggcgcgattgtaagtttaacattgactttctttacaaaaagaatatcaaaaaactttcgggaagcaaaaggttttactgatacagtagatatgcttgcaggtaaaaaagggattgttatgcaagcgattacaaatgaagcgaacggcattgtgaaagtggatggagatacttggacagctattgcagatgatccaattgatgccggagaaaaagttattgttataaagaggcatagtactatattacaagtaaaaaaggagagtgaataa

SEQ ID NO: 19552 - protein, 142 aa, Bacillus cereus ATCC 10987
MAAWVIWFIIAGILFIAEMLSITFYMLWLGIGAVVGGLIALFVPEALLLQVVAGAIVSLTLTFFTKRISKNFREAKGFTDTVDMLAGKKGIVMQAITNEANGIVKVDGDTWTAIADDPIDAGEKVIVIKRHSTILQVKKESE

SEQ ID NO: 19553 - DNA, 429 bp, Bacillus anthracis str. Sterne
  CDS (1)..(429): transl_table=11
atggctgcttgggtaatttggtttatcatagctggtattttatttattgcggaaatgctgtcgattacgttttacatgctttggcttggaattggagctgttgtcggaggtcttattgctttatttgcccctgaagcactactattacaagttgttgctggtgcgattgtaagtttaacattgactttctttacgaaaagaatatcaaaaaactttcgagaagcaaaaggttttactgatacagtagatatgttggtcggtaaaaaagggattgtcatgcaagcgattacaaaagaaacgaatggtattgtgaaggtggatggagatacttggacagctgttgcagatgctccaattgatactggagaaaaagttgttgttataaagagaaatagtactatattacaagtgaaaaaggagagtgaataa

SEQ ID NO: 19554 - protein, 142 aa, Bacillus anthracis str. Sterne
MAAWVIWFIIAGILFIAEMLSITFYMLWLGIGAVVGGLIALFAPEALLLQVVAGAIVSLTLTFFTKRISKNFREAKGFTDTVDMLVGKKGIVMQAITKETNGIVKVDGDTWTAVADAPIDTGEKVVVIKRNSTILQVKKESE

SEQ ID NO: 19555 - DNA, 429 bp, Bacillus thuringiensis serovar konkukian str. 97-27
  CDS (1)..(429): transl_table=11
atggctgcatgggtaatttggtttatcatagctggtattttatttattgcagaaatgttgtcgattacattttacatgctttggcttggaattggagctgttgtcggaggtcttattgctttatttgcccctgaagcactactattacaagttgttgctggtgcgattgtaagtttaacattgactttctttacgaaaagaatatcaaaaaactttcgagaagcaaaaggttttactgatacagtagatatgttggtcggtaaaaaagggattgtcatgcaagcgattacaaacgaaacgaatggtattgtgaaggtggatggagatacttggacagctgttgcagatgctccaattgatactggagaaaaagttgttgttataaagagaaatagtactatattacaagtgaaaaaggagagtgaataa

SEQ ID NO: 19556 - protein, 142 aa, Bacillus thuringiensis serovar konkukian str. 97-27
MAAWVIWFIIAGILFIAEMLSITFYMLWLGIGAVVGGLIALFAPEALLLQVVAGAIVSLTLTFFTKRISKNFREAKGFTDTVDMLVGKKGIVMQAITNETNGIVKVDGDTWTAVADAPIDTGEKVVVIKRNSTILQVKKESE

SEQ ID NO: 19557 - DNA, 471 bp, Acinetobacter sp. ADP1
  CDS (1)..(471): transl_table=11
atggaatttattttagaaccgtggcattggttcgttctaggtatattactcatgctctccgagttggtcattactgcttttgctgcactttggttcggcattgcagccattatggtgagcgttttactttggctttttccaatgatgggaatcaccacacaggtcatcatgtggattatcctgtccgtactttgtacgctcttatggtttaaatttatcaaaccactttctatcgacaaaaccaaagcaggattatctcgcgaagccacgatcggacagattggtatggtgattcgtgtcggtctatcacatgagcaaattgttgtaaggtttgcattgcctgtactgggtgcagatgaatggaactgtcgcagccttgctcctgtggaagttggtgatcgtgtctgtgtcgtcgatatcatgggcaatgatctggttgtccagccccatatcccaataaacaataaatga

SEQ ID NO: 19558 - protein, 156 aa, Acinetobacter sp. ADP1
MEFILEPWHWFVLGILLMLSELVITAFAALWFGIAAIMVSVLLWLFPMMGITTQVIMWIILSVLCTLLWFKFIKPLSIDKTKAGLSREATIGQIGMVIRVGLSHEQIVVRFALPVLGADEWNCRSLAPVEVGDRVCVVDIMGNDLVVQPHIPINNK

SEQ ID NO: 19559 - DNA, 456 bp, Erwinia carotovora subsp. atroseptica SCRI1043
  CDS (1)..(456): transl_table=11
atgggcattgaactggtgatggaaaatgcacactggttctggctatcgctcggcggtctgctgttggccgccgaaatgctgggtggcagtggctatttgctgtggagcggcctatcggcggtattggttgggctgttaacgtggatcatgccgctgggttggccatggcagggaacgattttcgccatcctgacgatcgtcacggcgctgctctggtggtattggctgcgtaaacgaacgctgtcgcgtccaccgtcgacgctcaaccaacgcggacaacagctggttggcctgcgtgccaccgtgtcagaatcggtgactaacggttttggtcgggtaaacatcggtgacagcagttggcgcgtgaaatcagaacaggatctgcctgctggcacgcatgttgaagtgattgccgttgacggcatcacgctgcatgtgcgctcaattgagcgctaa

SEQ ID NO: 19560 - protein, 151 aa, Erwinia carotovora subsp. atroseptica SCRI1043
MGIELVMENAHWFWLSLGGLLLAAEMLGGSGYLLWSGLSAVLVGLLTWIMPLGWPWQGTIFAILTIVTALLWWYWLRKRTLSRPPSTLNQRGQQLVGLRATVSESVTNGFGRVNIGDSSWRVKSEQDLPAGTHVEVIAVDGITLHVRSIER

SEQ ID NO: 19561 - DNA, 468 bp, Propionibacterium acnes KPA171202
  CDS (1)..(468): transl_table=11
gtgttggaatctttcggggaacatcgctggttgctgtgggcggtggcgtccgctgtgctggcgtgcacggagatgctaagcggagaatttaccctgctcatgctcgctgccggtgcgggagcaggagcaatcaccgcagcgatcgttccaggaatgtggttactgcaggtcatcgtcgctgctgtggtggcagctttattgcttaccgtgctgcgcccaacgttgttgcgccgggtgcgtgaggctccgggatatcggtcagctttggataaactagtcggttctgacggcgttgctacgagcgacatcacagatggccacggtcaggtcaaggtggacggtgaagagtggtcggcacgtgccctggaacccgggtcgactatcgctgccggggagaaaattgaggtgtacgagatcgatggtgcgacgctcgtggtatatccagttttcaggagtctgagttcctga

SEQ ID NO: 19562 - protein, 155 aa, Propionibacterium acnes KPA171202
MLESFGEHRWLLWAVASAVLACTEMLSGEFTLLMLAAGAGAGAITAAIVPGMWLLQVIVAAVVAALLLTVLRPTLLRRVREAPGYRSALDKLVGSDGVATSDITDGHGQVKVDGEEWSARALEPGSTIAAGEKIEVYEIDGATLVVYPVFRSLSS

SEQ ID NO: 19563 - DNA, 492 bp, Desulfotalea psychrophila LSv54
  CDS (1)..(492): transl_table=11
gtgccaatctttaacctttctaacaggcttttgcctgttgtttatatgcctttgaggttatttatggaatttatagattcgggtcttttttggctggtaataggcggtatgcttcttcttatggggcttgccactccaggattggtgctttttttctttgctgtcggggctactagtgtagcagcattaaattggctctatccggtcaatatggtttggcaattggtgatctttctgttgctctccctctttcttcttggttcctataggaaaatttttaagggaagtttttttgcaggtgatgaggtggatgaggtcgtggtcgaggtgggtgcacgtggggaagttgtagcccttattgcccctcctgccgtcggcagggtaaagattttggatcatgtttggcaggccacggccgatatttttatcgaagaggggcagactgtttatgtggtgaggcgtgatggtcccgttctgcacgtaggtaaataa

SEQ ID NO: 19564 - protein, 163 aa, Desulfotalea psychrophila LSv54
MPIFNLSNRLLPVVYMPLRLFMEFIDSGLFWLVIGGMLLLMGLATPGLVLFFFAVGATSVAALNWLYPVNMVWQLVIFLLLSLFLLGSYRKIFKGSFFAGDEVDEVVVEVGARGEVVALIAPPAVGRVKILDHVWQATADIFIEEGQTVYVVRRDGPVLHVGK

SEQ ID NO: 19565 - DNA, 462 bp, Desulfotalea psychrophila LSv54
  CDS (1)..(462): transl_table=11
ttggttaaaaacatgactctttcctattcgctaatatggtttcttgtgggtgttctctttttaatcgtggagttgctcctgccaggcttcattctgatttttttcacagctggatgctggattgccggtttaacagcctggttaacagacatcggcttacccacccagatattaatcttcatcatctcctccctgctttttctcttttccctgcgcaggtattgtctaaaaaccttcaaagggagcactcgtgatgatcacgaagacccatatattaactcaaaaattggcaagacggcactggtaaccaaggaaatatcagcaaatacgcctggcgaaatcaaggtaatggggagtttctggagagctgttgccgatgaaagcatcgaagagggacaatctgttttagttacaagccaggaatcagaagacggacttaccttcagagtcaaaaaattataa

SEQ ID NO: 19566 - protein, 153 aa, Desulfotalea psychrophila LSv54
MVKNMTLSYSLIWFLVGVLFLIVELLLPGFILIFFTAGCWIAGLTAWLTDIGLPTQILIFIISSLLFLFSLRRYCLKTFKGSTRDDHEDPYINSKIGKTALVTKEISANTPGEIKVMGSFWRAVADESIEEGQSVLVTSQESEDGLTFRVKKL

SEQ ID NO: 19567 - DNA, 450 bp, Yersinia pseudotuberculosis IP 32953
  CDS (1)..(450): transl_table=11
atgctggaggaaattgcagtaaatccaaattggttttggctatcacttggcgggctattattggccgctgagatgctgggagcgagtggctatctgttgtggagcggtattgccgccgtccttgttggcgttctggtatggctgttcccctttagctgggaaatgcaaggcgtgctgttctccattctgactgtcgtgtctgctttcctatggtggtattggttgagtaaacgcactaaaccgcaacctgccatgcttaaccaacgtaatcatcaactgcttggcatacgggcaacactgaccgagccaacggttgatggctatggccggatgaaggtcggtgacagcagttggcgaatttactgcgctaccgagcttaacccaggaactgaagttgaagtgattttggtagaaggcaataccttgcatgtccgtgccgttaatcgctag

SEQ ID NO: 19568 - protein, 149 aa, Yersinia pseudotuberculosis IP 32953
MLEEIAVNPNWFWLSLGGLLLAAEMLGASGYLLWSGIAAVLVGVLVWLFPFSWEMQGVLFSILTVVSAFLWWYWLSKRTKPQPAMLNQRNHQLLGIRATLTEPTVDGYGRMKVGDSSWRIYCATELNPGTEVEVILVEGNTLHVRAVNR

SEQ ID NO: 19569 - DNA, 429 bp, Bacillus cereus E33L
  CDS (1)..(429): transl_table=11
atggctgcttgggtaatttggtttataatagctggtattttatttattgcggaaatgctgtcgattacattttacatgctttggcttggaattggagctgttgtcggaggtcttattgctttgtttgttcctgaagcactactgttacaagttgttgctggtgcgattgtaagtttaacattgactttctttacgaaaagaatatcaaaaaactttcgggaagcaaaaggttttactgatacagtagatatgcttgcaggtaaaaaagggattgttatgcaagcgattacaaatgaggcgaacggcattgtgaaagtggatggagatacttggacagctattgcagataatccaattgatgccggagaaaaagttattgttataaagagacatagtacgatattacaagtaaaaaaggagagtgaataa

SEQ ID NO: 19570 - protein, 142 aa, Bacillus cereus E33L
MAAWVIWFIIAGILFIAEMLSITFYMLWLGIGAVVGGLIALFVPEALLLQVVAGAIVSLTLTFFTKRISKNFREAKGFTDTVDMLAGKKGIVMQAITNEANGIVKVDGDTWTAIADNPIDAGEKVIVIKRHSTILQVKKESE

SEQ ID NO: 19571 - DNA, 453 bp, Mannheimia succiniciproducens MBEL55E
  CDS (1)..(453): transl_table=11
atggattggttattcgcttggtctgtgtggcactggctcattttaggttttttattgcttatcggggagattctgatccccggtatttttctgctctggtggggaatatccgctatcattatggcggcgattatggcattattcaccactttaactcttaccgtattgggcatttcttatgcggtattagccttgctgttaagtttggtttggtggaaatatcaacataataaagataaaagtgacgaagcccgttcggtgctgaatcaacgaaaccacgccatgatcggcgcaatcggcgccgtacaggaaattgctttaaacggcgtcggacggggttattttggtgataccacttggcgcattcaaggaaaagaattgaaagtgggcgatcgtattgaagttttaaaggtacggggtataacccttattgtacgtaaattaggaaattaa

SEQ ID NO: 19572 - protein, 150 aa, Mannheimia succiniciproducens MBEL55E
MDWLFAWSVWHWLILGFLLLIGEILIPGIFLLWWGISAIIMAAIMALFTTLTLTVLGISYAVLALLLSLVWWKYQHNKDKSDEARSVLNQRNHAMIGAIGAVQEIALNGVGRGYFGDTTWRIQGKELKVGDRIEVLKVRGITLIVRKLGN

SEQ ID NO: 19573 - DNA, 444 bp, Methylococcus capsulatus str. Bath
  CDS (1)..(444): transl_table=11
atgaccgggttcagcctggttttctggcactggtggacgctgggtgccctgttgctgatcctcgagctcctcctcccggggatgtatttcctctggatggcggaagcagcgctgctgacgggtgcggtactctggctgctccccgggctggggtgggaaatccagctgctggtgttttccgtcctttctctggccagcatcttcgtcttcgaaaaattcatcggccgcaaacccatcgtttccgatcggcctttgctcaaccgccgggcggcgcaatacatcgggcgaaccctgatgttggagcagcccatcgtcaatggtatggggaaaatccgtatcgacgactcgatttggcgggtgcatggggatgattgccccgccggtaccaaaatcagggtgtgtgacgtggacggcgtcattctgaaggtcgagcgggtcgcttga

SEQ ID NO: 19574 - protein, 147 aa, Methylococcus capsulatus str. Bath
MTGFSLVFWHWWTLGALLLILELLLPGMYFLWMAEAALLTGAVLWLLPGLGWEIQLLVFSVLSLASIFVFEKFIGRKPIVSDRPLLNRRAAQYIGRTLMLEQPIVNGMGKIRIDDSIWRVHGDDCPAGTKIRVCDVDGVILKVERVA

SEQ ID NO: 19575 - DNA, 459 bp, Photobacterium profundum SS9
  CDS (1)..(459): transl_table=11
atgatagccctacttgaacagatgaacttctggcattgggtagcatttggtttagccttgctactactggaattactcggaactgctgggtacttgctttggttgggtgtctctgctgttcttgttggattactcttgtcgtttctaccactgagctggccattgcaatggctaacgtttgcggttttctcgttatttacaatgtggttgtggtggcgttaccaacacaaaaaagaccgcattgaagatgaagggcgcacactcaataagcgttcagaacaattaatagggcaggtctccgtgttagacgagcccttagctgctggaacagggcgaatgaggttaggtgatacaacatggcttgtacgaaccgatgttgctttagaagccggtgtactcgtagaggttattgatgttgatggcatcatgttaattattcagcctaaagtgcaaaaataa

SEQ ID NO: 19576 - protein, 152 aa, Photobacterium profundum SS9
MIALLEQMNFWHWVAFGLALLLLELLGTAGYLLWLGVSAVLVGLLLSFLPLSWPLQWLTFAVFSLFTMWLWWRYQHKKDRIEDEGRTLNKRSEQLIGQVSVLDEPLAAGTGRMRLGDTTWLVRTDVALEAGVLVEVIDVDGIMLIIQPKVQK

SEQ ID NO: 19577 - DNA, 453 bp, Salmonella enterica subsp. enterica serovar Paratyphi A str. ATCC
  CDS (1)..(453): transl_table=11
atgatagcgatgattctggtacatccgcatatcttctggcttagcctcggcggcctgttgttggctgcggaaatgctcggcggtaacggctatttgctgtggagcggcgtggcggcagtgattaccggcttaaccgtctggctcttaccgctcggctgggaatggcagggcgtgctgtttgcggccttaacgttactggcggcctggctttggtggcgctggctggcgcgtcgcgtgcgggaacaaaagccgaccgacagccgccttaaccaacgcggacaacaactgataggccgccggtttatgcttgatgccgcgttagtgaacggacggggtcatatgcgtgtcggcgacagctcgtggccggtatgcgctgacgaagacctgcgcgcaggtacgcatgtcgaagtgatcgccgtggaaggcatcaccttacgcattcgtgccgtttaa

SEQ ID NO: 19578 - protein, 150 aa, Salmonella enterica subsp. enterica serovar Paratyphi A str. ATCC
MIAMILVHPHIFWLSLGGLLLAAEMLGGNGYLLWSGVAAVITGLTVWLLPLGWEWQGVLFAALTLLAAWLWWRWLARRVREQKPTDSRLNQRGQQLIGRRFMLDAALVNGRGHMRVGDSSWPVCADEDLRAGTHVEVIAVEGITLRIRAV

SEQ ID NO: 19579 - DNA, 579 bp, Xanthomonas oryzae pv. oryzae KACC10331
  CDS (1)..(579): transl_table=11
atgcgctgggatgtggcggtctgggcagtgctggcgctgctgctgattgcggccgagaccttggtgccgggtgccttcctgctgtggatggggatcgctgccgcagtggtgtgcgtgttggtgctggtgttgccggacatcgcgttgctggtgcagatcgtggcgttcgtggtgctcagcttcgtctcggtgcaggtgtatcgcacctggtgtcgcggcaagggccgtgagagcgatcgcccgttgctcaatcgacgtgccgagcaggtgatcggccgtcgcgtgttgctcgatcaggccatcgacgatggtcgcgggcgcgtcaaggtcgacgatgcgttctgggtggtcgccggtcccgatctgccggccggcacgccggtgcgcatcgtcggtgtcgatggcagaccttgctggtgcagccggtcagctgacgtccgcgggcagggcacatgttgcgctgccaatgtccgcattgttgcagcgcggcgtagcatcgcgctgcgtcactgttctccaatcagcgtaatcgcgctgctgcgcgcacgccgttccccaggcgcggcaggacggggataa

SEQ ID NO: 19580 - protein, 192 aa, Xanthomonas oryzae pv. oryzae KACC10331
MRWDVAVWAVLALLLIAAETLVPGAFLLWMGIAAAVVCVLVLVLPDIALLVQIVAFVVLSFVSVQVYRTWCRGKGRESDRPLLNRRAEQVIGRRVLLDQAIDDGRGRVKVDDAFWVVAGPDLPAGTPVRIVGVDGRPCWCSRSADVRGQGTCCAANVRIVAARRSIALRHCSPISVIALLRARRSPGAAGRG

SEQ ID NO: 19581 - DNA, 453 bp, Vibrio fischeri ES114
  CDS (1)..(453): transl_table=11
atggagttttttgaacagatgaatcattggcactggttgactttagggttgttactacttgctggtgaattattaggaactgcgggctattttttgtggatagggctatcagcggtggctgttggagcgctatatgccgtgataccacttagttggcaaatgcagtggatcagttttgctgttttttcactctttacgacttggttgtggtggcgatatcaacataaaaaagacataagttcagatgcaaaaagagcgcttaatcaaaaagataagcaactaattggtcaaacatctcgtttggaagaagatattcatgcaggttcttgtcgaattgtattaggtgatactacatggtccgctaaaagtgccgttgatatagaaaagggaacgctagttcgtgtggtttctgttgacggtattattttgacgattgaaccagtaaaaaaataa

SEQ ID NO: 19582 - protein, 150 aa, Vibrio fischeri ES114
MEFFEQMNHWHWLTLGLLLLAGELLGTAGYFLWIGLSAVAVGALYAVIPLSWQMQWISFAVFSLFTTWLWWRYQHKKDISSDAKRALNQKDKQLIGQTSRLEEDIHAGSCRIVLGDTTWSAKSAVDIEKGTLVRVVSVDGIILTIEPVKK

SEQ ID NO: 19583 - DNA, 453 bp, Salmonella enterica subsp. enterica serovar Choleraesuis str
  CDS (1)..(453): transl_table=11
atgatagcgatgattctggtacatccgcatatcttctggcttagcctcggcggcctgttgttggctgcggaaatgctcggcggtaacggctatttgctgtggagcggcgtggcggcagtgattaccggcttaaccgtctggctcttaccgctcggctgggaatggcagggcgtgctgtttgcggccttaacgttgctggcagcctggctttggtggcgctggctggcgcgtcgcgtgcgggagcagaagccgaccgacagccgccttaaccaacgcggacaacaactggtaggccgccgatttatgcttgatgccgcgttagttaacggacggggtcatatgcgtgtcggcgacagctcgtggccggtatgcgctgacgaagacctgcgcgcaggtacgcatgtcgaagtgatcgccgtggaaggcatcaccttacgcattcgtgccgtttaa

SEQ ID NO: 19584 - protein, 150 aa, Salmonella enterica subsp. enterica serovar Choleraesuis str
MIAMILVHPHIFWLSLGGLLLAAEMLGGNGYLLWSGVAAVITGLTVWLLPLGWEWQGVLFAALTLLAAWLWWRWLARRVREQKPTDSRLNQRGQQLVGRRFMLDAALVNGRGHMRVGDSSWPVCADEDLRAGTHVEVIAVEGITLRIRAV

SEQ ID NO: 19585 - DNA, 468 bp, Brucella abortus biovar 1 str. 9-941
  CDS (1)..(468): transl_table=11
atgattcccgaattcctgtttcaacttggcatctggaactggctcgttttcgggctgatcctgctcatcctggaaattctggcgcccggctttttcttcatctggttcggccttgccgcgcttgtcataggcgcgctggccttccttctgtcgtccaccgccggttttggctggcagttgcaaacagttatctttctggtgctggcaattgtcttcacgcttgccgggcgccgttttttcggctcaaaaagcaatgatacgggcgaacccctgctcaaccgccgcggcgaacagctcgtcggccagcgtgccacgctgacggaacccatcgtcaatggccatggccgcatccacatcaacgatacaacatggcgcgtgaaaggcccggaccttcccgccggaacggaaatccgcatcgtggccttcgatccggtgtcgttggagatagaggtcggtttaggggaatag

SEQ ID NO: 19586 - protein, 155 aa, Brucella abortus biovar 1 str. 9-941
MIPEFLFQLGIWNWLVFGLILLILEILAPGFFFIWFGLAALVIGALAFLLSSTAGFGWQLQTVIFLVLAIVFTLAGRRFFGSKSNDTGEPLLNRRGEQLVGQRATLTEPIVNGHGRIHINDTTWRVKGPDLPAGTEIRIVAFDPVSLEIEVGLGE

SEQ ID NO: 19587 - DNA, 435 bp, Xanthomonas campestris pv. campestris str. 8004
  CDS (1)..(435): transl_table=11
atgcgctgggacgtggtcgcctgggcagtgctggccctgctgttgatcgccgccgagacgctggcgcccggcgcgtttctgctgtggatgggcatcgcggccgcagcggtgtgcgtgctggtgctggccgtgcccggcacctcggtactgttgcagatcgtggcattcgtggtgctcagcttcgtggccatccaggtgtatcgcacctggttccgcggcaagggccggcagagtgatcggcccttgctcaaccggcgcgccgaacagttgatcggccgcagtgtgctgctggatcaggcgatcgttgacggacgtggccgcgctaaggtggacgatgcgttctgggtagtgagtggcccggatcttcccgccggtgcgctggtgcgcatcgttgcggtcgacggcatgaccctgcaggtgcagcccaacacctga

SEQ ID NO: 19588 - protein, 144 aa, Xanthomonas campestris pv. campestris str. 8004
MRWDVVAWAVLALLLIAAETLAPGAFLLWMGIAAAAVCVLVLAVPGTSVLLQIVAFVVLSFVAIQVYRTWFRGKGRQSDRPLLNRRAEQLIGRSVLLDQAIVDGRGRAKVDDAFWVVSGPDLPAGALVRIVAVDGMTLQVQPNT

SEQ ID NO: 19589 - DNA, 450 bp, Pseudomonas fluorescens Pf-5
  CDS (1)..(450): transl_table=11
atgttggcatttgtgcaagctctatcgttctgggactggctggcccttggcaccatcctgctgatcttcgaagtattcggggccggcggctacctgctgtggatcggcctcgcagccgccatagtcggggtcctgacctttctcattcccggcctctcatgggaggtgcagttcctcctgttcggcctgctgtcggtgctcaccgcactgtattggtggcgccgccagcgcagcgtggtacgccccagcgatcagccgaacctcaacctgcgcggccaggagctgatcggcaagacctttgtggtgcaccaggcgattgtcgacggccgcgggcggatcaaggtggccgacggcgtgtggatcgccaagggggccgacgcccccgtgggcgcccgggttcgggtggtgggccaggaaggcgcaatcctgttggtcgaaaaccttgactga

SEQ ID NO: 19590 - protein, 149 aa, Pseudomonas fluorescens Pf-5
MLAFVQALSFWDWLALGTILLIFEVFGAGGYLLWIGLAAAIVGVLTFLIPGLSWEVQFLLFGLLSVLTALYWWRRQRSVVRPSDQPNLNLRGQELIGKTFVVHQAIVDGRGRIKVADGVWIAKGADAPVGARVRVVGQEGAILLVENLD

SEQ ID NO: 19591 - DNA, 498 bp, Psychrobacter arcticum 273-4
  CDS (1)..(498): transl_table=11
atgatggagacgctttggatgatagaaccttggcattggctggtattgggctttttgttattgattgtcgagatgtttgtgccaacctttgctagcctttggtttggtgctgctgccatcatagtggctgcgcttacatggctgttgcctatctctatctccgtacaaattattatctggttactcctctccgctatattcttgctggcatggtttaaatttatcaaacctttatctgtagatcgtaccaaagcaggacttggtggcagtgtgatcgtcggtgaaacaggtatgattattgtgcagccacaggcagatagagcaggtatggtacgttttagtgtccctattgtgggtgccgctgaatggatgtgccgtacccgtggtgagcaagtggcagtcggtgatcgagtggtggtgacagatatcattggtaatgagctgattgtgagtagtatgaattcaagaacggctgtgagccaaaatacgcccgtataa

SEQ ID NO: 19592 - protein, 165 aa, Psychrobacter arcticum 273-4
MMETLWMIEPWHWLVLGFLLLIVEMFVPTFASLWFGAAAIIVAALTWLLPISISVQIIIWLLLSAIFLLAWFKFIKPLSVDRTKAGLGGSVIVGETGMIIVQPQADRAGMVRFSVPIVGAAEWMCRTRGEQVAVGDRVVVTDIIGNELIVSSMNSRTAVSQNTPV

SEQ ID NO: 19593 - DNA, 441 bp, Dechloromonas aromatica RCB
  CDS (1)..(441): transl_table=11
atgcatcctgaatggtggcactgggttgtcggcggcatcgtgctggttctcgccgaactgatcatcccctcgttcttcatcgtctggtttggtttgggcgccctgctcgtcggacttctggccctggctttcgacctctcgctgactgcccagctggcgacctggaccattgcttcgctggccatggtcgtgctgtggttccgcgtcttcaagcaaagtttcgtcaagacccgctcgggtacggccgatggtgaggccatcggcgaaatcggtctgctggtcagtgccgtcgctcctttcgagcgcggcaaggttcgttttcaacggccgatcctcggctccgaggaatgggtttgcctgtcggacaccgccatcgcggcgggcgagcgggtcaaggtgacggccgtcgagggtagtttcgtcaaggtcagcaaggcttag

SEQ ID NO: 19594 - protein, 146 aa, Dechloromonas aromatica RCB
MHPEWWHWVVGGIVLVLAELIIPSFFIVWFGLGALLVGLLALAFDLSLTAQLATWTIASLAMVVLWFRVFKQSFVKTRSGTADGEAIGEIGLLVSAVAPFERGKVRFQRPILGSEEWVCLSDTAIAAGERVKVTAVEGSFVKVSKA

SEQ ID NO: 19595 - DNA, 444 bp, Haemophilus somnus 129PT
  CDS (1)..(444)
atggaatggtttgacgcttggacattttggcattggctgattttaggttttttattattgattgcagagataattgttccgggcgtttttttattatggtggggtttagccgctattattgtttcaatgatcaccatcattattgatttatctctgactatacagtgcgttatttatggcatcttagcaatagtgttgagtgtcgcatggtggaaatatcaacatactaaagatgaaaaagatcaggcaaattcttctttaaaccggcgagatcacgccatgttgggatgtcgaggtaaggttgaagtgatagccgaaaatggcattggtcgaggtgtttttggcgataccacttggcgtattcaaggtaaagggttgcaacaaggggatattattgaagttcaagctgtgaatggaattacgttgattgttcaaaaaaaataa

SEQ ID NO: 19596 - protein, 147 aa, Haemophilus somnus 129PT
MEWFDAWTFWHWLILGFLLLIAEIIVPGVFLLWWGLAAIIVSMITIIIDLSLTIQCVIYGILAIVLSVAWWKYQHTKDEKDQANSSLNRRDHAMLGCRGKVEVIAENGIGRGVFGDTTWRIQGKGLQQGDIIEVQAVNGITLIVQKK

SEQ ID NO: 19597 - DNA, 444 bp, Haemophilus somnus 2336
  CDS (1)..(444)
atggaatggtttgacgcttggacattttggcattggctgattttaggttttttattattgattgcagagataattgttccaggcgtttttttattatggtggggtttagccgctattattgtttcaatgatcaccatcattattgatttatctctgactatacagtgcgttatttatggcatcttagcaatagtgttgagtgtcgcatggtggaaatatcaacatactaaagatgaaaaagatcaggcaaattcttctttaaaccggcgagatcacgccatgttgggatgtctaggtaaggttgaagtgatagccgaaaatggcattggtcgaggtgtttttggcgataccacttggcgtattcaaggtaaagggttgcaacaaggggatattattgaagttcaagctgtgaatggaattacgttgatcgttcaaaaaaaataa

SEQ ID NO: 19598 - protein, 147 aa, Haemophilus somnus 2336
MEWFDAWTFWHWLILGFLLLIAEIIVPGVFLLWWGLAAIIVSMITIIIDLSLTIQCVIYGILAIVLSVAWWKYQHTKDEKDQANSSLNRRDHAMLGCLGKVEVIAENGIGRGVFGDTTWRIQGKGLQQGDIIEVQAVNGITLIVQKK

SEQ ID NO: 19599 - DNA, 453 bp, Pseudomonas aeruginosa UCBPP-PA14
  CDS (1)..(453)
atggaaatcctgctgctacgcctggacttctgggactggctggccttcggtaccgtcctcctgctcctggaaatcttcggtgccggcggctatctgctgcgggtcggcctcaccgccgcttgtgtcggtgcgctcggcgcgctcctgccgggactggcctggccctggcaggtagggctgttcgtcctgctctccgggctggtcgccgccttgcatcgacgccgtcgccgcaaggccggtagcgtcgaggaaacgccagggttgcagcgacgcggcgacgacctgttcggccgcacctttcccttgcaccgggcgatcgtcggcgggctcggcgagctgcgcgtcgaggacgcgttatggctggtcagcggtcccgacctgccgcgcggcgccctggtccgggtcaccggccaggacggcgccctgctgcacgtcgagcctgccgctccctga

SEQ ID NO: 19600 - protein, 150 aa, Pseudomonas aeruginosa UCBPP-PA14
MEILLLRLDFWDWLAFGTVLLLLEIFGAGGYLLRVGLTAACVGALGALLPGLAWPWQVGLFVLLSGLVAALHRRRRRKAGSVEETPGLQRRGDDLFGRTFPLHRAIVGGLGELRVEDALWLVSGPDLPRGALVRVTGQDGALLHVEPAAP

SEQ ID NO: 19601 - DNA, 495 bp, Psychrobacter sp. 273-4
  CDS (1)..(495)
atggagacgctttggatgatagaaccttggcattggctggtattgggctttttgttattgattgtcgagatgtttgtgccaacctttgctagcctttggtttggtgctgctgccatcatagtggctgcgcttacatggctgttgcctatctctatctccgtacaaattattatctggttactcctctccgctatattcttgctggcatggtttaaatttatcaaacctttatctgtagatcgtaccaaagcaggacttggtggcagtgtgatcgtcggtgaaacaggtatgattattgtgcagccacaggcagatagagcaggtatggtacgttttagtgtccctattgtgggtgccgctgaatggatgtgccgtacccgtggtgagcaagtggcagtcggtgatcgagtggtggtgacagatatcattggtaatgagctgattgtgagtagtatgaattcaagaacggctgtgagccaaaatacgcccgtataa

SEQ ID NO: 19602 - protein, 164 aa, Psychrobacter sp. 273-4
METLWMIEPWHWLVLGFLLLIVEMFVPTFASLWFGAAAIIVAALTWLLPISISVQIIIWLLLSAIFLLAWFKFIKPLSVDRTKAGLGGSVIVGETGMIIVQPQADRAGMVRFSVPIVGAAEWMCRTRGEQVAVGDRVVVTDIIGNELIVSSMNSRTAVSQNTPV

SEQ ID NO: 19603 - DNA, 471 bp, Erythrobacter litoralis HTCC2594
  CDS (1)..(471): transl_table=11
atgttcgacggcatcgaaccctattgggtatgggtgatcatcgggctggtgctggccgccctcgagatcctcgtacccggcgtctacctcatctggctggccgtggcggcgctgctcaccggcctgctgactttcgtgttcgatccgggcctgccgctgcagatcgtcaacttcgtcttcatcgccctgatcgccgctttcagcgccaagcgaatcctgcgcgatcgcccgatcgccagcgccgatccgctgatgaacaagcgcggcggacggctggtcggcgagacggcaatcgtggtgcaggccttcgaaggcggcaccggccgtatccatatcggcgacggcgactggctggccaagggcgtcgatctcgaaatcggcgagcgtgtgcgcgtcaccggccatgaaggcgcgatcctgctggtcgaaccgatgaacctgatcgaaaacacgccgcgcggcgagagctga

SEQ ID NO: 19604 - protein, 156 aa, Erythrobacter litoralis HTCC2594
MFDGIEPYWVWVIIGLVLAALEILVPGVYLIWLAVAALLTGLLTFVFDPGLPLQIVNFVFIALIAAFSAKRILRDRPIASADPLMNKRGGRLVGETAIVVQAFEGGTGRIHIGDGDWLAKGVDLEIGERVRVTGHEGAILLVEPMNLIENTPRGES

SEQ ID NO: 19605 - DNA, 447 bp, Sphingopyxis alaskensis RB2256
  CDS (1)..(447): transl_table=11
atgcccgactggctgaccaatatggagccgcattgggcgtggctgtcgctcggcgtgctgcttgccgccgccgaaatcgttgcgccgggcttcttcctcatctggatcggcgctgcggcgatcgtcaccggggtcatcgcctgggttgtgccgctcagcgtccctttccagctcggcatttttgccctgctgtccttcgtcgcgctctatggcgggcgccgctggctccggatgaacccgatcacgacgaccgacccccacctcaaccagcgcggcggccgcctcgtcggcgaggtgctgacggtgacgaaggcgatcgaggacggccgcggccgcgtgcgtgtcggcgatggcgaatggccggtgcgcggccccgacgccgccgagggcgcgaaggtgcgcgtggtgagcgccgacggcggggtgctggtggtcgagctggcgtaa

SEQ ID NO: 19606 - protein, 148 aa, Sphingopyxis alaskensis RB2256
MPDWLTNMEPHWAWLSLGVLLAAAEIVAPGFFLIWIGAAAIVTGVIAWVVPLSVPFQLGIFALLSFVALYGGRRWLRMNPITTTDPHLNQRGGRLVGEVLTVTKAIEDGRGRVRVGDGEWPVRGPDAAEGAKVRVVSADGGVLVVELA

SEQ ID NO: 19607 - DNA, 447 bp, Magnetococcus sp. MC-1
  CDS (1)..(447): transl_table=11
atgacactgtttgctgatattgccccccattgggcgtgggcgattgtggggttggtgctgattgggctggagatgtttgtctggagcacttttttgctgtggatgggtctttcggcttttgtagtgggggccattttttacgttgctccagattttccttgggcgtggtcggtggtgctctatggggttttatccctggtcgccatctatttggggcgcaaactgtttaagcctgcccaagcggatgacccagacgccttaaatgagcgtggtcagcgcatggtggggcagagctatgtggtggctgaagcgattgtgcatggccgtggcaaggtgcgggtgggggattccctctggctggcccagggggcggattgtccagcgggtacggtggtcacggtgacgtcggttaaaagcaccacccttatggtaacgttagcggagtag

SEQ ID NO: 19608 - protein, 148 aa, Magnetococcus sp. MC-1
MTLFADIAPHWAWAIVGLVLIGLEMFVWSTFLLWMGLSAFVVGAIFYVAPDFPWAWSVVLYGVLSLVAIYLGRKLFKPAQADDPDALNERGQRMVGQSYVVAEAIVHGRGKVRVGDSLWLAQGADCPAGTVVTVTSVKSTTLMVTLAE

SEQ ID NO: 19609 - DNA, 462 bp, Mesorhizobium sp. BNC1
  CDS (1)..(462): transl_table=11
atgctgatgagttttctcaccgatctcgggccgtggaactggatgctcctcggctttatccttcttgtgcttgagatcatcctcccaggggtcttcctgctctggataggcatcgcagcggtcctcaccggagcgctatcgctgcagctatgggacgtaagcttctggacctggcaggtgcaggtgctggttttcctcgccctatcgcttgtttccgcctttatcggcaagcgcgtgaccgatgcgcgccgcgaagaggacacggacgagcctctgctcaaccgccgggcggaacagctcgtcggccgcacagccgcccttgaagagccgatcagcggcggttacggccgcattcgcctgggcgacaccacgtggcgcgtgaccgggcccgacctgccggctggcacccgtgttcgcgtcgtctcggcgagaggcggcgatttacacgtggaaaaggaatag

SEQ ID NO: 19610 - protein, 153 aa, Mesorhizobium sp. BNC1
MLMSFLTDLGPWNWMLLGFILLVLEIILPGVFLLWIGIAAVLTGALSLQLWDVSFWTWQVQVLVFLALSLVSAFIGKRVTDARREEDTDEPLLNRRAEQLVGRTAALEEPISGGYGRIRLGDTTWRVTGPDLPAGTRVRVVSARGGDLHVEKE

SEQ ID NO: 19611 - DNA, 417 bp, Xylella fastidiosa Dixon
  CDS (1)..(417): transl_table=11
atgggatgggccgccgccgcactgctattgctcgctgccgaaacactgatacctggagcgttcatgctatggatggggattgcagcagcagctatgttcgtcggcgtgctgctgctcccggatacttcactgctactgcaaatgttcgcttttgttgttcttagcttcgtttcaatctatctctaccggacttggttccgcagtgtcgatcatgacagtgaccatccgctgctaaatcgccgtgctgatcagctagtcggtcgtatcatcatccttgatcacgctatcgttgacggcaacgctcgaatcaaaatagacgacacattttgggatatcactggtcctgatttacccatcggcactcaaatccgtatcgttgctttagatggcgcaacactcaaggtacaccccacttaa

SEQ ID NO: 19612 - protein, 138 aa, Xylella fastidiosa Dixon
MGWAAAALLLLAAETLIPGAFMLWMGIAAAAMFVGVLLLPDTSLLLQMFAFVVLSFVSIYLYRTWFRSVDHDSDHPLLNRRADQLVGRIIILDHAIVDGNARIKIDDTFWDITGPDLPIGTQIRIVALDGATLKVHPT

SEQ ID NO: 19613 - DNA, 498 bp, Psychrobacter cryohalolentis K5
  CDS (1)..(498): transl_table=11
atgatggagactctttggatgattgaaccttggcattggctagtattaggcttttcgctgctgatagtcgagatgtttgtgccaacctttgctagcctttggtttggtgccgctgctatcatagtggctgcgcttgcatggcttctgcctgtttcggtatccgtacaaatcattatctggttactcctctccgccatctttttgctggcatggtttaagtttatcaaacctttatcggttgatcgtactaaagcaggacttggtggcagtgtgatcgttggtgaaacaggtatgattattgcgcagccgcagccagatagggcgggcatggtgcgttttaatgtgcctattgtgggtgccactgaatggatgtgccgtactcgaggtgagcaagtggcagtcggtgatcgagtagtggtaacagatatcgttggtaacgagctgattgtgagtagcatgacatcgaaggcagctgtgaaccaaaatatgcgcgtataa

SEQ ID NO: 19614 - protein, 165 aa, Psychrobacter cryohalolentis K5
MMETLWMIEPWHWLVLGFSLLIVEMFVPTFASLWFGAAAIIVAALAWLLPVSVSVQIIIWLLLSAIFLLAWFKFIKPLSVDRTKAGLGGSVIVGETGMIIAQPQPDRAGMVRFNVPIVGATEWMCRTRGEQVAVGDRVVVTDIVGNELIVSSMTSKAAVNQNMRV

SEQ ID NO: 19615 - DNA, 417 bp, Xylella fastidiosa Ann-1
  CDS (1)..(417): transl_table=11
atgggatgggcagctgccgcactgctattgctcgctgccgaaacactgatacctggagcgttcatgctatggatggggattgcagcagcagctgtgttcgtcggcgtgctgctgctcccggatacttcactgctactgcaaatgttcgcttttgttgttcttagcttcgtttcaatctatctctaccggacttggttccgccgtgtcgatcatgacagtgaccatccgctgctaaatcgccgtgctgatcagctagtcggtcgtatcatcatccttgatcacgctatcgttgacggcaacgctcgaatcaaaatagacgacacattttgggatatcactggtcctgatttacccatcggcactcaaatccggatcgttgctttagatggcacaacactcaaggtacaccccacttaa

SEQ ID NO: 19616 - protein, 138 aa, Xylella fastidiosa Ann-1
MGWAAAALLLLAAETLIPGAFMLWMGIAAAAVFVGVLLLPDTSLLLQMFAFVVLSFVSIYLYRTWFRRVDHDSDHPLLNRRADQLVGRIIILDHAIVDGNARIKIDDTFWDITGPDLPIGTQIRIVALDGTTLKVHPT

SEQ ID NO: 19617 - DNA, 447 bp, Nitrobacter winogradskyi Nb
  CDS (1)..(447)
atgatcgacctgttggcgtcgctgggaaactggaactggctgatcctgggtctcgttctggtgggtcttgaactgctgacgccgggtgtcttcctgttctggctcggactggcggcatttctggtcggcgcgctgtcgttcgtggtggatccgacgtggcaaacgcaactcctgatgtttgccgtgttcgcggccgctgcggtgccgttatggcgtcggatggcgcgtcgggagtcgagcggcgccgccagcccgttcctcaaccggcgcgccgaagcgttggttggccgcgtgttcacgctggagaggccgatcgtggacgggacgggcacggtgcggatcgacgacacgatctggcgggtcgcgggaccggatgcgccagcggggagccgggtgaaagtcgtgaaggcggacggcgcgagcctcaccgtggccacggagccgtag

SEQ ID NO: 19618 - protein, 148 aa, Nitrobacter winogradskyi Nb
MIDLLASLGNWNWLILGLVLVGLELLTPGVFLFWLGLAAFLVGALSFVVDPTWQTQLLMFAVFAAAAVPLWRRMARRESSGAASPFLNRRAEALVGRVFTLERPIVDGTGTVRIDDTIWRVAGPDAPAGSRVKVVKADGASLTVATEP

SEQ ID NO: 19619 - DNA, 438 bp, uncultured bacterium 578
  CDS (1)..(438)
atggaaatgatatttgaaaatttaaactatatgcattggctcgtccttggtcttgctctagtaattattgaactctttttatggtcagtatttctgctctggattggggcttcagcaatcaccgtaagtattattttctatcttgcttctagcacctctggtgctatgcagttgctgatttttgttttaatatcaatatctgtaacctatttggcaatgaaatactaccccattaagacggttgatgacgagctcaataataaggctaagtcacatattggtaaagagtgtgaggtaatgtcaattaaaaatggtattgctaaggttcagataggcaagtcactttggtttgcaaagggtttagatcttaatgttggtcaaatagttcaaattgttgatgttgagtcttcaacgtttattgtcaagccatccaagtag

SEQ ID NO: 19620 - protein, 145 aa, uncultured bacterium 578
MEMIFENLNYMHWLVLGLALVIIELFLWSVFLLWIGASAITVSIIFYLASSTSGAMQLLIFVLISISVTYLAMKYYPIKTVDDELNNKAKSHIGKECEVMSIKNGIAKVQIGKSLWFAKGLDLNVGQIVQIVDVESSTFIVKPSK

SEQ ID NO: 19621 - DNA, 24 bp, Artificial sequence
  Primer sequence
atggagttaatggtcgttcatcca

SEQ ID NO: 19622 - DNA, 23 bp, Artificial sequence
  Primer sequence
ttaagacgagacggctcggatat

SEQ ID NO: 19623 - protein, 147 aa, Artificial sequence
  Consensus
  Variant (2)..(4): Xaa in position 2 to 4 is any amino acid
  Variant (6)..(6): Xaa in position 6 is any amino acid
  Variant (10)..(11): Xaa in position 10 to 11 is any amino acid
  Variant (14)..(18): Xaa in position 14 to 18 is any amino acid
  Variant (20)..(20): Xaa in position 20 is any amino acid
  Variant (21)..(21): Xaa in position 21 is any or no amino acid
  Variant (24)..(24): Xaa in position 24 is any amino acid
  Variant (27)..(27): Xaa in position 27 is any amino acid
  Variant (29)..(33): Xaa in position 29 to 33 is any amino acid
  Variant (35)..(42): Xaa in position 35 to 42 is any amino acid
  Variant (43)..(48): Xaa in position 43 to 48 is any or no amino acid
  Variant (50)..(52): Xaa in position 50 to 52 is any amino acid
  Variant (54)..(55): Xaa in position 54 to 55 is any amino acid
  Variant (58)..(81): Xaa in position 58 to 81 is any amino acid
  Variant (82)..(90): Xaa in position 82 to 90 is any or no amino acid
  Variant (94)..(97): Xaa in position 94 to 97 is any amino acid
  Variant (99)..(102): Xaa in position 99 to 102 is any amino acid
  Variant (103)..(106): Xaa in position 103 to 106 is any or no amino acid
  Variant (108)..(112): Xaa in position 108 to 112 is any amino acid
  Variant (114)..(117): Xaa in position 114 to 117 is any amino acid
  Variant (119)..(124): Xaa in position 119 to 124 is any amino acid
  Variant (125)..(128): Xaa in position 125 to 128 is any or no amino acid
  Variant (130)..(131): Xaa in position 130 to 131 is any amino acid
  Variant (133)..(134): Xaa in position 133 to 134 is any amino acid
  Variant (136)..(136): Xaa in position 136 is any amino acid
  Variant (138)..(141): Xaa in position 138 to 141 is any amino acid
  Variant (143)..(144): Xaa in position 143 to 144 is any amino acid
  Variant (146)..(146): Xaa in position 146 is any amino acid
WXXXGXLLLXXELXXXXXFXXLWXGLXAXXXXXLXXXXXXXXXXXXXXQXXXFXXLSXXXXXXXXXXXXXXXXXXXXXXXXXXXXXXXXXLVGXXXXLXXXXXXXXGXXXXXVXXXXWXXXXXXXXXXLXXGXXVXVXXXXGXXLXV

SEQ ID NO: 19624 - protein, 29 aa, Artificial sequence
  Consensus
  Variant (2)..(7): Xaa in position 2 to 7 is any amino acid
  Variant (8)..(9): Xaa in position 8 to 9 is any or no amino acid
  Variant (11)..(11): Xaa in position 11 is any amino acid
  Variant (12)..(13): Xaa in position 12 to 13 is any or no amino acid
  Variant (15)..(15): Xaa in position 15 is any amino acid
  Variant (16)..(16): Xaa in position 16 is Phe, Ile, Leu or Val
  Variant (17)..(18): Xaa in position 17 to 18 is any amino acid
  Variant (19)..(19): Xaa in position 19 is Ala, Gly, Asn, Ser or Thr
  Variant (20)..(22): Xaa in position 20 to 22 is any amino acid
  Variant (23)..(23): Xaa in position 23 is Phe, Ile, Leu or Val
  Variant (25)..(25): Xaa in position 25 is any amino acid
  Variant (26)..(26): Xaa in position 26 is Ala or Gly
  Variant (27)..(27): Xaa in position 27 is Ala, Ile, Leu or Val
  Variant (28)..(28): Xaa in position 28 is Ala, Gly or Ser
WXXXXXXXXLXXXEXXXXXXXXXWXXXXA

SEQ ID NO: 19625 - protein, 29 aa, Artificial sequence
  Consensus
  Variant (2)..(5): Xaa in position 2 to 5 is any amino acid
  Variant (6)..(6): Xaa in position 6 is Ala, Ile, Leu or Val
  Variant (7)..(12): Xaa in position 7 to 12 is any amino acid
  Variant (14)..(19): Xaa in position 14 to 19 is any amino acid
  Variant (20)..(20): Xaa in position 20 is any or no amino acid
  Variant (22)..(22): Xaa in position 22 is any amino acid
  Variant (23)..(24): Xaa in position 23 to 24 is any or no amino acid
  Variant (26)..(26): Xaa in position 26 is any amino acid
  Variant (27)..(27): Xaa in position 27 is Ala, Ile or Val
  Variant (28)..(28): Xaa in position 28 is any amino acid
  Variant (29)..(29): Xaa in position 29 is Ala, Cys, Gly, Ser or Thr
GXXXXXXXXXXXGXXXXXXXDXXXWXXXX

SEQ ID NO: 19626 - DNA, 1242 bp, Escherichia coli K12
  CDS (1)..(1242): transl_table=11
gtgtctaagcgtcgtgtagttgtgaccggactgggcatgttgtctcctgtcggcaataccgtagagtctacctggaaagctctgcttgccggtcagagtggcatcagcctaatcgaccatttcgatactagcgcctatgcaacgaaatttgctggcttagtaaaggattttaactgtgaggacattatctcgcgcaaagaacagcgcaagatggatgccttcattcaatatggaattgtcgctggcgttcaggccatgcaggattctggccttgaaataacggaagagaacgcaacccgcattggtgccgcaattggctccgggattggcggcctcggactgatcgaagaaaaccacacatctctgatgaacggtggtccacgtaagatcagcccattcttcgttccgtcaacgattgtgaacatggtggcaggtcatctgactatcatgtatggcctgcgtggcccgagcatctctatcgcgactgcctgtacttccggcgtgcacaacattggccatgctgcgcgtattatcgcgtatggcgatgctgacgtgatggttgcaggtggcgcagagaaagccagtacgccgctgggcgttggtggttttggcgcggcacgtgcattatctacccgcaatgataacccgcaagcggcgagccgcccgtgggataaagagcgtgatggtttcgtactgggcgatggtgccggtatgctggtacttgaagagtacgaacacgcgaaaaaacgcggtgcgaaaatttacgctgaactcgtcggctttggtatgagcagcgatgcttatcatatgacgtcaccgccagaaaatggcgcaggcgcagctctggcgatggcaaatgctctgcgtgatgcaggcattgaagcgagtcagattggctacgttaacgcgcacggtacttctacgccggctggcgataaagctgaagcgcaggcggtgaaaaccatcttcggtgaagctgcaagccgtgtgttggtaagctccacgaaatctatgaccggtcacctgttaggtgcggcgggtgcagtagaatctatctactccatcctggcgctgcgcgatcaggctgttccgccaaccatcaacctggataacccggatgaaggttgcgatctggatttcgtaccgcacgaagcgcgtcaggttagcggaatggaatacactctgtgtaactccttcggcttcggtggcactaatggttctttgatctttaaaaagatctaa

SEQ ID NO: 19627 - protein, 413 aa, Escherichia coli K12
MSKRRVVVTGLGMLSPVGNTVESTWKALLAGQSGISLIDHFDTSAYATKFAGLVKDFNCEDIISRKEQRKMDAFIQYGIVAGVQAMQDSGLEITEENATRIGAAIGSGIGGLGLIEENHTSLMNGGPRKISPFFVPSTIVNMVAGHLTIMYGLRGPSISIATACTSGVHNIGHAARIIAYGDADVMVAGGAEKASTPLGVGGFGAARALSTRNDNPQAASRPWDKERDGFVLGDGAGMLVLEEYEHAKKRGAKIYAELVGFGMSSDAYHMTSPPENGAGAALAMANALRDAGIEASQIGYVNAHGTSTPAGDKAEAQAVKTIFGEAASRVLVSSTKSMTGHLLGAAGAVESIYSILALRDQAVPPTINLDNPDEGCDLDFVPHEARQVSGMEYTLCNSFGFGGTNGSLIFKKI

SEQ ID NO: 19628 - DNA, 1212 bp, Caenorhabditis elegans
  CDS (1)..(1212)
atgcaccgtgttgttataacagggatgggtgcaatttcaccattcggtgttaccgttaatgcactacgaaacggtttgaacgagggaagaagtggcttgaaatacgatgaaattctcaaatttgtcgtcggtgcagttcctggagaacgggtggaagatcggtggagcactggacaacaaagagaaatgagtaaagcgagcatgttcgtgttagctgcatcagaagaagcattgaaacaggcaaaagctgaagatgtcgatcacaatgaaacattagttaatattggaacatgtatgtcagatctagaacatattggagaaactgcacaaaaagtgtcggaaggacaatcgagaagggtgtcaccatactttgttccgcgaattttgaataatcttccagctggatatgttgcaatgaaatataaaatgcgtggaggagtagaatcaacatcaactgcatgtgccactggacttcattgcattggaaactcatttcgatctattcgatacggagattctcgacgagctctggcaggagctgtagaatgtgctctcaatccaattgctctagctggttttgatagaatgagagcattggcaagaggtgatcaaccaaatattagtagacctttcgataagaaaagagctggatttgtaatgagtgaaggtgttggattagtatttatggaacgactagaagatgcacaggcacgtggagcacagattttagctgaagttgttggatatggaatatcatctgattgttatcatatttctacacctgatccatctgcaattggtgcagttctttcaatgaacagagcgataggaaatgcacatttggagccgaaagatattggatatgtaaatgctcatgcaacatcaacaccaaatggggatagtgtagaagcagaagctgtacgacaagtatttccagaacaaaatattgcagtgagcagtgtcaaaggacatattggacatcttcttggtgcagctggatcagttgaagcaattgcaacgatttttgcaatgaatgatgatgttttaccagcgaatcgaaatttagaagaaactgatgaaggaaatggattgaatcttctccgcgaaaatcaaaaatggtctgatgtttccggaaataaatcgcgaatctcaatttgtaattcatttggattcggtgccacaaatgctagtcttattttgaaacagttttga

SEQ ID NO: 19629 - protein, 403 aa, Caenorhabditis elegans
MHRVVITGMGAISPFGVTVNALRNGLNEGRSGLKYDEILKFVVGAVPGERVEDRWSTGQQREMSKASMFVLAASEEALKQAKAEDVDHNETLVNIGTCMSDLEHIGETAQKVSEGQSRRVSPYFVPRILNNLPAGYVAMKYKMRGGVESTSTACATGLHCIGNSFRSIRYGDSRRALAGAVECALNPIALAGFDRMRALARGDQPNISRPFDKKRAGFVMSEGVGLVFMERLEDAQARGAQILAEVVGYGISSDCYHISTPDPSAIGAVLSMNRAIGNAHLEPKDIGYVNAHATSTPNGDSVEAEAVRQVFPEQNIAVSSVKGHIGHLLGAAGSVEAIATIFAMNDDVLPANRNLEETDEGNGLNLLRENQKWSDVSGNKSRISICNSFGFGATNASLILKQF

SEQ ID NO: 19630 - DNA, 1329 bp, Saccharomyces cerevisiae
  CDS (1)..(1329)
atgtcaagaagagtggttatcacaggattgggctgtgtaacgccgttgggaagatcattaagtgagtcatgggggaatctgctctcttccaaaaatggactcacaccaatcacatctttgcccaactataatgaggactacaaactcagagaaaaaagtatcccatcaacgataacagtggggaagattccagagaattttcaaaacgaaaattcagccatcaataaactgctgttcactagccaggatgagagaagaacctcaagctttatcaagctagcactacgtacaacttatgaagcgcttcacaatgctggtctcttgaacccaaatgatataaccatcaatacatctctgtgcaatctggatcactttggttgcctgataggttctggtataggatccattcaagacatataccaaacttctctacaattccataacgacaataaaagaataaatccatatttcgtccctaaaatccttacaaatatggcagctggtaatgtttccatcaagtttaaccttagaggattatcccatagtgtttccacagcatgcgcaacaggtaataactccattggcgatgcattcaattttattcggttaggcatgcaagacatctgtgtcgccggtgcaagtgaaacgagtttgcatccgttaagtttagcaggtttcatcagagcaaagtcgattactacaaacgggatctctagaccctttgatacacaacgttctggattcgtacttggtgaaggatgcggaatgattgtcatggaatcgctagaacatgctcaaaagagaaatgcaaacataatttctgagctcgtgggctatggtttaagcagtgatgcctgccatattacctcccctcctgctgatggaaatggtgccaaaagagcaatagagatggctctaaaaatggctagattagaaccaactgatgttgactacgtcaatgcacatgctacatcaactttactaggcgataaagcagagtgtctggcagtagcctcagcactcttaccaggaagatccaaaagcaagccactgtacatatccagtaacaaaggtgcaattggccatcttttaggtgcacgtggcgccgtagaaagtatatttacaatttgttccttgaaggatgataagatgccgcataccttaaacctggacaatgttctgactctagaaaataacgaggccgataagctacatttcataagagacaaacctattgtgggagctaatccgaagtacgcattatgcaacagcttcggatttggaggagttaacacatctcttctcttcaagaaatgggaagggagttaa

SEQ ID NO: 19631 - protein, 442 aa, Saccharomyces cerevisiae
MSRRVVITGLGCVTPLGRSLSESWGNLLSSKNGLTPITSLPNYNEDYKLREKSIPSTITVGKIPENFQNENSAINKLLFTSQDERRTSSFIKLALRTTYEALHNAGLLNPNDITINTSLCNLDHFGCLIGSGIGSIQDIYQTSLQFHNDNKRINPYFVPKILTNMAAGNVSIKFNLRGLSHSVSTACATGNNSIGDAFNFIRLGMQDICVAGASETSLHPLSLAGFIRAKSITTNGISRPFDTQRSGFVLGEGCGMIVMESLEHAQKRNANIISELVGYGLSSDACHITSPPADGNGAKRAIEMALKMARLEPTDVDYVNAHATSTLLGDKAECLAVASALLPGRSKSKPLYISSNKGAIGHLLGARGAVESIFTICSLKDDKMPHTLNLDNVLTLENNEADKLHFIRDKPIVGANPKYALCNSFGFGGVNTSLLFKKWEGS

SEQ ID NO: 19632 - DNA, 1380 bp, Homo sapiens
  CDS (1)..(1380)
atgtccaactgcctgcaaaatttcctgaaaattacaagcactcgtcttctatgttcaagattatgccaacagttaagaagtaaaaggaagtttttcggaactgtgccaatatccagattgcataggcgagttgtcattacaggcattggcttagtgactcctcttggtgttggaactcacctggtttgggatcgtcttatcggaggagagagtggaattgtttcactggttggtgaagagtataagagtatcccttgcagtgttgctgcttatgtgccaagaggtagtgatgaaggtcagttcaatgaacaaaactttgtgtccaaatcagatatcaagtccatgtcttctcccaccatcatggccattggggctgcagaattagccatgaaggattctggctggcatcctcagtcagaagctgatcaagtggctactggtgttgcaattggcatgggaatgattcctcttgaagttgtttctgaaactgctttgaattttcagacaaaaggttacaataaagttagcccattttttgtccctaagattctggtcaatatggcagcaggccaggtcagcattcgatataaactcaagggcccaaatcatgcagtatccacagcctgtaccacaggagctcatgctgtgggagactcatttagatttatagcccatggtgatgctgatgtgatggtggctggaggtacagattcttgtattagccctttatctcttgctgggttttccagagcccgggctctgagcacaaactcagatcccaagttggcatgtcgaccatttcatccaaagagagatggttttgtaatgggagaaggtgcagctgtgctggtgctggaagaatatgaacatgctgttcaaagaagagcccggatctatgcagaagttttgggctatggactctcaggtgatgctggtcacataactgcccctgatcctgaaggagaaggtgccttaaggtgtatggctgctgctttaaaagatgcaggtgtgcagcctgaggagatatcctatatcaatgcacatgctacttccacaccattgggagatgctgctgaaaacaaagctatcaaacatctcttcaaagaccatgcatatgcccttgcagtttcctcaactaagggagcaacaggacatctgctgggagctgcaggggcagtcgaggcagcttttaccacattagcttgttattatcaaaaactaccacctactttaaacctggattgttcggaaccagaatttgatctcaactatgttccactaaaggcacaggaatggaaaactgagaaaagatttattggcctcaccaattcctttggttttggtggtactaatgcaacactttgtattgctggactgtag

SEQ ID NO: 19633 - protein, 459 aa, Homo sapiens
MSNCLQNFLKITSTRLLCSRLCQQLRSKRKFFGTVPISRLHRRVVITGIGLVTPLGVGTHLVWDRLIGGESGIVSLVGEEYKSIPCSVAAYVPRGSDEGQFNEQNFVSKSDIKSMSSPTIMAIGAAELAMKDSGWHPQSEADQVATGVAIGMGMIPLEVVSETALNFQTKGYNKVSPFFVPKILVNMAAGQVSIRYKLKGPNHAVSTACTTGAHAVGDSFRFIAHGDADVMVAGGTDSCISPLSLAGFSRARALSTNSDPKLACRPFHPKRDGFVMGEGAAVLVLEEYEHAVQRRARIYAEVLGYGLSGDAGHITAPDPEGEGALRCMAAALKDAGVQPEEISYINAHATSTPLGDAAENKAIKHLFKDHAYALAVSSTKGATGHLLGAAGAVEAAFTTLACYYQKLPPTLNLDCSEPEFDLNYVPLKAQEWKTEKRFIGLTNSFGFGGTNATLCIAGL

SEQ ID NO: 19634 - DNA, 1380 bp, Mus musculus
  CDS (1)..(1380)
atgttgtcaaaatgcttgcaacattttctaaaagccacaatctcccatccatatccagcgtcatattcttggttaataagcaaacacagattttatggaactgtgccagcagccatgttgcgcagacgagttgtcatcacaggcattggcctagtgacaccacttggcgttgggactcaactagtttgggatcggcttctccgaggagaaagtggaattgtttctgtggttggtgatgagtacaagaatatcccttgcagtgtagctgcttatgtaccaagaggtccacatgaaggtcagtttaatgaagaaaactttgtgtccaaatcagatgccaagtccatgtcttcttccaccatcatggctgttggggcagcagagttggccctgaaagactccggctggcatccgaaacgagaagcagatcaggtggctactggcgttgccattggcatgggcatggttcctcttgaagttatttctgaaactgctttgctgtttcagaccaaaggttataataaagtcagcccattctttgtccctaagattctgatcaatatggctgcaggccaggttagcattcgctacaaactcaagggccccaatcactcagtgtccacagcctgcaccacaggtgcacatgctgtgggagactcctttagattcatagcccatggtgacgcagatgtgatggtggctgggggcacagactcttgcattagtccattatctctcgctgggttttccagagcccgggctctgagctcaaacccagatcctaagctagcctgccggccgtttcatccagagagagatggttttgtcatgggtgagggagctgctgtgctggtgctggaagaacatgagcatgctgttcagagaggagctcggatctacgcagaaattttgggttatggactctcgggtgatgccggtcacataactgcccccgatcccgaaggagaaggtgctttaagatgcatggctgctgctgtaaaagatgcaggcgtatcacctgagcagatatcctatgtcaacgcacatgccacttccacaccactgggtgatgccgctgagaacagagccatcaagaggctctttagggaccatgcttgtgcccttgccatatcctccacgaagggagccactgggcatcttctgggtgctgcaggggcagttgaggcaacttttactgcactggcttgttaccaccagaaactcccaccaactttaaacctggattgtacagagcctgaatttgatctcaattatgttccactggagtcacaggaatggaaagctgagggtcggtgtattggactcaccaattcctttgggtttggtggtactaatgcaactctttgtattgctggcatgtaa

SEQ ID NO: 19635 - protein, 459 aa, Mus musculus [sequence omitted]

SEQ ID NO: 19636 - DNA, 1302 bp, Mesorhizobium loti MAFF303099
  CDS (1)..(1302): transl_table=11
atgcgacggattgttgttacaggcatgggagcggtcacgcccctagctgccaatgtcgaagcgtcatggtcgcgtctgctggccggtcgttcgggcatccgtaggcttccggacgatgtggtgggagacctgccggcgaagattggcggcgtggtgccctccttggatgaagatccgggcgctggtttcgatcctgatggcatcctggctgcgaaggatcagcgcagggtagatcggtttattctctttgcgctggcggcggcggaagaggcgcttgcacaggcgaaatggaagcctgccttggagacggatcgcctgcgcacagcaacgattatcgcttcaggggtcggcggattccccgccatcaccgaggcggtgcgcacggtcgatctgcgtggcgcccgccgcctgtcgcccttcacggtgccgtccttcctggtgaacctcgcagcgggccacatctcgatccgtcatggcttcaaaggcccattgggcgcaccagtgacagcgtgcgcggccggcatccaggcgatcggcgacgccgcccgtctcatccgcgcgaacgaggctgatattgccgtgtgcgggggcacggaagcatgcatgaacaccgtcagtctcggtgggtttgctgccgcacgctccctttcaaccggcttcaattgggcgccggctcaagcctcacgtcccttcgacatttcgcgggacggcttcgtcatgggcgaaggcgccggcgtgctggtcatcgaggcgttgggccacgcgctggcgcgcggcgcaaaaccgctcgccgagctcgtcggctacggaacgacggccgatgcttatcacgtcacttctggtcccgaggacggcggcggtgcgcgccgggccatggagatcgcgattgcgcaagcagggatttcaccgagcgaggttcgtcatctcaatgcacatgcgacctccacgccagtcggcgacctgggtgaaatcgaagcgatcaagagcgtattcgggcgcgatttagcgatagctgtcagcgcaacgaaatccgcgaccgggcacctgctgggcgcggccggcgggcttggtgccatcttctcgatcctggcgatcagggaccaggtggcaccgccgacactcaatttgagcgcacccgatccggccgccgacggcatcgacttcgtcgcaaacgagccccggccaatggagatggaatacgcaatctccaatggcttcggttttggcggcgtgaatgccagcgccttgttcaggcgctggatcgccccggcggcccgacgcgagcgccaggggcagtcatga

SEQ ID NO: 19637 - protein, 433 aa, Mesorhizobium loti MAFF303099
MRRIVVTGMGAVTPLAANVEASWSRLLAGRSGIRRLPDDVVGDLPAKIGGVVPSLDEDPGAGFDPDGILAAKDQRRVDRFILFALAAAEEALAQAKWKPALETDRLRTATIIASGVGGFPAITEAVRTVDLRGARRLSPFTVPSFLVNLAAGHISIRHGFKGPLGAPVTACAAGIQAIGDAARLIRANEADIAVCGGTEACMNTVSLGGFAAARSLSTGFNWAPAQASRPFDISRDGFVMGEGAGVLVIEALGHALARGAKPLAELVGYGTTADAYHVTSGPEDGGGARRAMEIAIAQAGISPSEVRHLNAHATSTPVGDLGEIEAIKSVFGRDLAIAVSATKSATGHLLGAAGGLGAIFSILAIRDQVAPPTLNLSAPDPAADGIDFVANEPRPMEMEYAISNGFGFGGVNASALFRRWIAPAARRERQGQS

SEQ ID NO: 19638 - DNA, 1263 bp, Mesorhizobium loti MAFF303099
  CDS (1)..(1263): transl_table=11
atgaggcgtgtcgtcgtcacgggccttgggttgttgtcgccattcggcatgggcttcgagcacagctggaaggaacttctgaccggccgcagcgcggccaagcgcatcaccgagttcgaggtggaggatcttgcctgcaagatcgcccacgtcgttccgcgtggtgacggcagcaatgccaccttcaatcctgaatccgtgctcgagccgaaggaattgcgcaagatcggtgacttcatcctgtacgggattgccgccgccgacgaagcgctgaaggattccggctgggagcccaagacccacgaggagcaatgcgccaccggcgtgctcatcggttccggcattggcggcatcgagggcatcgccgagaacgcgatgatcctcaaggaacgcggtccgcgccgcatcagccccttcttcatcccgggccagatcatcaatctcgtctccggccaggtttcgatccggcacgggctgaaaggtccgaaccatgccgtcgtcacggcctgctcgaccggcgcgcatgccattggcgatgcggcccggctgatcatgtggggcgatgccgacgtcatggtcgccggtggcgcggaggcgccggtgaccagactttcgatcgccggcttcgccgcctgccgggcgctgtcgaccgagcgcaatgacacgccgcagacggcgtcgcgtccctatgaccgtgaccgcgacggcttcgtcatgggcgagggcgccggtgttgtggtgctggaagaactcgagcacgccaaggcgcgcggcgccaagatttatgccgaggtgaccggctacggcctcaccggcgatgcctatcacatcaccgcaccggccgaagacggcgatggcgctttccgttgcatgaccgcggcgttgaaccgggccaagcttacgcccgccgatgtcgactacatcaacgcgcatggcacctcgaccatggccgacacgatcgaactcggcgctgtcgagcggcttgtcggcaacgccgcgtcgaagatttcgatgtcgtcgaccaagtcgtcgatcggccatctccttggtgcagcgggagccgccgaagcgatcttttcgatccttgcgatcagggacaatgtcgcgccggcgaccatcaacctcgacaatccagagcgcgaaaccgcgatcgacctggtgccgaacaagcctcgctcccgccagatcgacgttgcgctctccaattccttcggcttcggcggcacaaacgcatcgcttgtgttccagcgctacaatggctga

SEQ ID NO: 19639 - protein, 420 aa, Mesorhizobium loti MAFF303099
MRRVVVTGLGLLSPFGMGFEHSWKELLTGRSAAKRITEFEVEDLACKIAHVVPRGDGSNATFNPESVLEPKELRKIGDFILYGIAAADEALKDSGWEPKTHEEQCATGVLIGSGIGGIEGIAENAMILKERGPRRISPFFIPGQIINLVSGQVSIRHGLKGPNHAVVTACSTGAHAIGDAARLIMWGDADVMVAGGAEAPVTRLSIAGFAACRALSTERNDTPQTASRPYDRDRDGFVMGEGAGVVVLEELEHAKARGAKIYAEVTGYGLTGDAYHITAPAEDGDGAFRCMTAALNRAKLTPADVDYINAHGTSTMADTIELGAVERLVGNAASKISMSSTKSSIGHLLGAAGAAEAIFSILAIRDNVAPATINLDNPERETAIDLVPNKPRSRQIDVALSNSFGFGGTNASLVFQRYNG

SEQ ID NO: 19640 - DNA, 1245 bp, Clostridium acetobutylicum ATCC 824
  CDS (1)..(1245): transl_table=11
atgaggagagtcgttattacaggttatggtgttatttcgtcttccggtaatgatgtggatactttttggagtaacattgtcaatggaatatcgggaataagagaaataactgatccctcgttttcgaatattgcatctcgcattgccggatatataaatgattttaacccctatgaatatttcgataaaagagaaataaggcactatgacttatacactcaatatgcatttgcggcagcaaagcaagctattgacaatgcaaatgttaaggaaggtaactttgacacaagtcgtgttggtatttatgttggctctggaataggaggtattagcacagtactaaatagccataaggcttatttggagaagggtacacgccatgtgtcaccattcatgattcctatgatgattagcaacatggcttctggtgttatagcaataaaaactggatttaaagggccgagtttttctccggtgtccgcgtgtgcaacggctaatcaagctatcggagaagcatttttaagtatacggcatggatatacagatgcgattattgcaggtggctcagaagcccctattaatacgcttgcgttttcaggtttcgcaaatatgaaagctatgtcaactaataatgccaatccaaccgaggccagccgtccattcgataaactccgagatggatttgttatgtctgaaggtgccggtattctattcttagaagaattaacacatgccaaaagacgtggagcaaaaatattgggtgaaattattggatatggttctactacagacgcttaccatattacttcgccagactaccatggcgcggcacgggctatggagatggcactggagatggcggatatttcggcctctcagattgactatataaacgcccatgccacaggaacaaaaggtggagataaatctgaaaccaacgcaataaaagccgtatttaaggaaaacgtgaagaaactcaaaataagtgcaactaagtcaatgacaggacatttatttggagctgctggtggtattgaagccattattacactgaaagctttagaatacggcattatacctcctacaatcaatctgaaaaatgttgatgaagaatgtgaccttgattatgttcccaacaaagcgattaaacatgatagcaacttcgcgatttccaacggttttggctttggaggtcacaatgcttctcttctcttcaaaaaatggaatccagctatggaatattaa

SEQ ID NO: 19641 - protein, 414 aa, Clostridium acetobutylicum ATCC 824
MRRVVITGYGVISSSGNDVDTFWSNIVNGISGIREITDPSFSNIASRIAGYINDFNPYEYFDKREIRHYDLYTQYAFAAAKQAIDNANVKEGNFDTSRVGIYVGSGIGGISTVLNSHKAYLEKGTRHVSPFMIPMMISNMASGVIAIKTGFKGPSFSPVSACATANQAIGEAFLSIRHGYTDAIIAGGSEAPINTLAFSGFANMKAMSTNNANPTEASRPFDKLRDGFVMSEGAGILFLEELTHAKRRGAKILGEIIGYGSTTDAYHITSPDYHGAARAMEMALEMADISASQIDYINAHATGTKGGDKSETNAIKAVFKENVKKLKISATKSMTGHLFGAAGGIEAIITLKALEYGIIPPTINLKNVDEECDLDYVPNKAIKHDSNFAISNGFGFGGHNASLLFKKWNPAMEY

SEQ ID NO: 19642 - DNA, 1239 bp, Helicobacter pylori 26695
  CDS (1)..(1239): transl_table=11
gtgcgtcggattgtagtaactggaatgggaatgatcaattcgctaggtttaaataaagaagattcttttttagcgatcgctaaaggggaatgcggtatcaaacacatagaaagttttgatgcgagcgcgtttcctgtgcgtattgctggagaaatcactgactttgaccctacagaggtgatgaatcccaaagatgttaaaaaggcgggtcgtttcattcaattagccttgaaagccacaagagaggcgatgaaagatagtgggattttagacgctcacaatagatgccctgaagaattggcaaatcgcatgggcgtaagctctggctctgggattggcgggttaggcaatattgaagcgaattccattttttgttttgaaaaaggccctagaaaagtcaatccctttttcatcacttctgcgttagtgaatatgattggtggtttcacttccattgagtttggcattaaagggcctaatctctctagcgtaacggcttgtgcagcaggcactcatgccattattgaagccgttaaaaccattttgcttaatggggctgataaaatgctagtcgtgggagcggaatccaccatttgtcctgtagggattggggggtttgcgagcattaaagccctttctacaaggaatgatgatcctaaaaaagcttcaagaccttttgataaggatcgcaatggctttgtgatgggcgaaggcgctggggctttggtgcttgaagaatacgagagcgcgaaaagaagaggggcaaaaatttatgcagaatttgccgggtatggcgagagtggcgatgctaaccatatcacagccccagcccctgagggcgaaggggcttttagagccatgaagatggctttagaaatggcgaaagtggaaataggctatgtgaacgctcatgggactagcacgcattataacgatctatatgaaagcatcgctctaaaaaatgtgtttggttctaaagaaaaagtccctcctgtcagctccactaaagggcagattgggcattgcttgggtgctgcgggcgcgttagaagccgttatttctatcatggccatgaatcaaggaatcttacctcctaccatcaatcaagaaatgcctgacccagaatgcgatttggattatatccctaatgcggccagagaaaagcgagtggatgcagtgatgagtaactcatttggttttggtggcactaatggtgttgtgattttcaaaaaagcctag

SEQ ID NO: 19643 - protein, 412 aa, Helicobacter pylori 26695
MRRIVVTGMGMINSLGLNKEDSFLAIAKGECGIKHIESFDASAFPVRIAGEITDFDPTEVMNPKDVKKAGRFIQLALKATREAMKDSGILDAHNRCPEELANRMGVSSGSGIGGLGNIEANSIFCFEKGPRKVNPFFITSALVNMIGGFTSIEFGIKGPNLSSVTACAAGTHAIIEAVKTILLNGADKMLVVGAESTICPVGIGGFASIKALSTRNDDPKKASRPFDKDRNGFVMGEGAGALVLEEYESAKRRGAKIYAEFAGYGESGDANHITAPAPEGEGAFRAMKMALEMAKVEIGYVNAHGTSTHYNDLYESIALKNVFGSKEKVPPVSSTKGQIGHCLGAAGALEAVISIMAMNQGILPPTINQEMPDPECDLDYIPNAAREKRVDAVMSNSFGFGGTNGVVIFKKA

SEQ ID NO: 19644 - DNA, 1248 bp, Aquifex aeolicus VF5
  CDS (1)..(1248): transl_table=11
atgaagagaagagttgttatcaccggcatcggggcggttacgccccttggaacaggcgtaaagaagttctgggaaaaccttgtaaagggtgtaagcggtgttgattacataaagagctttaaccccgacgaatacggaatacccgtaaagatagcggcggaagtaaaggactttaatccagaagactttatggataaaaaagaggcgagaaaagcctcccgctttgtccagtttgcaatagctgcggtaaaggaagcccttgaagacagcggactccttgaaagtgagtacgacccttacagagtaggggtaattatagggacaggaattggcggtctcaaggatatagaagatcagactttaatccttaaagaaaagggagcgagaagggtatctccctttttcataccctacggcatatccaacatggcttcggggcttgtggccataaagtggggctttaaaggtccaaattactgcgtgacttccgcctgtgctacgggaaaccacgctataggagacgccttcagactcattcaaaagggtgatatagacattgctatagcgggaggaacggaagctgcgataacccccctcggtgttgcgggatttgcatccatgaaggcactctctacgaggaacgacgagccccagaaagcttcaagaccctttgacagggacagggacggcttcgtaatgggagaaggagcaggaatactgattttggaagaatacgagagggcaaaggcaaggggtgcgaagatatacgctgaactcgtgggctacggtgcaaccgacgacgcttaccacataacttccccccacgagtgcggtgagggagcttacgagtgcatgaggttagcactggaagacgctggaattaaacccgaagaggtggattacataaacgcccacggaacatcaacaccgctcaacgacaaaacagagacgatggcgataaagcagctcttcggagaacacgcatacaaacttaaaatttcttcaaacaagtccatgatagggcacctgctcggagccgcagcggctgtggaagctgtagcaacgataaaaaccatagaaactggagtgatacctcctaccattaacctggaaaaccccgatccagagtgtgatctggactacgttccaaacaaagccgtggaataccccgtaagggttgcactttctaacgcctttggttttggaggaactaacgcaacgctagtgttcagaaaaatagaagaatga

SEQ ID NO: 19645 - protein, 415 aa, Aquifex aeolicus VF5
MKRRVVITGIGAVTPLGTGVKKFWENLVKGVSGVDYIKSFNPDEYGIPVKIAAEVKDFNPEDFMDKKEARKASRFVQFAIAAVKEALEDSGLLESEYDPYRVGVIIGTGIGGLKDIEDQTLILKEKGARRVSPFFIPYGISNMASGLVAIKWGFKGPNYCVTSACATGNHAIGDAFRLIQKGDIDIAIAGGTEAAITPLGVAGFASMKALSTRNDEPQKASRPFDRDRDGFVMGEGAGILILEEYERAKARGAKIYAELVGYGATDDAYHITSPHECGEGAYECMRLALEDAGIKPEEVDYINAHGTSTPLNDKTETMAIKQLFGEHAYKLKISSNKSMIGHLLGAAAAVEAVATIKTIETGVIPPTINLENPDPECDLDYVPNKAVEYPVRVALSNAFGFGGTNATLVFRKIEE

SEQ ID NO: 19646 - DNA, 1257 bp, Chlamydia trachomatis D/UW-3/CX
  CDS (1)..(1257): transl_table=11
atgaacaaaaaacgtgtagtcgttacaggaatggggatcgtctcctgccttgggaatgaagtagaatctttctatgatagcctattggcgggaattagtggagtgcgaacaatcacgtcttttccctgcgatgattatgctacgcgttttgctggctggatagaagaatttaactcagagccttacttagataaaaaacaagctagacgagttgatccttttattacttatgcagttgtagctgcaaagaaggcaatagctatgtcccgttgggatcaagatactcttcccgcagattctcatcgttgtggggtgattattggttctggaatgggaggattacgaaccctggatgaggggattgaaaaactatcggctggaaatagaaaattatctccattctttattccttacatcattacgaatatggctccggctttaatcgcaatggattatgggttaatgggacctaattattctatttcaacagcctgtgcaacagcaaactactgtattgatgccgcttatcaacacctcattgagggtcgagcagatgttatcgtttgtggaggaactgaagcggctattaaccgtgttggtttagctggatttattgcgaatcgcgcattgtcagaaagaaatgatgctccagaacaagcttcgcgcccttgggatagggatcgagacggttttgttttgggggagggtgcaggaattcttgttttggaaacccttgataatgctttgaaaagaggggctccgatttttgcggaggtacttggcacatatacaacgtgcgatgcttttcatattactgctcctagagatgatggcgaaggaatcactgcctgtatattgggagccttgaataaggctgggattcctaaagaacgggtgaattatattaatgcacacggaacgtcgacgcctctaggggatctatcagaggtattggctttgaagaaagcttttggaagccacgtcaaaaacttgcgaatgaattcaacgaagtcgttgatagggcactgcttgggagctgcaggaggagtagaagctgttgcaaccattcaagccatccagactgggaagttgcacccaacaatcaatgtagaaaatccgatagcagaaatagaagaattcgatgtggttgcgaacaaagctcaagattgggatgtcgatgtagctatgtcaaattcttttggttttggcggacacaattcaacgatattattttcgaggtatgaaccttcattatga

SEQ ID NO: 19647 - protein, 418 aa, Chlamydia trachomatis D/UW-3/CX
MNKKRVVVTGMGIVSCLGNEVESFYDSLLAGISGVRTITSFPCDDYATRFAGWIEEFNSEPYLDKKQARRVDPFITYAVVAAKKAIAMSRWDQDTLPADSHRCGVIIGSGMGGLRTLDEGIEKLSAGNRKLSPFFIPYIITNMAPALIAMDYGLMGPNYSISTACATANYCIDAAYQHLIEGRADVIVCGGTEAAINRVGLAGFIANRALSERNDAPEQASRPWDRDRDGFVLGEGAGILVLETLDNALKRGAPIFAEVLGTYTTCDAFHITAPRDDGEGITACILGALNKAGIPKERVNYINAHGTSTPLGDLSEVLALKKAFGSHVKNLRMNSTKSLIGHCLGAAGGVEAVATIQAIQTGKLHPTINVENPIAEIEEFDVVANKAQDWDVDVAMSNSFGFGGHNSTILFSRYEPSL

SEQ ID NO: 19648 - DNA, 1281 bp, Rickettsia prowazekii str. Madrid E
  CDS (1)..(1281): transl_table=11
atgtcaaatcaaaacataaataaaagagtagttattactgggcttggacttgttacgcctgttgggcttaatgttagctcaacttggaaaaatattgtaggcggagtaagtggtataaaaactattacagaatttgacacttctaaacttgcgtgtaaaattgctggcgttatagataattctgagcaaaatggatttaaactagaaaattttacacaagcagatgatattaatagactaagtaaaatggataaatttatccattacggaatcgcagccgcaaccgaagcagttgaagatagcggctggttacccaaagatgaaaaatctcgtgatagaaccggcctgatattaggttcaggaatcggtggacttaaaatgattgaagatacctctattaaactttataaagaaaataacggcaaagttagccctttctttattccggcatcattaattaaccttttatctggtcttgtttctataaaatacggttttagtggcccgaatcaagcagcagtgacagcttgctctacaggcgcacatgctataggtgatgctatgcgtatgataaaacatggttatgccgatgttatgatcgcaggcggtgcagaggctccagttacacctgtcggaattgcaggttttgttgctgctagagcattatgtactaaatataacgataatcctgaaaaagcctcaagaccttgggataaagatcgaagtggttttgtgatgggtgagggagcaggcattgtagtcttagaagaatatgagcatgcaataaatcgtggagctaaaatttattgtgaagttataggatacggctctacaggtgatgcataccatatgacagctccacatcctaaaggtagaggagcttatagagcaatgagtgaagcattacaagatgctgatataactcctagtatgattgattatattaatgcacatggtacttctactcctcttggagacatgatcgaattagacgctacacaaaaattatttttagaatcgaatcccaaaattctaatgtcttctactaaatcatcaataggacatttgcttggtgcagcaggaagtgttgagtttatattttcagttcttacaattcgagatcagattgcaccaccaaccttaaacttagaaaaccctatagatgatgttaagatagatttagtaaaattcaaagctagagaaactgtaatagattacgtattatctaattcttttggcttcggcggtactaatgctagcttagtaattaagaagatttag

SEQ ID NO: 19649 - protein, 426 aa, Rickettsia prowazekii str. Madrid E
MSNQNINKRVVITGLGLVTPVGLNVSSTWKNIVGGVSGIKTITEFDTSKLACKIAGVIDNSEQNGFKLENFTQADDINRLSKMDKFIHYGIAAATEAVEDSGWLPKDEKSRDRTGLILGSGIGGLKMIEDTSIKLYKENNGKVSPFFIPASLINLLSGLVSIKYGFSGPNQAAVTACSTGAHAIGDAMRMIKHGYADVMIAGGAEAPVTPVGIAGFVAARALCTKYNDNPEKASRPWDKDRSGFVMGEGAGIVVLEEYEHAINRGAKIYCEVIGYGSTGDAYHMTAPHPKGRGAYRAMSEALQDADITPSMIDYINAHGTSTPLGDMIELDATQKLFLESNPKILMSSTKSSIGHLLGAAGSVEFIFSVLTIRDQIAPPTLNLENPIDDVKIDLVKFKARETVIDYVLSNSFGFGGTNASLVIKKI

SEQ ID NO: 19650 - DNA, 1239 bp, Helicobacter pylori J99
  CDS (1)..(1239): transl_table=11
gtgcgtcggattgtagtaactggaatgggaatgatcaattcgctaggtttaaataaagaagattcttttttagcgatcgctaaaggggaatgcggtatcaaaaacatagaaagttttgatgcgaatgcgtttcctgtgcgtatcgctggagaaatcactgactttgaccctacagaggtgatgaatcccaaagatgttaaaaaggcgggtcgtttcattcaattagccttgaaagccacaagagaggcgatgaaagatagtgggattttagacgctcacaatagatgccctgaagaattggcaaatcgcatgggtgtaagttctggctctgggattggcgggttaggcaatattgaagcgaattctattttttgttttgaaaaaggccctagaaaagtcaatccctttttcatcacttctgcgttagtgaacatgattggaggtttcacttccattgagtttggcattaaagggcctaacctctctagcgtaacggcttgtgcagcaggcactcatgcgattattgaagccgttaaaaccattttgctcaatggggctgatagaatgctggtcgtgggagcggaatccaccatttgtcctgtagggattggagggtttgcgagcattaaagccctttctacaaggaatgatgatcctaaaaaagcttcaagaccttttgataaggatcgcaatggctttgtgatgggcgaaggcgctggggctttagtgcttgaagaatacgagagcgcgaaaaaaagaggggctaaaatttatgcagaatttgccgggtatggcgagagcggcgatgctaaccacatcacagccccagcccctgagggtgaaggggcttttagagccatgaaaatggctttagaaatggcgaaagtggaagtaggctatgtgaacgcccatgggacaagcacgcattataacgattggtatgaaagcattgcgttaaaaaatgtgtttggctctaaagaaaaagtccctcctgttagctccactaaagggcagattgggcattgcttgggtgctgcgggcgcgttagaagccgttatttctatcatggccatgaatcaagggatcttacctcctaccattaatcaagaaacgcctgacccagaatgcgatctggattatatccctaatacagccagagaaaagcaagtgaatgcggtgatgagtaactcatttggttttggtggcactaatggtgttgtgattttcaaaaaagcctag

SEQ ID NO: 19651 - protein, 412 aa, Helicobacter pylori J99
MRRIVVTGMGMINSLGLNKEDSFLAIAKGECGIKNIESFDANAFPVRIAGEITDFDPTEVMNPKDVKKAGRFIQLALKATREAMKDSGILDAHNRCPEELANRMGVSSGSGIGGLGNIEANSIFCFEKGPRKVNPFFITSALVNMIGGFTSIEFGIKGPNLSSVTACAAGTHAIIEAVKTILLNGADRMLVVGAESTICPVGIGGFASIKALSTRNDDPKKASRPFDKDRNGFVMGEGAGALVLEEYESAKKRGAKIYAEFAGYGESGDANHITAPAPEGEGAFRAMKMALEMAKVEVGYVNAHGTSTHYNDWYESIALKNVFGSKEKVPPVSSTKGQIGHCLGAAGALEAVISIMAMNQGILPPTINQETPDPECDLDYIPNTAREKQVNAVMSNSFGFGGTNGVVIFKKA

SEQ ID NO: 19652 - DNA, 1239 bp, Thermotoga maritima MSB8
  CDS (1)..(1239): transl_table=11
ttgaagcgggtagttatcacgggtatgggtatcgtgagtccctttggtgttggaaaagagagaaatttagaaggacttagagaaactaaagtaacgatagatcgaatatcttcttttgatgcttctaaccttcccgtccagatcgccgcagaggtgagagatttcaaaccggaggagtacataaatccgaaactggtcaggagaacagaccgtttcgttcacttcgctctggtcagcgcgaaagaagctgtggaagacgccggtataaacttcgaaccgtacgccgacaggacagccaccatcataggatccggcatgggaggatttctgacgctcgacagcgagaacaacaaattcctgagtcagggtccaagcagagtcagtccgttcctgattccgatgatcctcatcgatatggcttccggtgtcgttgcaatggaatacggactgaaaggaccgaacttctcttctgtaagcgcctgtgcttcatccctccacgcggtagctctcggtgctctcctcataagacacggatacgcggatgtggcagtcgtcgggggaaccgaggcaacgattgctccacttcccatcaccgggtttgccaacatgagagcactctcaaggaggaacgacgatccaaagcgtgcttctcgtccgttcgataaagacagagacggctttgtgatgggtgaaggcggtgcggttctcatactcgaagccgaggaagtggcaaaatcgagaggagcgaaaattctcgcggagatcaagggagtgggtatgacggacgacgcgtaccacttcagtgctccagatccagagggcagaggggcagcagaagccatgaaactcgccctgaaagaatccagtctggctgtcgaagacatcgactacgtgagctgtcacgccacaagcacaccagcaggtgatgaagcggaactcaaagcgataaagaaagtccttggagaacacgtaaagaacgtcgccataaactcttcgaaagcccttataggacatctccttggtgccgccggtgcttccgaactcgttcttgccatccttcagatgcagaactctttcgtccacggcatgccgaaccttgacaatccgatcgacgaagcgaaaggaaccggccttgtcggtaaagaacccgttcagatggagatcaaaaacttcataaagaactcctttggtttcggcgggcacaacgtgtccatcgtggtggggaggtatgaatcatga

SEQ ID NO: 19653 - protein, 412 aa, Thermotoga maritima MSB8
MKRVVITGMGIVSPFGVGKERNLEGLRETKVTIDRISSFDASNLPVQIAAEVRDFKPEEYINPKLVRRTDRFVHFALVSAKEAVEDAGINFEPYADRTATIIGSGMGGFLTLDSENNKFLSQGPSRVSPFLIPMILIDMASGVVAMEYGLKGPNFSSVSACASSLHAVALGALLIRHGYADVAVVGGTEATIAPLPITGFANMRALSRRNDDPKRASRPFDKDRDGFVMGEGGAVLILEAEEVAKSRGAKILAEIKGVGMTDDAYHFSAPDPEGRGAAEAMKLALKESSLAVEDIDYVSCHATSTPAGDEAELKAIKKVLGEHVKNVAINSSKALIGHLLGAAGASELVLAILQMQNSFVHGMPNLDNPIDEAKGTGLVGKEPVQMEIKNFIKNSFGFGGHNVSIVVGRYES

SEQ ID NO: 19654 - DNA, 1245 bp, Vibrio cholerae O1 biovar eltor str. N16961
  CDS (1)..(1245): transl_table=11
gtgtccaagcgtcgcgttgttgtcactggcatgggtatgttgtcaccggtaggcaacactgtagagtcatcttggaaagccttgttggccggccaaagcggcatcgtcaacattgagcacttcgacactaccaatttttctactcgtttcgcaggcctggtaaaaggttttgactgcgaacagtacatgtcaaaaaaagatgctcgcaaaatggatttgtttatccagtatggtatcgctgcgggcattcaggctttggaagattcaggcctagaagttaatgaagaaaatgctgcgcgtattggcgttgcgattggttcgggtatcggcggccttgagctgattgaaaccggacatcaagctttaatcgagaaaggcccacgtaaggttagccctttcttcgttccctcaactattgtcaacatgattgccggtaacttgtctatcatgcgtggcttacgtggtcccaatattgcgatctctaccgcctgtaccacgggcttgcacaatatcggccatgcagcacgtatgattgcttacggtgatgcggatgcgatggttgcaggtggtgcagaaaaagcgtcaacgccactgggcatggcgggttttggtgcggcgaaagcactctcaactcgtaatgatgaaccgcaaaaagcgtctcgtccttgggataaagaccgtgatggtttcgtgctcggtgacggtgccggcatcatggtgcttgaagagtacgaacacgcgaaagcgcgtggcgcgaaaatttacgcagaagtggttggcttcggtatgtcaggtgatgcttatcatatgacttcaccgagtgaagacggctctggcggtgcgctggcgatggaagcggccatgcgtgatgcaggcgtgactggtgagcagattggttatgttaatgctcacggtacatctacccctgcgggcgatgtggctgaagtgaaaggcattaaacgtgcgttgggtgaagcagggactaagcaagttctggtttcttctaccaagtccatgacgggtcacttattaggtgctgcaggttctgtcgaagcgatcatcactgtgatgtctttggtggatcaaatggttccaccgaccatcaatctggataatcctgaagaaggtttgggtgtcgatttagtaccgcatgttgcccgtaaagttgagagtatggaatacgccatgtgtaactcgtttggctttggtggtactaacggtagcttgattttcaagcgcatgtaa

SEQ ID NO: 19655 - protein, 414 aa, Vibrio cholerae O1 biovar eltor str. N16961
MSKRRVVVTGMGMLSPVGNTVESSWKALLAGQSGIVNIEHFDTTNFSTRFAGLVKGFDCEQYMSKKDARKMDLFIQYGIAAGIQALEDSGLEVNEENAARIGVAIGSGIGGLELIETGHQALIEKGPRKVSPFFVPSTIVNMIAGNLSIMRGLRGPNIAISTACTTGLHNIGHAARMIAYGDADAMVAGGAEKASTPLGMAGFGAAKALSTRNDEPQKASRPWDKDRDGFVLGDGAGIMVLEEYEHAKARGAKIYAEVVGFGMSGDAYHMTSPSEDGSGGALAMEAAMRDAGVTGEQIGYVNAHGTSTPAGDVAEVKGIKRALGEAGTKQVLVSSTKSMTGHLLGAAGSVEAIITVMSLVDQMVPPTINLDNPEEGLGVDLVPHVARKVESMEYAMCNSFGFGGTNGSLIFKRM

SEQ ID NO: 19656 - DNA, 1236 bp, Bacillus halodurans C-125
  CDS (1)..(1236): transl_table=11
atgaatagacgtgtagttgttacggggatcggtgcagtgacaccacttggaaatacggcagaggaaacgtgggaaaaagccattgccggccaatctggggttggtctgttaacgcgtgtcgaagctgctgatttcccgatgaaagtagctgctgaagtaaaagaatttgatccgacaacgcatattgaccgaaaagaagcacggaaaatggaccgttttacgcaatttgcggtcgcttctgcattaatggcgttgaaggatgctgaccttgagatcacagaagacattgcaccacgagtcggggtctggattggctctggcatcggtgggatggaaacatacgaaaatcaatttagaatgtttatcgaaaaaggataccgtcgggtcagtccgtttttcgttccaatgatgattcctgatatggcttctggacaagtgtcaattataacaggtgccagaggaatcaactcttgctctgtaaccgcttgtgcatcaggagctaactcgataggtgatgcgtttaaagtcatccaacggggagatgctgatgtgatgattactgggggcgcagaggctccgatcacgaatatggctgttgctggttttagtatggcgaaggcgatttcaacaagcgaagatccaaacacggcgtcacgtccatttgatgcgaatcgagatggctttgttatgggagaaggctctggaattctcattcttgagtctctggaatctgctgaaaagcgtggggcgaagatttatgctgagattgtcggatatggcgcaacaggcgatgcttatcacgtgacacagcccgctccagaaggagaaggagcggcccgtgcgatgaagcaagccatcgaggatgcaggattgacgccagaagacattcaatacatgaacgctcatggaacgagcacgtattacaatgataaatacgaaacactagcagctaaacaagtgttcggtgaccatgtgaacaatttggctattagttcgacgaagtcaatgactggtcatttgctcggtgcagcaggcgctgtagaagcaatcttttcggtgaaggcgattgaagaggggattattcctccaacgattaactatgaaacgccagacccagattgtgatttggactatgttccaaatgaagctagaaagcagggcgtgaatgctgtattaagtaactcattaggctttggtggacataacgccaccctcgtctttaaaaaatatcaatag

SEQ ID NO: 19657 - protein, 411 aa, Bacillus halodurans C-125
MNRRVVVTGIGAVTPLGNTAEETWEKAIAGQSGVGLLTRVEAADFPMKVAAEVKEFDPTTHIDRKEARKMDRFTQFAVASALMALKDADLEITEDIAPRVGVWIGSGIGGMETYENQFRMFIEKGYRRVSPFFVPMMIPDMASGQVSIITGARGINSCSVTACASGANSIGDAFKVIQRGDADVMITGGAEAPITNMAVAGFSMAKAISTSEDPNTASRPFDANRDGFVMGEGSGILILESLESAEKRGAKIYAEIVGYGATGDAYHVTQPAPEGEGAARAMKQAIEDAGLTPEDIQYMNAHGTSTYYNDKYETLAAKQVFGDHVNNLAISSTKSMTGHLLGAAGAVEAIFSVKAIEEGIIPPTINYETPDPDCDLDYVPNEARKQGVNAVLSNSLGFGGHNATLVFKKYQ

SEQ ID NO: 19658 - DNA, 1221 bp, Pasteurella multocida subsp. multocida str. Pm70
  CDS (1)..(1221): transl_table=11
atgaaaagagcggttattactgggtttggtattatttcgagtattggcaacaataaagacgaagtattagcatcgttaaaagctggcaaatcaggtatcgaagtgatgcccgagtttgttgagattggcatgcgtagtcatgtggccggcacggttaaattaaatccaagtgagctgattgatcgtaaaatatatcgttttatgggggatgcggcagcttatgcttatctttcgatgaaagaggcgattgaagatgcaggtttgacagaagatcaagtatcgaacgatcgtactggcttggtgattggtgcgggaactggttcagcccataaccaattaatcgcctgtgatgcggtgcgtggtcctcgtggtgtgaaagcggtaggaccttatgcggtcactaaaacgatggcatccagtgtttcagcttgtttagcaacaccttacaaaattcgtggtgtgaactacagtattagttcagcttgtgcaacatcagcccattgtattggtcatgcgcttgagttaattcaattaggtaaacaagatattgtgtttgcgggtggcgcagaagaattatcttgggaatgtgcaactgagtttgatgcgatgggtgcggtatcgacaaaatacaacgataccccagaaaaagcgtcacgcgcttatgatgcgaaccgtgatggtttcgtcatcgcaggtggtggtgcagtggttgttgttgaagaattagagcatgctcttgcacgtggtgcgaaaatttatgctgaaatcgttggctatggcgctacatcagacggttatgacatggtggcgccaagtggtgaaggcgcggagcgttgtatgagacaagccatggcgacggttgatacaccaattgattacattaacgtccatggtacttctacaccagtaggagatgtgaaagagttaggtgcgattaaaaatgtttttggtgataaagtgccagctatctcatcaacgaaatcgatgaccggtcactctttaggtgcagcgggtgcgcacgaagcgatttacacgttattaatgttagacaatgattttattgcgccaagtatcaatatcgaaactctcgatgagaatgcaaaaggctgtaacattgtgaccgaaactgttgaaaatgccggcttgaaaactgtgatgtcaaatagctttggttttggtggaacaaacgcagcgttaattttcaaaaagtatcaagcataa

SEQ ID NO: 19659 - protein, 406 aa, Pasteurella multocida subsp. multocida str. Pm70
MKRAVITGFGIISSIGNNKDEVLASLKAGKSGIEVMPEFVEIGMRSHVAGTVKLNPSELIDRKIYRFMGDAAAYAYLSMKEAIEDAGLTEDQVSNDRTGLVIGAGTGSAHNQLIACDAVRGPRGVKAVGPYAVTKTMASSVSACLATPYKIRGVNYSISSACATSAHCIGHALELIQLGKQDIVFAGGAEELSWECATEFDAMGAVSTKYNDTPEKASRAYDANRDGFVIAGGGAVVVVEELEHALARGAKIYAEIVGYGATSDGYDMVAPSGEGAERCMRQAMATVDTPIDYINVHGTSTPVGDVKELGAIKNVFGDKVPAISSTKSMTGHSLGAAGAHEAIYTLLMLDNDFIAPSINIETLDENAKGCNIVTETVENAGLKTVMSNSFGFGGTNAALIFKKYQA

SEQ ID NO: 19660 - DNA, 1269 bp, Pseudomonas aeruginosa PAO1
  CDS (1)..(1269): transl_table=11
atgagcaaacgtatcgtcgtcaccggcatgggcgcggtcagcccgctgggctgcggagtcgaacccatatggcaacgcctgctggccgggcaatcgggcatcgccacgctcccggcggagctgatcggcgacctgcccatcagcatcggcggccaggtccccgaccgtgcccgggacccgcaggccggcttcgatcccgacctgctgctggccgccaaggaacaacgcaagatggaccgcttcatcctcttcgccctggccgccgcgcaagaggccctggcgcaggccggctgggcgccgcagagcgccgaggcgcaggagcgcacggcgaccgtcatcgcctccggggtgggcggcttccatgccatcgccgaagcggtgcggaccaccgacggcaaggggccgcgacgcctgtcgcccttcaccatcccgtcctttctctgcaacatggcggccgcccatgtgtcgatccgccatggcttcaagggaccgctgggcgccccggtgaccgcctgcgcggcgggcgtgcaagccatcggcgacgcggcgcggatgatccgcgcgggagaggtcgacgtggcgctctgcggcggcgcggaagcgaccatccaccgggtcagcctggccggcttcgccgccgcgcgcgccctgtccagcgatttcaacgacagccccgaacgcgcctcgcgccccttcgaccaggcccgcgacggcttcgtcatgggcgaaggcgccggcctactggtcatcgaggaactggagcacgccctggcgcgcggcgccaggcccatcgccgagctggtgggctacggcaccagcgccgacgcctaccacatgaccgccgggccggaagatggcagcggtgcccgccgggccatgcagcaggcgctgcgccaggccggcgtggaagcggccgcggtgcaacacctgaatgcccacgccacctccacccaggtaggcgacaagggcgaactggccgccatcaaggccgtgttcggcgccggcagcgggctcgccatcagcgcgaccaaatccgccaccggccacctcctgggcgccgccggcggcatcgaggcgatcttcacggtcctggcactgcgcgaccagctcgcccccgccacgctcaacctggaaacgcccgacaccgacgccgagggcctcgacctggttcgcggcgaagcccggcgctggccgatggaacacgcgctgtccaatggcttcggcttcggcggggtgaatgccagcctgttgttccggcgctgggtgtag

SEQ ID NO: 19661 - protein, 422 aa, Pseudomonas aeruginosa PAO1
MSKRIVVTGMGAVSPLGCGVEPIWQRLLAGQSGIATLPAELIGDLPISIGGQVPDRARDPQAGFDPDLLLAAKEQRKMDRFILFALAAAQEALAQAGWAPQSAEAQERTATVIASGVGGFHAIAEAVRTTDGKGPRRLSPFTIPSFLCNMAAAHVSIRHGFKGPLGAPVTACAAGVQAIGDAARMIRAGEVDVALCGGAEATIHRVSLAGFAAARALSSDFNDSPERASRPFDQARDGFVMGEGAGLLVIEELEHALARGARPIAELVGYGTSADAYHMTAGPEDGSGARRAMQQALRQAGVEAAAVQHLNAHATSTQVGDKGELAAIKAVFGAGSGLAISATKSATGHLLGAAGGIEAIFTVLALRDQLAPATLNLETPDTDAEGLDLVRGEARRWPMEHALSNGFGFGGVNASLLFRRWV

SEQ ID NO: 19662 - DNA, 1245 bp, Pseudomonas aeruginosa PAO1
  CDS (1)..(1245): transl_table=11
gtgtcgcgtagacgcgtcgtcattactggcatgggcatgctgtcgccgctgggcctggatgtcccgagcagttgggaaggtattctcgccggtcgcagcgggatcgccccgatcgagcatatggacctgtccgcctattccacccgcttcggtggttcggtcaagggtttcaatgtcgaggaatacctgtccgccaaggaagcccgcaagctcgacctgttcatccagtacggtctcgccgccagcttccaggccgttcgcgattccggcctggaggtcaccgacgccaatcgtgagcgtatcggcgtatccatgggttccggtatcggcggcctgaccaatatcgagaacaactgccgatccctgttcgagcaggggccgcggcgcatctcgccgttcttcgtgcccggttcgatcatcaacatggtttccggcttcctgtcgatccacctgggtctgcaggggcccaactacgccctcaccaccgcctgcaccaccggtacccacagcattggcatggctgctcgcaacatcgcctatggcgaggccgacgtgatggtcgccggcggttccgaaatggctgcctgcggtctcggcctgggtggtttcggcgcggctcgcgcgctctccactcgcaacgacgagccgacccgtgccagccgtccgtgggaccgggatcgcgacggcttcgtcctgtccgacggttccggcgccctggtgctcgaagaactggagcacgcccgtgcccgcggcgcgcggatctatgccgagctggttggcttcggcatgagcggcgacgccttccacatgaccgcgccgccggaagacggcgccggtgccgcccgctgcatgaagaacgcgctgcgcgatgccggcctggatcctcgtcaggtcgattacatcaacgcccatggcacctccaccccggccggcgacatcgccgagatcgccgcggtgaagagcgtgttcggcgagcatgcccatgcgctgtcgatgagttcgaccaagtcgatgaccggccacctgttaggtgccgccggtgcggtggaggcgatcttcagcgtgctggccctgcgcgaccaggtcgccccgccgaccatcaacctggacaacccggacgaaggttgcgacctcgacctggtggcccatgaagccaagccgcgcaagatcgacgtggccctgtcgaactcgttcggtttcggcgggaccaacggcaccctggtgttccgcaggttcgccgactga

SEQ ID NO: 19663 - protein, 414 aa, Pseudomonas aeruginosa PAO1
MSRRRVVITGMGMLSPLGLDVPSSWEGILAGRSGIAPIEHMDLSAYSTRFGGSVKGFNVEEYLSAKEARKLDLFIQYGLAASFQAVRDSGLEVTDANRERIGVSMGSGIGGLTNIENNCRSLFEQGPRRISPFFVPGSIINMVSGFLSIHLGLQGPNYALTTACTTGTHSIGMAARNIAYGEADVMVAGGSEMAACGLGLGGFGAARALSTRNDEPTRASRPWDRDRDGFVLSDGSGALVLEELEHARARGARIYAELVGFGMSGDAFHMTAPPEDGAGAARCMKNALRDAGLDPRQVDYINAHGTSTPAGDIAEIAAVKSVFGEHAHALSMSSTKSMTGHLLGAAGAVEAIFSVLALRDQVAPPTINLDNPDEGCDLDLVAHEAKPRKIDVALSNSFGFGGTNGTLVFRRFAD

SEQ ID NO: 19664 - DNA, 1230 bp, Lactococcus lactis subsp. lactis Il1403
  CDS (1)..(1230): transl_table=11
atgacaaatagagttgttatctctggttatggtgtagttagtgcaattggaaatagcccagaagaattttggaacaatcttaaagctggtaaaactggaattggtccaatcactcactttgatgctgaagcaacagggatttctgttgcagcagaagtaaaagaatttccatttgataaatatttccagaaaaaagatgcacgacgcatggatactttctcactttatgcggtttatgcagcacttgatgcaatggaaatgtctggtattacagaagaaaatactaattttgaccgtttgggctgtatcatggcttctgggattggtggacttgaacaatcacaaaaaaattcacaagcaattgtcgctaaaggccctcgtaaaggggtagcaccactctacgttccacttgctattgctaatatggcaactggtaacgttgctttacgtacaggtgctcgtggggtttcgcgtgctgaagtaacggcttgtgcggctggtgctaattcaattggttcagctttccgtgaaatcaaacatggttacgctgatgcaatgattgctggtggtgctgaagcggctatttgtgaacttggaattgcaggttttgctaatttgactgctttgactaaagaaactgaccctgaaaaagcatgtattccattcgataaaaatcgttcaggatttgtaatgggcgaaggttctggtgtattgattttggaaagccttgaacatgcacaagctcgtggcgctaatatcttggctgagattgttggatacggaaatacaaatgatgctttccatatgacaactccttcaggagtgggtgctgaaaatgcgattaaattggctttggaagaagctggtgcaagtccagctgatgttgattacgttaatgcacacggaacttcaacacatgccaatgaagaaactgaaagcaaagcaattcacaatgtaattggcgataaagcttatgtttcatctacaaaagcattgcacggtcatgcacttggtgcaacaggtgcaattgaagcagtggcaactgttcaagcacttttgaatcaatatgcaccagtaaatgctggaacaactgaacttgatgaaggaatgacaattaatgttgttcttggtgaaggtaaacctgctgatattaatcttgcattgtcgcaagactttggtttcggtggacacaatgctgtattggcattcaagaaatggactggagagtaa

SEQ ID NO: 19665 - protein, 409 aa, Lactococcus lactis subsp. lactis Il1403
MTNRVVISGYGVVSAIGNSPEEFWNNLKAGKTGIGPITHFDAEATGISVAAEVKEFPFDKYFQKKDARRMDTFSLYAVYAALDAMEMSGITEENTNFDRLGCIMASGIGGLEQSQKNSQAIVAKGPRKGVAPLYVPLAIANMATGNVALRTGARGVSRAEVTACAAGANSIGSAFREIKHGYADAMIAGGAEAAICELGIAGFANLTALTKETDPEKACIPFDKNRSGFVMGEGSGVLILESLEHAQARGANILAEIVGYGNTNDAFHMTTPSGVGAENAIKLALEEAGASPADVDYVNAHGTSTHANEETESKAIHNVIGDKAYVSSTKALHGHALGATGAIEAVATVQALLNQYAPVNAGTTELDEGMTINVVLGEGKPADINLALSQDFGFGGHNAVLAFKKWTGE

SEQ ID NO: 19666 - DNA, 1248 bp, Neisseria meningitidis MC58
  CDS (1)..(1248): transl_table=11
atgagtcagagaagagtagtcattacaggcttaggtcaggtttcccctgtcggcaacactgtcgcagaggcttgggacaccctgctcaccggcaaaagcggcatcggcgcgattacccgctttgacacatccgacatcaacagccgtgtcgccggcgaggtgcgcggtttcgacatcggacaatacatcagcgcgaaagaagcgcgccggatggacgtattcatccactacggcattgccgccgcattgcaggcaatcgccgattcgggtttggacgatgtggaaaacctcgacaaagaccgcatcggcgtgaacatcggttccggcatcggcggactgcccggcatcgaggtcaccggcaaagccgtaatcgaaggcggcgcgcgcaaaatcaaccctttctttatccccggttctctgattaatctgatttccggacacgttaccatcctcaaaggctaccgcggcccgagctacgggatggtttccgcctgcaccaccggcgcgcacgccatcggcgattccctccgtatgattaaatacggcgacgcggacataatggttgccggcggcgcggaaggcgcaatcagcactttgggcgtgggcggttttgccgcgatgaaagccctctccacccgcaacgacgaccccgccaccgcttcccgtccgtgggacaaaggccgcgacggcttcgttatcggcgaaggcgcgggcatattggtgttggaagaattggaacacgccaaaaaacgcggcgcgaaaatctacgccgaaatcgtcggcttcggcatgagttccgatgcttaccatatcaccgcgccgaacgaagaaggccccgcccttgccgttacccgcgcgctgaaagatgccggcatcaatcccgaagacgtggattacgtcaacgcgcacggcacgtccacccccttgggcgatgccaacgaaaccaaagccctcaaacgcgcgttcggcgaacacgcctacaaaaccgtcgtcagctcgaccaaatccatgaccggccacctgctcggcgcggcgggcggcgtggaggccgtgtacagcattttggcgatacacgacggcaaaatcccgccgaccatcaacatttttgaacaagacgttgaagccggctgcgatttggactactgcgccaacgaagcgcgcgacgcggaaatcgacgttgccatttccaactccttcggcttcggcggcaccaacggcacgctggtcttcaaacgcttcaaaggctga

SEQ ID NO: 19667 - protein, 415 aa, Neisseria meningitidis MC58
MSQRRVVITGLGQVSPVGNTVAEAWDTLLTGKSGIGAITRFDTSDINSRVAGEVRGFDIGQYISAKEARRMDVFIHYGIAAALQAIADSGLDDVENLDKDRIGVNIGSGIGGLPGIEVTGKAVIEGGARKINPFFIPGSLINLISGHVTILKGYRGPSYGMVSACTTGAHAIGDSLRMIKYGDADIMVAGGAEGAISTLGVGGFAAMKALSTRNDDPATASRPWDKGRDGFVIGEGAGILVLEELEHAKKRGAKIYAEIVGFGMSSDAYHITAPNEEGPALAVTRALKDAGINPEDVDYVNAHGTSTPLGDANETKALKRAFGEHAYKTVVSSTKSMTGHLLGAAGGVEAVYSILAIHDGKIPPTINIFEQDVEAGCDLDYCANEARDAEIDVAISNSFGFGGTNGTLVFKRFKG

SEQ ID NO: 19668 - DNA, 1215 bp, Campylobacter jejuni subsp. jejuni NCTC 11168
  CDS (1)..(1215): transl_table=11
ttgaaaagagttgtagttacaggtattggtatgatcaatgcccttggtttagataaagaaagttcatttaaagcaatttgcaatggagaaagcggagtaaataaaattactctttttgatgctacggactttcctgttcaaattgcagctgaagttaaaaattttgatccattagaggttgttgatggcaaagaagtaaaaaaaattgaccgtttcatacaacttggaattaaagcagcaagagaagcaatgcaggatgctggatttagtgaagaattagataaagaagaatttggcattgtttcggcttctggtattggaggtttgcctaacatagaaaaaaattccattatttgttccgagcgaggtccgcgtaaaatttccccttttttcataccttcagcacttgtaaatatgttaggaggtttgatttctatagagcatggacttaaagggccaaatatttcttgtgttacagcttgtgcagcaggaactcatgctataggagaagcttataaaagtatagctttgggaaatgctaaaaagatgttagtcataggtgcagaagctgcgatttgtcctgtgggtataggtggttttgcttcaatgaaagctttatcaactagaaatgaagatccacagcatgcttcaagaccatttgacaaagaaagagatggttttgtcatgggagaaggtgctggagctttagtttttgaggaatatgaagaggctaaaaaacgcggtgctacgatttatgctgaattaattggatttggagaaagtgcagatgcgcatcatattacttcaccaactttagatgggcctttaagggctatgaaaaaagctttaaatatggcagggaatccaaaggtagattatatcaatgcacatggaacttcaacccctgtaaatgacaaaaatgaaacagcagcaattaaagagctttttggcaataatatcccgcttataagttccaccaaaggacaaacaggtcattgcttgggtgctgcaggtgcaattgaagcagttgttagtgttatggttttaagagatggggtagttccacctacaatcaatcagcttgtaaaagatgatgaatgtgatcttgattatattccaaatatatcaagaaaagtagatttaaaagtggtgatgagtaattcttttggttttggtggcacaaatggctgtgttgtatttaaaaaagtagattaa

SEQ ID NO: 19669 - protein, 404 aa, Campylobacter jejuni subsp. jejuni NCTC 11168
MKRVVVTGIGMINALGLDKESSFKAICNGESGVNKITLFDATDFPVQIAAEVKNFDPLEVVDGKEVKKIDRFIQLGIKAAREAMQDAGFSEELDKEEFGIVSASGIGGLPNIEKNSIICSERGPRKISPFFIPSALVNMLGGLISIEHGLKGPNISCVTACAAGTHAIGEAYKSIALGNAKKMLVIGAEAAICPVGIGGFASMKALSTRNEDPQHASRPFDKERDGFVMGEGAGALVFEEYEEAKKRGATIYAELIGFGESADAHHITSPTLDGPLRAMKKALNMAGNPKVDYINAHGTSTPVNDKNETAAIKELFGNNIPLISSTKGQTGHCLGAAGAIEAVVSVMVLRDGVVPPTINQLVKDDECDLDYIPNISRKVDLKVVMSNSFGFGGTNGCVVFKKVD

SEQ ID NO: 19670 - DNA, 1248 bp, Neisseria meningitidis Z2491
  CDS (1)..(1248): transl_table=11
atgagtcagagaagagtagtcattacaggcttaggtcaggtttcccctgtcggcaacactgtcgcagaggcttgggacaccctgctcgccggcaaaagcggcatcggcgcgattacccgctttgacgcatccgacatcaacagccgtgtcgccggcgaagtgcgcggtttcgacatcggacaatacatcagcgcgaaagaagcgcgccggatggacgtattcatccactacggcattgccgccgcattgcaggcaatcgccgattcgggtttggacgatgtggaaaacctcgacaaagaccgcatcggcgtgaacatcggttccggcatcggcggactgcccagcatcgaggtcaccggcaaagccgtaatcgaaggcggcgcgcgcaaaatcaaccctttctttatccccggttcgctgatcaacctgatttccggacacgttaccatcctcaaaggctaccgcggcccgagctacgggatggtttccgcctgtaccaccggcgcgcacgccatcggcaattccgcccgactgatcaaatacggcgacgcggacataatggttgccggcggcgcggaaggcgcaatcagcactttgggcgtgggcggttttgccgcgatgaaagccctctccacccgcaacgacgaccccgccaccgcttcccgtccgtgggacaaaggccgcgacggcttcgttatcggcgaaggcgcgggcatattggtgttggaagaattggaacacgccaaaaaacgcggcgcgaaaatctacgccgaaatcgtcggcttcggcatgagttccgatgcttaccatatcaccgcgccgaacgaagaaggccccgcccttgccgttacccgcgcgctgaaagatgccggcatcaatcccgaagacgtggattacgtcaacgcgcacggcacgtccacccccttgggcgatgccaacgaaaccaaagccctcaaacgcgcgttcggcgaacacgcctacaaaaccgtcgtcagctcgaccaaatccatgaccggccacctgctcggcgcggcgggcggcgtggaggccgtgtacagcattttggcgatacacgacggcaaaatcccgccgaccatcaacatttttgaacaagacgttgaagccggctgcgatttggactactgcgccaacgaagcgcgcgacgcggaaatcgacgttgccatttccaactccttcggcttcggcggcaccaacggcacgctggtcttcaaacgcttcaaaggctga

SEQ ID NO: 19671 - protein, 415 aa, Neisseria meningitidis Z2491
MSQRRVVITGLGQVSPVGNTVAEAWDTLLAGKSGIGAITRFDASDINSRVAGEVRGFDIGQYISAKEARRMDVFIHYGIAAALQAIADSGLDDVENLDKDRIGVNIGSGIGGLPSIEVTGKAVIEGGARKINPFFIPGSLINLISGHVTILKGYRGPSYGMVSACTTGAHAIGNSARLIKYGDADIMVAGGAEGAISTLGVGGFAAMKALSTRNDDPATASRPWDKGRDGFVIGEGAGILVLEELEHAKKRGAKIYAEIVGFGMSSDAYHITAPNEEGPALAVTRALKDAGINPEDVDYVNAHGTSTPLGDANETKALKRAFGEHAYKTVVSSTKSMTGHLLGAAGGVEAVYSILAIHDGKIPPTINIFEQDVEAGCDLDYCANEARDAEIDVAISNSFGFGGTNGTLVFKRFKG

SEQ ID NO: 19672 - DNA, 1287 bp, Deinococcus radiodurans R1
  CDS (1)..(1287): transl_table=11
atgtgggctttcaatgttcaatttgggacttcaaaaggagacgacatgatttctggactcaaacgggtcgttatcaccggcctcggcccggtcacgcccatcggcgtcggggcaaaggcctacgccgaggcgcagcgggccggcaaaaacggcatcgggccgatcacgcgcttcgacgccaaagacacggcgagcaaaatcgcgggcgaagtgcacgacagcctcgacgatttcgtggatccccgcgaggcccgcaaactcgaccgctacaccctgctggccctgagcgccgccgaactcgcggtgcgcgacagtggcctgagcgccgaggacctgcgcggcgagcgcaccggcacgctggtcggcagcggcatcggcggcatgaagaccttcgaggaccaggcccgcgtgtacgtggagcgcggcgctggacgcatttcacccatgttcatccctatgcagattgccaacatggcgaccggccacatcgccatgcgctacggcgcaatggggccgagcagcaccgtcgtcaccgcctgcgccaccggcaccggggcgattggcgaagcggcccgttacatccaactcggcctggccgacgtgatgctcgcgggcggcgcggaggcctccattacggcgatggcggtgggcggcttttccaacatgaaggcgctctcgacccgcaacgacgaccccgagcacgccagccggcccttttctgccacccgcgacggcttcgtgctcagcgagggcgcgggcgtggtggtcctcgaagaatacgagcacgccaaagcccgcggcgcgaccatctacgccgaagtcgccgggtttggcgtgagtgccgacgcctaccacatcaccatgccagccccgcagggcgcgggcgcgcagctcgccatgaaaatggccctgcacacggcgggcgtgaaccccgagcaggtggggtacatcaacgcgcacggcaccagcacccatttcaacgacctgcacgagacgcaggccattcagcacgtgtttggcgaccacgcggcgcagctcgcggtcagctccaccaagtccatgaccgggcacctgctcggcgcagcgggcgcgattgaagcgattgccgtggcgcaggccctcgccgacgggctgctgccccccaccatcaacctgaccgaccccgaccccgagctgcccctcgacttcatccccgagggcgcccgcgagcggcaggtggactacgcgctgagcaactcgttcgccttcggtggacagaacgcggcgctgctgctgggacgggtctga

SEQ ID NO: 19673 - protein, 428 aa, Deinococcus radiodurans R1
MWAFNVQFGTSKGDDMISGLKRVVITGLGPVTPIGVGAKAYAEAQRAGKNGIGPITRFDAKDTASKIAGEVHDSLDDFVDPREARKLDRYTLLALSAAELAVRDSGLSAEDLRGERTGTLVGSGIGGMKTFEDQARVYVERGAGRISPMFIPMQIANMATGHIAMRYGAMGPSSTVVTACATGTGAIGEAARYIQLGLADVMLAGGAEASITAMAVGGFSNMKALSTRNDDPEHASRPFSATRDGFVLSEGAGVVVLEEYEHAKARGATIYAEVAGFGVSADAYHITMPAPQGAGAQLAMKMALHTAGVNPEQVGYINAHGTSTHFNDLHETQAIQHVFGDHAAQLAVSSTKSMTGHLLGAAGAIEAIAVAQALADGLLPPTINLTDPDPELPLDFIPEGARERQVDYALSNSFAFGGQNAALLLGRV

SEQ ID NO: 19674 - DNA, 1257 bp, Chlamydia muridarum Nigg
  CDS (1)..(1257): transl_table=11
atgaacaaaaaacgtgtagtcgttacgggaatggggatagtctcctgccttgggaatgaagtagaatctttctatgatagcctgttggctggaattagtggggtgcggacaatcacatctttcccctgcgatgattatgctacgcgttttgcaggttggatagaggaatttaactcggagccttatttagataaaaaacaagctcgacgagtagacccttttattacatatgctgttgtggctgcaaagaaagcaatagctatgtctcgttgggatcaagagactcttcctgcgaatcctcatcgttgcggagtgatcattggatctgggatgggggggcttcggacccttgatgaggggatcgaaaaattatcagcagggaatagaaaactgtctccattctttattccttatatcattactaatatggctcctgccttgatcgctatggattatggtttaatggggccaaactattctatttcaacagcctgtgcaacggccaactattgtattgatgctgcttatcaacatctcgttgaagggcgtgcggatgtcatcgtttgtggagggactgaggctgccattaatcgtgttggcttggctggatttattgctaatcgcgcattgtcggaaagaaatgatgctcctgaacaggcatcgcgtccctgggaccgggatcgggatggttttgtgctaggagaaggggctggcgtcctggtcttagaaaccctggataatgctttaaaaagaggggctccaatttttgctgaagtgcttggaacctatacaacgtgcgacgcttttcatattactgctcctagagatgatggtgaaggaatcactgcctgtatactaggagctttgaataaagctggtattcctaaagaacgggtgaattacattaatgcgcacggaacttccactccattaggagatctgtcagaggtattggctttgaaaaaggcttttggaagtcatatcaaaaacttgcgcatgaattcgaccaagtctttgatagggcactgcttaggagctgcaggtggggtagaagctgttgcgactattcaagccattcagacagggaagttgcacccaacaatcaatatagaaaatcctatagcagaaatagaagagtttgatgtagttgcgaataaatcccaggattgggatgtggatgttgctatgtcgaattcctttggtttcggcggacataattcaacgatattattttcgaggtatgaaccttcattatga

SEQ ID NO: 19675 - protein, 418 aa, Chlamydia muridarum Nigg
MNKKRVVVTGMGIVSCLGNEVESFYDSLLAGISGVRTITSFPCDDYATRFAGWIEEFNSEPYLDKKQARRVDPFITYAVVAAKKAIAMSRWDQETLPANPHRCGVIIGSGMGGLRTLDEGIEKLSAGNRKLSPFFIPYIITNMAPALIAMDYGLMGPNYSISTACATANYCIDAAYQHLVEGRADVIVCGGTEAAINRVGLAGFIANRALSERNDAPEQASRPWDRDRDGFVLGEGAGVLVLETLDNALKRGAPIFAEVLGTYTTCDAFHITAPRDDGEGITACILGALNKAGIPKERVNYINAHGTSTPLGDLSEVLALKKAFGSHIKNLRMNSTKSLIGHCLGAAGGVEAVATIQAIQTGKLHPTINIENPIAEIEEFDVVANKSQDWDVDVAMSNSFGFGGHNSTILFSRYEPSL

SEQ ID NO: 19676 - DNA, 1236 bp, Xylella fastidiosa 9a5c
  CDS (1)..(1236): transl_table=11
atgaatcgtcgggttgtcgttactgggatggggatggtgtcgccattgggcaatgatttgaccacaagttgggatggcatcgttcacggacgttcgggtatcgctcccatcgtccagattgatgcttctaagttatccacgcagattgctggcgaaatcaagggattcgatccaatgaagttcgtatccgcaaaggatgcgaagaaaatggattcgttcatttactatggtataggcgcagcgtttatggcgctggatgatgcaggtttggagattaatgagatcaatgctgagcgtgttggtgccttgatcggttctggtattggtggcgtgtttggtattgaggaacagaccatcaagttctatgaggggggcgtacgcaagatatcccctttctatgtgccatcgacgatcatcaacatgctgccaggacagttgagtgttttgaaaggcttgaaaggcccgacgttctctgcggtatctgcctgcgcgacttcaaaccactccattggtatggcaatgcgcatgatccagtatggtgatgctgatgtcatgttggctggtggttctgagcgcgcttcttcgccaactgcgattggtggcttttgtgcgatgagggcgatgtctacgcgtaacgatgatccaaccggcgcttcgcggccgtgggacaaggggcgcgatggctttgtgcttggtgatggtgccggcattctagtgctggaagagtatgagtatgctaaagcgcgaggcgcacgcatctatgctgaattggctggtttcggcgccacttccgatgccttccacatgacgatgccggtcgaggatggtgaaggtgcagcgcgttgtatgcgcatagcgttgcaggatgcgaaggttactccggagcaaattgattatctcaatgcacacggtacctcaactcctttgggcgatctgtgcgaaaccaacgcgatcaagacggtattaggagatcatgcctacaaagtgatggttagctcgaccaaatcaatgaccggacatctactcggtgcggccggtggtgtggaagcaattttctcagtgatggcgttgcatactggcatcgttccgccgacgattaatctcgaagaaccagacgaaggctgtgatcttgattacgtgccgcatgtggcgcgtgaggccaaactggatgtggtggtttcaaacggttttggtttcggtggtactaacggcacattagtgttcaagcgtatatga

SEQ ID NO: 19677 - protein, 411 aa, Xylella fastidiosa 9a5c
MNRRVVVTGMGMVSPLGNDLTTSWDGIVHGRSGIAPIVQIDASKLSTQIAGEIKGFDPMKFVSAKDAKKMDSFIYYGIGAAFMALDDAGLEINEINAERVGALIGSGIGGVFGIEEQTIKFYEGGVRKISPFYVPSTIINMLPGQLSVLKGLKGPTFSAVSACATSNHSIGMAMRMIQYGDADVMLAGGSERASSPTAIGGFCAMRAMSTRNDDPTGASRPWDKGRDGFVLGDGAGILVLEEYEYAKARGARIYAELAGFGATSDAFHMTMPVEDGEGAARCMRIALQDAKVTPEQIDYLNAHGTSTPLGDLCETNAIKTVLGDHAYKVMVSSTKSMTGHLLGAAGGVEAIFSVMALHTGIVPPTINLEEPDEGCDLDYVPHVAREAKLDVVVSNGFGFGGTNGTLVFKRI

SEQ ID NO: 19678 - DNA, 1236 bp, Streptococcus pneumoniae TIGR4
  CDS (1)..(1236): transl_table=11
atgaaactaaatcgagtagtggtaacaggttatggagtaacatctccaatcggaaatacaccagaagaattttggaatagtttagcaactgggaaaatcggcattggtggcattacaaaatttgatcatagtgactttgatgtgcataatgcggcagaaatccaagattttccgttcgataaatactttgtaaaaaaagataccaaccgttttgataactattctttatatgccttgtatgcagcccaagaggctgtaaatcatgccaatcttgatgtagaggctcttaatagggatcgttttggtgttatcgttgcatctggtattggtggaatcaaggaaattgaagatcaggtacttcgccttcatgaaaaaggacccaaacgtgtcaaaccaatgactcttccaaaagctttaccaaatatggcttctgggaatgtagccatgcgttttggtgcaaacggtgtttgtaaatctatcaatactgcctgctcttcatcaaatgatgcgattggggatgccttccgctccattaagtttggtttccaagatgtgatgttggtgggaggaacagaagcttctatcacaccttttgccatcgctggtttccaagccttaacagctctctctactacagaggatccaactcgtgcttcgatcccatttgataaggatcgcaatgggtttgttatgggtgaaggttcagggatgttggttctagaaagtcttgaacacgctgaaaaacgtggagctactatcctggctgaagtggttggttacggaaatacttgtgatgcctaccacatgacttctccacatccagaaggtcagggagctatcaaggccatcaaactagccttggaagaagctgagatttctccagagcaagtagcctatgtcaatgctcacggaacgtcaactcctgccaatgaaaaaggagaaagtggtgctatcgtagctgttcttggtaaggaagtacctgtatcatcaaccaagtcttttacaggacatttgctgggggctgcgggtgcagtagaagctatcgtcaccatcgaagctatgcgtcataactttgtaccaatgacagctgggacaagtgaagtatcagattatatcgaagctaatgtcgtttatggacaaggcttggagaaagaaattccatacgctatttcaaatacttttggttttggaggccacaatgcagttcttgctttcaaacgttgggagaatagataa

SEQ ID NO: 19679 - protein, 411 aa, Streptococcus pneumoniae TIGR4
MKLNRVVVTGYGVTSPIGNTPEEFWNSLATGKIGIGGITKFDHSDFDVHNAAEIQDFPFDKYFVKKDTNRFDNYSLYALYAAQEAVNHANLDVEALNRDRFGVIVASGIGGIKEIEDQVLRLHEKGPKRVKPMTLPKALPNMASGNVAMRFGANGVCKSINTACSSSNDAIGDAFRSIKFGFQDVMLVGGTEASITPFAIAGFQALTALSTTEDPTRASIPFDKDRNGFVMGEGSGMLVLESLEHAEKRGATILAEVVGYGNTCDAYHMTSPHPEGQGAIKAIKLALEEAEISPEQVAYVNAHGTSTPANEKGESGAIVAVLGKEVPVSSTKSFTGHLLGAAGAVEAIVTIEAMRHNFVPMTAGTSEVSDYIEANVVYGQGLEKEIPYAISNTFGFGGHNAVLAFKRWENR

SEQ ID NO: 19680 - DNA, 1236 bp, Clostridium acetobutylicum ATCC 824
  CDS (1)..(1236): transl_table=11
atgaataggagagttgttataacaggaattggagcagtaacacctgttggaaataacgctgacagcttttggtgctcaatcaaagaaggaaaatgtggtatagataaaataaaagcttttgatgcaacagattttaaggtgaagttagcagcagaagttaaggattttaccccagaagattttattgacaaaagagaagctaatagaatggatagattctcacaatttgcaatagtagcagcagatgaagcaataaaggattcaaagcttgatcttgaaagtatagataaaaatagatttggagttatagtaggttcaggtataggcggtattggtactatagagaaacaggatgaaaagcttattacaaaaggaccaggcagagtatcaccaatgactataccaatgattattgcaaatatggcatctggaaatttagctataagatatggagcaaaggggatatgcacaactatagtaacagcatgtgcttcggctaataattccataggagagtcttttagaaacataaaatttggatattcagatgtaatgataagtggtggtagcgaagcaggaataactccgctttcacttgcaggttttgcatctatgaaggctgttacaaaaagtgaagaccctaaaagagcatctattccatttgataaggatagaagtggttttgtaatgggcgaaggttcaggaattgttatccttgaagaattagaacatgcacttaaaagaggagctaaaatatatgctgaaatagtaggttatggagcaacttgtgatgcatatcatataacttcaccagcaccaaatggcgagggcggagctagagcaatgaaacttgcaatggaagaggacaatgtaagaccagaagatatttcgtatataaatgctcatggaacaagtacagcttataatgatagttttgaaactcaagctataaaaactgttttaggagaatatgcatataaggttcctgtaagttcaacaaaatcaatgacaggtcatttacttggtgcagggggagcagtagaagcaatcatatgtgctaaggctatagaagaaggatttattccaccaactattggatacaaagaagcagatcctgaatgtgaccttgattatgtaccgaacgaaggaagaaacgcagaagttaattatgtgttatccaattcacttggttttggcggacataatgctacacttttgtttaaaaaatataaataa

SEQ ID NO: 19681 - protein, 411 aa, Clostridium acetobutylicum ATCC 824
MNRRVVITGIGAVTPVGNNADSFWCSIKEGKCGIDKIKAFDATDFKVKLAAEVKDFTPEDFIDKREANRMDRFSQFAIVAADEAIKDSKLDLESIDKNRFGVIVGSGIGGIGTIEKQDEKLITKGPGRVSPMTIPMIIANMASGNLAIRYGAKGICTTIVTACASANNSIGESFRNIKFGYSDVMISGGSEAGITPLSLAGFASMKAVTKSEDPKRASIPFDKDRSGFVMGEGSGIVILEELEHALKRGAKIYAEIVGYGATCDAYHITSPAPNGEGGARAMKLAMEEDNVRPEDISYINAHGTSTAYNDSFETQAIKTVLGEYAYKVPVSSTKSMTGHLLGAGGAVEAIICAKAIEEGFIPPTIGYKEADPECDLDYVPNEGRNAEVNYVLSNSLGFGGHNATLLFKKYK

SEQ ID NO: 19682 - DNA, 1329 bp, Agrobacterium tumefaciens str. C58
  CDS (1)..(1329): transl_table=11
gtgctatcccatggtgcccggtgttgcagaaagaccgatgatttggataagggcggagcattggcgatgaggcgtgtcgttatcaccggtaccggcatggtatctcctcttggatgcggaacggaagtgacctgggagcggctgttggccggccagaatggtgcccgtctcgtgactgaattcgaggtcgaagacctgcccgcaaagatcgcctgccgcattcccgtcggcgacggctccaacggcaccttcaatgccgatgactggatggagcccaaggaacaacgcaaggtcgatcctttcattctctacggcatggctgccgccgacatggcgcttgccgacgcaaactggcatccggaaacggacgacgaccagatcgctaccggcgttctgatcggctccggcattggcggtctggaaggcattgtcgaggcgggttacacgctgcgcgacaagggcccacgccgcatttctccattcttcattcccggccgtctgatcaacctcgtatccggtcaggtttccattcgccacaagctgcgtggaccgaatcattccgtggtaacggcctgctcgaccggcgcacacgctatcggcgacgccgcccgactgatcgcgcttggcgatgccgaggtcatggtcgccggtggtgccgaatcgccggtctgccgcatttcgctcgccggatttgccgcctgcaaggcgctctccacccagcacaatgacgatccgcaaaaggcctcgcgcccctatgatcgcgaccgcgacggtttcgtcatgggcgagggtgccggcatcgttgttctcgaagaactcgaacacgccaaggcgcgcggcgcgaagatttacgccgaagtcgtcggttatggcctgtccggcgatgccttccacatcacggcgccgtccgaggatggcgacggtgcgtatcgctgcatgtccatggcgctgaagcgcgctggcctcacgcctgacgatatcgactatatcaacgcccacggcacctccaccatggccgacacgatcgagcttggcgcggtcgaacgtctggtcggcgaatctgctccgaagatttccatgtcttccaccaagtcggccaccggccatcttctcggcgctgccggcgcaatcgaggcgattttcgcgacgcttgcgatccgcgacaatatcgttccgccgacgctcaacctcgacaatcccgatgtcgagacgaagatagacctcgtgccgcacaaggcccgcaagcggcaggtcaatgtggcgctttcgaattccttcggtttcggcggcaccaacgcatcgctcgtgctgcgtcgttacgaagcataa

SEQ ID NO: 19683 - protein, 442 aa, Agrobacterium tumefaciens str. C58
MLSHGARCCRKTDDLDKGGALAMRRVVITGTGMVSPLGCGTEVTWERLLAGQNGARLVTEFEVEDLPAKIACRIPVGDGSNGTFNADDWMEPKEQRKVDPFILYGMAAADMALADANWHPETDDDQIATGVLIGSGIGGLEGIVEAGYTLRDKGPRRISPFFIPGRLINLVSGQVSIRHKLRGPNHSVVTACSTGAHAIGDAARLIALGDAEVMVAGGAESPVCRISLAGFAACKALSTQHNDDPQKASRPYDRDRDGFVMGEGAGIVVLEELEHAKARGAKIYAEVVGYGLSGDAFHITAPSEDGDGAYRCMSMALKRAGLTPDDIDYINAHGTSTMADTIELGAVERLVGESAPKISMSSTKSATGHLLGAAGAIEAIFATLAIRDNIVPPTLNLDNPDVETKIDLVPHKARKRQVNVALSNSFGFGGTNASLVLRRYEA

SEQ ID NO: 19684 - DNA, 1383 bp, Agrobacterium tumefaciens str. C58
  CDS (1)..(1383): transl_table=11
atgtctggagaaatgatcctgaccctgttctcggtcgggacgccgaaggcatgcctattttatcgtgaagacaggtggaaacagatgcgtcgtatcgttgtaacaggaatgggagccgtcagccctcttggcgcgaatgtggatatctcatggtcgcggctccttgctggccaaagcgggatccggcgactgaccgacgatgtcgtcggagatcttcctgcgaaagtgggaggcgttgtcccttctctcgccgaagacccagaaagaggattcgatccggacaggatcattgcacccaaggatcagcgcaaggtcgaccgcttcatcatcttcgcgctggcggcggcggaagaagcgctcgtgcaggcaaactggaagccggtctcgaatgaagacaggttgcgaaccgcgacaatcatcgcatccggcatcggcggtttccctgccatcacggaagccgtgcgaaccgttgatcaacgcggtgtacgccgcctctctcccttcacgataccgtcgttcctcgtcaatctcgcagccgggcaagtctcgatccgccacggtttcaaaggtccgctgggagcacccgtaacggcgtgtgctgccggcgttcaggcgatcggcgacgctgcacggcttatccggtccaatgaagccgacattgcggtttgcggtggaacggaagcttgcatgaacatcgtcagcctcggcggcttcgcggcggcaaggtcgctttccaccggtttcaacgagacgccgaccaaggcgtcgcgtcccttcgataccgcgcgtgacggcttcgtcatgggtgaaggcgcgggcgtactcgtcatcgaggcactcagccacgctctcgcccgcggagccaccccgattgccgaactcgttggatacggcacgacagccgacgcccaccacatcacgtcaggccccgaggatggaagtggggcacgcagggccatggagattgccatcgcgcaagcgggcatcgcccctcatgagattggtcatctgaacgcgcatgcgacatcgacgccggttggggacctcggagaaatcagggccatcaagagtgtgtttgggcaacgaaagtcggttgctgtcagtgggaccaagtcggcgacggggcacctgcttggcgcggccggcgggctggaagccatcttcacgattctagcgctcaaaaatcggatcgcccctccgacactgaacctgaacgcgccggatacggaatcggacgggatcgattttgttgcaaacctggcacgatccctggacgctgaatatgccatatccaacggcttcggttttggcggcgtcaatgccagcgttcttttccgacgttggccaaaggcaagcaatagcgggatatcctccgtgcgctga

SEQ ID NO: 19685 - protein, 460 aa, Agrobacterium tumefaciens str. C58
MSGEMILTLFSVGTPKACLFYREDRWKQMRRIVVTGMGAVSPLGANVDISWSRLLAGQSGIRRLTDDVVGDLPAKVGGVVPSLAEDPERGFDPDRIIAPKDQRKVDRFIIFALAAAEEALVQANWKPVSNEDRLRTATIIASGIGGFPAITEAVRTVDQRGVRRLSPFTIPSFLVNLAAGQVSIRHGFKGPLGAPVTACAAGVQAIGDAARLIRSNEADIAVCGGTEACMNIVSLGGFAAARSLSTGFNETPTKASRPFDTARDGFVMGEGAGVLVIEALSHALARGATPIAELVGYGTTADAHHITSGPEDGSGARRAMEIAIAQAGIAPHEIGHLNAHATSTPVGDLGEIRAIKSVFGQRKSVAVSGTKSATGHLLGAAGGLEAIFTILALKNRIAPPTLNLNAPDTESDGIDFVANLARSLDAEYAISNGFGFGGVNASVLFRRWPKASNSGISSVR

SEQ ID NO: 19686 - DNA, 1245 bp, Streptococcus pneumoniae R6
  CDS (1)..(1245): transl_table=11
gtgaaaagaatgaaactaaatcgagtagtggtaacaggttatggagtaacatctccaatcggaaatacaccagaagaattttggaatagtttagcaactgggaaaatcggcattggtggcattacaaaatttgatcatagtgactttgatgtgcataatgcggcagaaatccaagattttccgttcgataaatactttgtaaaaaaagataccaaccgttttgataactattctttatatgccttgtatgcagcccaagaggctgtaaaccatgccaatcttgatgtagaggctcttaatagggatcgttttggtgttatcgttgcatctggtattggtggaatcaaggaaattgaagatcaggtacttcgccttcatgaaaaaggacccaaacgtgtcaaaccaatgactcttccaaaagctttaccaaatatggcttctgggaatgtagccatgcgttttggtgcaaacggtgtttgtaaatctatcaatactgcctgctcttcatcaaatgatgcgattggggatgccttccgctccattaagtttggtttccaagatgtgatgttggtgggaggaacagaagcttctatcacaccttttgccatcgctggtttccaagccttaacagctctctctactacagaggatccaactcgtgcttcgatcccatttgataaggatcgcaatgggtttgttatgggtgaaggttcagggatgttggttctagaaagtcttgaacacgctgaaaaacgtggagctactatcctggctgaagtggttggttacggaaatacttgtgatgcctaccacatgacttctccacatccagaaggtcagggagctatcaaggccatcaaactagccttggaagaagctgagatttctccagagcaagtagcctatgttaatgctcacggaacgtcaactcctgccaatgaaaaaggagaaagtggtgctatcgtagctgttcttggtaaggaagtacctgtatcatcaaccaagtcttttacaggacatttgctgggggctgcgggtgcagtagaagctatcgtcaccatcgaagctatgcgtcataactttgtaccaatgacagctgggacaagtgaagtatcagattatatcgaagctaatgtcgtttatggacaaggtttggagaaagaaattccatacgctatttcaaatacttttggttttggaggccacaatgcagttcttgctttcaaacgttgggagaatagataa

SEQ ID NO: 19687 - protein, 414 aa, Streptococcus pneumoniae R6
MKRMKLNRVVVTGYGVTSPIGNTPEEFWNSLATGKIGIGGITKFDHSDFDVHNAAEIQDFPFDKYFVKKDTNRFDNYSLYALYAAQEAVNHANLDVEALNRDRFGVIVASGIGGIKEIEDQVLRLHEKGPKRVKPMTLPKALPNMASGNVAMRFGANGVCKSINTACSSSNDAIGDAFRSIKFGFQDVMLVGGTEASITPFAIAGFQALTALSTTEDPTRASIPFDKDRNGFVMGEGSGMLVLESLEHAEKRGATILAEVVGYGNTCDAYHMTSPHPEGQGAIKAIKLALEEAEISPEQVAYVNAHGTSTPANEKGESGAIVAVLGKEVPVSSTKSFTGHLLGAAGAVEAIVTIEAMRHNFVPMTAGTSEVSDYIEANVVYGQGLEKEIPYAISNTFGFGGHNAVLAFKRWENR

SEQ ID NO: 19688 - DNA, 1287 bp, Rickettsia conorii str. Malish 7
  CDS (1)..(1287): transl_table=11
atgtcgaatcaaagagtaaataaaagagtagttattaccggacttggacttgttactcctgttgggcttaatgttagctcatcttggaaaaatattgtagatggagtaagcggtataaaaactattacagaatttgacacttctaaacttgcgtgtaaaattgccggacttatagataactctgagaaagatggatttaaacttgaaaatttcatacaagcagatgacattaatagactaagtaaaatggataaatttatccattacggagtagcggccgcaaccgaagcagttgaagatagcggctggttacccgacgatgaaaaatctcgtgatagaaccggcttgatattaggttcaggaatcggtgggcttaaaatgatcgaagatacctctatcaaactttatcaagaaaataacggcaaagttagtcctttctttatccccgcttcattaattaatcttttatccggtcttgtttctataaaatacggttttagcggtccaaaccaaacggcagtaacagcttgctctacaggggcacatgctataggcgatgctatgcgtatgataaagcacggctatgccgatgttatgatcgcaggcggtgcggaagctccagttacacctgtcggagttgcaggtttcgttgctgctagagcattatgtactaaatataacgataatcctaaaaaagcctcaagaccttgggataaagaccgcagcggctttgttatgggtgaaggagcaggcgttgtagtcttagaagaatatgagcatgccttaaatcgaggggctaaagtttacggtgaagttataggatacggctctacaggtgacgcctatcatatgacagctccacatcctgaaggtagaggagcttatagagcgatgagagacgcaatgctagatgcaactatcacgcccgatatgattgattatattaatgcacacggtacttctactacacttggtgatggaatagaattagcagccgtacaaaaattatttttagaagcgaatcccaaagttttaatgtcttctactaaatcatcaataggacatttgcttggtgcggcaggaagtgttgagtttatcttttcagctcttgcaattagagaccagattgcaccgccaaccttaaacttagatacccctatggatgaggtgaatatagatttagttgcacttaaagctaagaaaactaagatagattacgtgctttccaactcgttcggattcggtggtactaatgctagtttagtgattaagagtatactcgtttaa

SEQ ID NO: 19689 - protein, 428 aa, Rickettsia conorii str. Malish 7
MSNQRVNKRVVITGLGLVTPVGLNVSSSWKNIVDGVSGIKTITEFDTSKLACKIAGLIDNSEKDGFKLENFIQADDINRLSKMDKFIHYGVAAATEAVEDSGWLPDDEKSRDRTGLILGSGIGGLKMIEDTSIKLYQENNGKVSPFFIPASLINLLSGLVSIKYGFSGPNQTAVTACSTGAHAIGDAMRMIKHGYADVMIAGGAEAPVTPVGVAGFVAARALCTKYNDNPKKASRPWDKDRSGFVMGEGAGVVVLEEYEHALNRGAKVYGEVIGYGSTGDAYHMTAPHPEGRGAYRAMRDAMLDATITPDMIDYINAHGTSTTLGDGIELAAVQKLFLEANPKVLMSSTKSSIGHLLGAAGSVEFIFSALAIRDQIAPPTLNLDTPMDEVNIDLVALKAKKTKIDYVLSNSFGFGGTNASLVIKSILV

SEQ ID NO: 19690 - DNA, 1245 bp, Staphylococcus aureus subsp. aureus Mu50
  CDS (1)..(1245): transl_table=11
atgagtcaaaataaaagagtagttattacaggtatgggagccctttctccaatcggtaatgatgtcaaaacaacatgggagaatgctctaaaaggcgtaaatggtatcgataaaattacacgtatcgatactgaaccttatagcgttcacttagcaggagaacttaaaaactttaatattgaagatcatatcgacaaaaaagaagcgcgtcgtatggatagatttactcaatatgcaattgtagcagctagagaggctgttaaagatgcgcaattagatatcaatgataatactgcagatcgaatcggtgtatggattggttctggtatcggtggtatggaaacatttgaaattgcacataaacaattaatggataaaggcccaagacgtgtgagtccatttttcgtaccaatgttaattcctgatatggcaactgggcaagtatcaattgacttaggtgcaaaaggaccaaatggtgcaacagttacagcatgtgcaacaggtacaaactcaatcggagaagcatttaaaattgtgcaacgcggtgatgcagatgcaatgattactggtggtacggaagctccaatcactcatatggcaattgcaggtttcagtgcaagtcgagcgctttctacaaatgatgacattgaaacagcatgtcgtccattccaagaaggtagagacggttttgttatgggtgaaggtgctggtattttagtaatcgaatctttagaatcagcacaagctcgaggtgccaatatttatgctgagatagttggctatggtactacaggtgatgcttatcatattacagcgccagctccagaaggtgaaggcggttctagagcaatgcaagcagctatggatgatgctggtattgaacctaaagatgtacaatacttaaatgcccatggtacaagtactcctgttggtgacttaaatgaagttaaagctattaaaaatacatttggtgaagcagctaaacacttaaaagttagctcaacaaaatcaatgactggtcacttacttggtgcaacaggtggaattgaagcaatcttctcagcgctttcaattaaagactctaaagtcgcaccgacaatacatgcggtaacaccagacccagaatgtgatttggatattgttccaaatgaagcgcaagaccttgatattacttatgcaatgagtaatagcttaggattcggtggacataacgcagtattagtattcaagaaatttgaagcataa

SEQ ID NO: 19691 - protein, 414 aa, Staphylococcus aureus subsp. aureus Mu50
MSQNKRVVITGMGALSPIGNDVKTTWENALKGVNGIDKITRIDTEPYSVHLAGELKNFNIEDHIDKKEARRMDRFTQYAIVAAREAVKDAQLDINDNTADRIGVWIGSGIGGMETFEIAHKQLMDKGPRRVSPFFVPMLIPDMATGQVSIDLGAKGPNGATVTACATGTNSIGEAFKIVQRGDADAMITGGTEAPITHMAIAGFSASRALSTNDDIETACRPFQEGRDGFVMGEGAGILVIESLESAQARGANIYAEIVGYGTTGDAYHITAPAPEGEGGSRAMQAAMDDAGIEPKDVQYLNAHGTSTPVGDLNEVKAIKNTFGEAAKHLKVSSTKSMTGHLLGATGGIEAIFSALSIKDSKVAPTIHAVTPDPECDLDIVPNEAQDLDITYAMSNSLGFGGHNAVLVFKKFEA

SEQ ID NO: 19692 - DNA, 1242 bp, Bacillus subtilis subsp. subtilis str. 168
  CDS (1)..(1242): transl_table=11
atgactaaaaaaagagtagttgttacaggacttggagcattatctccacttggcaacgacgtcgatacaagttggaataacgcaatcaacggtgtgtccggaatcggtccgatcactcgtgttgacgctgaagaatatccggcaaaagttgccgctgaattaaaagattttaatgttgaagattatatggataaaaaagaagccagaaaaatggaccgctttacacaatatgcggttgtggctgcgaaaatggcggttgaagatgcagatcttaacattaccgatgagatcgcgccgagagtcggtgtttgggtaggctccggtatcggaggacttgaaacactagagtctcaatttgaaatcttcttaacaaaaggcccaagacgggtaagcccgtttttcgtgccaatgatgattcctgacatggcgacaggccagatttctattgcattaggagcaaaaggggtgaactcttgtacggttacagcatgtgctacaggaacgaactccatcggtgacgcgtttaaggttattcagcgcggtgatgcagacgtgatggtcacaggcggaacagaagcgccgctgacaagaatgtcattcgccggctttagtgccaacaaagcgctgtctactaatccagatccgaaaacagcgagccgcccgtttgataaaaaccgtgatggctttgtcatgggggaaggtgcagggattatcgttcttgaagaacttgagcatgccctggcccgcggcgctaaaatttacggagaaattgtcggctacggctcaaccggagacgcttatcatatcacagcgccggcccaagacggtgaaggcggagcgagagcgatgcaagaagccattaaagatgcaggcattgcacctgaagaaattgattacatcaatgctcacgggacaagcacgtattacaacgacaaatacgaaacaatggcgattaagaccgtttttggcgagcatgcgcataaacttgcggtaagctctacaaaatcgatgacaggccacctcttaggagcagccggcggtattgaagccattttctctatcctggccattaaagaaggcgtgattccgccgacaatcaatattcaaacacctgacgaagaatgtgatttggattatgtgcctgatgaagcccgcagacaggaacttaattatgttctcagcaactcattaggattcggcggacacaacgcaacattaatctttaaaaaatatcaatcataa

SEQ ID NO: 19693 - protein, 413 aa, Bacillus subtilis subsp. subtilis str. 168
MTKKRVVVTGLGALSPLGNDVDTSWNNAINGVSGIGPITRVDAEEYPAKVAAELKDFNVEDYMDKKEARKMDRFTQYAVVAAKMAVEDADLNITDEIAPRVGVWVGSGIGGLETLESQFEIFLTKGPRRVSPFFVPMMIPDMATGQISIALGAKGVNSCTVTACATGTNSIGDAFKVIQRGDADVMVTGGTEAPLTRMSFAGFSANKALSTNPDPKTASRPFDKNRDGFVMGEGAGIIVLEELEHALARGAKIYGEIVGYGSTGDAYHITAPAQDGEGGARAMQEAIKDAGIAPEEIDYINAHGTSTYYNDKYETMAIKTVFGEHAHKLAVSSTKSMTGHLLGAAGGIEAIFSILAIKEGVIPPTINIQTPDEECDLDYVPDEARRQELNYVLSNSLGFGGHNATLIFKKYQS

SEQ ID NO: 19694 - DNA, 1281 bp, Caulobacter crescentus CB15
  CDS (1)..(1281): transl_table=11
atgcgtagagtcgtcgtcacgggtatcggcctgttgaccccgctcggccaaggtgtcgacatcacctggaagaacatcctcgccggcaagtccggcgcgaaccgcatcagcgcgttcgaccccaccgactattcgtgccaggtcgcctgcgaggtgccgcgcgtcgatggtcgcggcggcggcggcccggatgtcgaaggctcgttcgatcctgaccagaccatgagcccgcgcgatcagaagcgcgtcgatgacttcatcctgtacggcgtcgccgccgccgatgaggccatcaaggattcgggctgggttccggaaaccgacgaggacaagtggcgcacgggcgtcatcctgggctcgggcatcggcggtctgtcgaccatcgccgacacggcgctggagcttgaggccaagggcccgcgacgcgtcagcccgttctttatctcgtcagccctgatcaacctgatctcgggtcaggtctcgatcaagtacggcttcaagggcccgaaccacgcggtcgtgaccgcctgcgccaccggtgcccatgcgatcggcgacgccgcgcgcctgatcaagtatggcgacgccgacgtgatggtggccggcggggccgaggcggccgtctgcaaggtcggcatcgccggtttccaggcctgccgcgccgtggccaccgcgttcaacgacacgcccgagaaggcctcgcgcccgtacgacaaggaccgcgacggcttcgtcatgggcgagggcgcgggcgttctggtgctggaagagtacgaacacgccaaggcgcgcggcgccaagatctatgctgaagtcgcaggctatggcctgtcgggcgacgcctaccacatcaccgccccgtcggaagacggcgagggtggcgcgcgggccctggccgccgccgtgcgtgacgcgggcctgaagccctcggacatcaactatgtcaatgctcacggcacctcgaccatggctgacggcatcgaggctaaggcggtcgagcggttcctcggcgatcacgccaagaacgtcgtcatgtcctcgaccaagtcgatgacgggccaccttctgggcgcggccggcgcgatcgaggcggcgttctcgatcctggcgatccgcgatcagatcgccccgccgaccatcaacctcgacaatcccgatgtcgaggtcgcgatgaatctcgccccgcacaaggccgtgccgatgaagatcgatgtggccgtgtccaacagcttcggcttcggcggcaccaacgcctccgtcgtgttcaagaaggtctcgtga

SEQ ID NO: 19695 - protein, 426 aa, Caulobacter crescentus CB15
MRRVVVTGIGLLTPLGQGVDITWKNILAGKSGANRISAFDPTDYSCQVACEVPRVDGRGGGGPDVEGSFDPDQTMSPRDQKRVDDFILYGVAAADEAIKDSGWVPETDEDKWRTGVILGSGIGGLSTIADTALELEAKGPRRVSPFFISSALINLISGQVSIKYGFKGPNHAVVTACATGAHAIGDAARLIKYGDADVMVAGGAEAAVCKVGIAGFQACRAVATAFNDTPEKASRPYDKDRDGFVMGEGAGVLVLEEYEHAKARGAKIYAEVAGYGLSGDAYHITAPSEDGEGGARALAAAVRDAGLKPSDINYVNAHGTSTMADGIEAKAVERFLGDHAKNVVMSSTKSMTGHLLGAAGAIEAAFSILAIRDQIAPPTINLDNPDVEVAMNLAPHKAVPMKIDVAVSNSFGFGGTNASVVFKKVS

SEQ ID NO: 19696 - DNA, 1251 bp, Chlamydophila pneumoniae AR39
  CDS (1)..(1251): transl_table=11
atgagtaaaaaacgcgtagttgttacaggattcggtgttgtatcttgcctcggtaatgaagtagataccttttacgataatcttcttgccggtgtcagcggcgtacggccaattacatcctttccttgtgaggattatgccactcgttttgccggctggatcccagaattcaatcccgagccttatgtagataaaaagcaagcacgtcgtgtcgacccctttattacctatgccatggtagctgctaagaaagcgatcgctatgtcacgttgggataaagaccatctgccttccgatcccgtgcgttgtggagtgattgtcggctctggaatgggtgggctctctaccctagaccaagggatggaaagactcttagttattcataaaaaattatctcccttctttattccttatatcattacaaatatggccccagcacttattgctatggactttggtttgatgggccccaattattctatatcaactgcatgtgctacaggaaattattgtattgatgccgcctaccaacatttagtatctgggcgcgctgatatgatcatctgtggtggtacggaagctgcagtgaaccgtattggtttagagggttttattgctaatcgtgctctctctgagagaaacgatgctccagatcaagcttcacgtccttgggatagagatcgtgatggctttgtcttaggagaaggagcaggaattcttgttttagaaaccctagagagtgctctacgtcgcgatgctcctatttttgctgagatgttaggaagctatgttacatgcgatgccttccatattaccgctcctagagatgacggtgaggggattactgcatgcgtgcttggtgctttaaattccgcaggaattcctaaagaacgtgtcaactatgtgaatgctcacggaacgtcgactccattaggggatctttctgaagttctagctgttaaaaaggcttttggctcccatgtacgaaatctccgcatgaactccactaaatcattgatagggcattgtcttggagctgctggaggtgttgaagccgtcgttgcaattcaagctatccttacgggaaagcttcatcctacgattaatttggataaccctatcgcagaaattgaagactttgatgtagttgcaaataaagctcaagactgggatattgatgtagcgatgtccaactcatttggttttggtggacataattcaacgatattattctcgaggtatgtaccctag

SEQ ID NO: 19697 - protein, 416 aa, Chlamydophila pneumoniae AR39
MSKKRVVVTGFGVVSCLGNEVDTFYDNLLAGVSGVRPITSFPCEDYATRFAGWIPEFNPEPYVDKKQARRVDPFITYAMVAAKKAIAMSRWDKDHLPSDPVRCGVIVGSGMGGLSTLDQGMERLLVIHKKLSPFFIPYIITNMAPALIAMDFGLMGPNYSISTACATGNYCIDAAYQHLVSGRADMIICGGTEAAVNRIGLEGFIANRALSERNDAPDQASRPWDRDRDGFVLGEGAGILVLETLESALRRDAPIFAEMLGSYVTCDAFHITAPRDDGEGITACVLGALNSAGIPKERVNYVNAHGTSTPLGDLSEVLAVKKAFGSHVRNLRMNSTKSLIGHCLGAAGGVEAVVAIQAILTGKLHPTINLDNPIAEIEDFDVVANKAQDWDIDVAMSNSFGFGGHNSTILFSRYVP

SEQ ID NO: 19698 - DNA, 1242 bp, Listeria monocytogenes EGD-e
  CDS (1)..(1242): transl_table=11
atggataagagaagagtagttgttactggtgttggagctgttacacctattggaaacgatgcggaaacttcttgggaaaacgcaaaaaaaggtgttaatggtgttgcaaaaatgacaagacttaatccggatgactttccggttaaaattgcagcagagttaaaagattttgatgtagaaaaatatctagagaaaaaagaagctcgtaaaatggaccgttttacgcattatgcaattgcaagtgctgaaatggctgtacaagactctggtttagttattgatgattccaatgcaaaccgcgttggtgtttggattggttcaggaattggcggaatggaaactttcgaaacacaatatgaaattttcttaaatcgtggacatcgtcgagttagtccgtttttcgtacctatgatgattccagatatgggttcaggccaagtttctattcgttttggagctaaaggcattaactctacaacagttacagcttgtgcaacagcaacaaactcaatcggcgacgcgtttaaagttattgagcgtggggatgctgatgcaatgattactggtggagcagaagcaccaatcactaaaatgtcacttgcaggatttactgctaataaagctttgtcattaaatccagatccagaaactgcttgtcgtccatttgataaagaccgtgatggttttattattggcgaaggagcaggtatcgttattttagaagaatacgaacatgcaaaagcacgtggggcaaaaatttacgctgaaatcgttggttacggtgcaacaggagatgcttaccacattactgctccagcaccaaacggcgaaggtgctgctcgcgcaatgaaaatggcgattgatgatgctgggcttactcctgataaagtagattacattaatgcccacggaacaagtacaccatacaatgatgaatacgaaacacaagctattaaaactgtctttggagagcatgcgaaaaaattagcgattagttctactaagtcaatgacaggacatactttaggtgcgtctggcgggatagaagctattttcgcgcttttgactattcgtgataatattattgcaccaacgattcatttgaaaaaccaagatgaagtttgtgacttggattatgttccaaatgaagcacgtgaagcaaatgtaaatgttgtaatttctaactcttttggctttggtggtcataatgcgactttagtatttaaaagaatagaagactaa

SEQ ID NO: 19699 - protein, 413 aa, Listeria monocytogenes EGD-e
MDKRRVVVTGVGAVTPIGNDAETSWENAKKGVNGVAKMTRLNPDDFPVKIAAELKDFDVEKYLEKKEARKMDRFTHYAIASAEMAVQDSGLVIDDSNANRVGVWIGSGIGGMETFETQYEIFLNRGHRRVSPFFVPMMIPDMGSGQVSIRFGAKGINSTTVTACATATNSIGDAFKVIERGDADAMITGGAEAPITKMSLAGFTANKALSLNPDPETACRPFDKDRDGFIIGEGAGIVILEEYEHAKARGAKIYAEIVGYGATGDAYHITAPAPNGEGAARAMKMAIDDAGLTPDKVDYINAHGTSTPYNDEYETQAIKTVFGEHAKKLAISSTKSMTGHTLGASGGIEAIFALLTIRDNIIAPTIHLKNQDEVCDLDYVPNEAREANVNVVISNSFGFGGHNATLVFKRIED

SEQ ID NO: 19700 - DNA, 1242 bp, Listeria innocua Clip11262
  CDS (1)..(1242): transl_table=11
atggatagaagaagagtagttgttactggtattggagcagttacaccaattgggaatgatgcagaaacttcgtgggaaaacgcaaaaaaaggtgtcaatggtgttgcagaaatgacaagacttaatccggatgactttccggttaaaattgcagcagaattaaaagactttgatgtagaaaaatatttagagaaaaaagaagctcgtaaaatggaccgtttcacccattatgccattgcaagtgctgaaatggctgtgcaagattctggtttaattattgatgattccaatgccactcgtgttggtgtatggattggatccggtatcggtggaatggaaacattcgaaacacaatatgaagttttcctaaatcgtggacatcgtcgtgttagtccgttctttgtaccaatgatgattccggatatgggttcaggacaagtttcgattcgttttggagcaaaaggaattaactctactacagtaacagcatgtgcgactgcaaccaactctatcggtgacgcatttaaagttatcgaacgcggggatgcagatgcaatgattactggtggagcagaggcgccaattacaaaaatgtcactagcaggatttacagcaaataaagctttatcattaaacccagacccagaaacagcatgtcgtccatttgataaagaccgtgatggttttattattggtgaaggtgctggggttgtaattttagaagaatatgaacatgcaaaagctcgtggtgctaaaatttatgcagaagttgttggttacggtgcaacaggtgatgcatatcatattactgcaccagcgccaaatggtgaaggcgctgcacgtgcaatgaaaatggcgattgacgatgcgggacttactcctgacaaagttgactacattaacgcgcacggaacaagtactccttacaatgatgaatacgaaacacaagcgattaaaactgtgttcggtgagcatgcgaagaaattggctattagctctaccaaatcaatgacaggacatactttaggtgcatcaggtggtattgaagctatttttgctttattaagtattcgtgataatattatcgcgccaacaatccacttggaaaatcaagatgaagtttgtgacttggactatgttccaaacaaagctcgtgaagcagaagtaaatgtcgtaatgtctaactcttttggcttcggtggccacaatgcgacactagtattcaaaagaatagaagactaa

SEQ ID NO: 19701 - protein, 413 aa, Listeria innocua Clip11262
MDRRRVVVTGIGAVTPIGNDAETSWENAKKGVNGVAEMTRLNPDDFPVKIAAELKDFDVEKYLEKKEARKMDRFTHYAIASAEMAVQDSGLIIDDSNATRVGVWIGSGIGGMETFETQYEVFLNRGHRRVSPFFVPMMIPDMGSGQVSIRFGAKGINSTTVTACATATNSIGDAFKVIERGDADAMITGGAEAPITKMSLAGFTANKALSLNPDPETACRPFDKDRDGFIIGEGAGVVILEEYEHAKARGAKIYAEVVGYGATGDAYHITAPAPNGEGAARAMKMAIDDAGLTPDKVDYINAHGTSTPYNDEYETQAIKTVFGEHAKKLAISSTKSMTGHTLGASGGIEAIFALLSIRDNIIAPTIHLENQDEVCDLDYVPNKAREAEVNVVMSNSFGFGGHNATLVFKRIED

SEQ ID NO: 19702 - DNA, 1251 bp, Nostoc sp. PCC 7120
  CDS (1)..(1251): transl_table=11
atgacagattataatcgtaaacgcgttgttgtcacgggtgttggcgcgattacacctattggtaacacagcctctgaatattgggaaggattgttaagcggacgcaatggcattgactacatcacccactttgatgcgtctagccatgattgtcggattgctggtgaagtgaaaaacttcgacccccatgagtacttggagcgcaaagaagccaagcgcatggatcggttttcccaatttgcagttgcagcagccaaacaagcacttgtggattcccagttagtcattaatgaactgaacgccgaacaagtgggggttattattggttctggggtaggcggactcaaggtcatggaagaccagcaaaccatctatctcaaccgggggcctgatcgctgtagtcccttcatgattcccatgatgatcgccaacatggcggctggactgacagcaattcacactggtgccaaagggccaaataactgtactgtcaccgcttgcgccgcaggctctaatgcgatcggcgacgctttccgcctagtccaaggtggttatgcccaagccatgatttgtggtggggctgaggcagcaattacaccattaggtgtggctgggtttgcggctgcaagggcgttatcaactcgcaatgatgacccagctcatgcttgtcgtccctttgaccgcgatcgcgatggatttgtcatgggtgaaggtgcgggaattctcattctggaagagctgcaacacgccataagtcgcggcgctcgcatttatgccgaaatcgttggttatggtatgacttgcgatgcctaccacatgacatccccagtccctggcggcgaaggagcctccagagccatccaactggcactcaaagacgcaaacatcaccccagaacaagttagctacattaatgctcacggtaccagcacctcagcaaacgataccaccgaaaccgcagcgattaaacgagcgctaggagaccatgcttataaaatagcagtcagctccaccaaatcgatgacaggtcatcttttgggtggttctggcggtattgaagctgtagccacagtgttggcaactgctcatgaccaaattccacctacaattaatattgaaaaccttgacccagattgtgacctagattacgtgcctgactctagtcgcgctcacaaagtccaggtagcattgtctaattcttttggatttggtggtcataatgtcacactagctttcaaaaagtacgtgtga

SEQ ID NO: 19703 - protein, 416 aa, Nostoc sp. PCC 7120
MTDYNRKRVVVTGVGAITPIGNTASEYWEGLLSGRNGIDYITHFDASSHDCRIAGEVKNFDPHEYLERKEAKRMDRFSQFAVAAAKQALVDSQLVINELNAEQVGVIIGSGVGGLKVMEDQQTIYLNRGPDRCSPFMIPMMIANMAAGLTAIHTGAKGPNNCTVTACAAGSNAIGDAFRLVQGGYAQAMICGGAEAAITPLGVAGFAAARALSTRNDDPAHACRPFDRDRDGFVMGEGAGILILEELQHAISRGARIYAEIVGYGMTCDAYHMTSPVPGGEGASRAIQLALKDANITPEQVSYINAHGTSTSANDTTETAAIKRALGDHAYKIAVSSTKSMTGHLLGGSGGIEAVATVLATAHDQIPPTINIENLDPDCDLDYVPDSSRAHKVQVALSNSFGFGGHNVTLAFKKYV

SEQ ID NO: 19704 - DNA, 1233 bp, Ralstonia solanacearum GMI1000
  CDS (1)..(1233): transl_table=11
gtgagccgtcgtcgcgtagtcgttaccggcctggggctggtctctccggtaggaaactcggtcgccgaagggtgggccaatctggtcgctggcaagtccggcatcgccaccgtcaccaaattcgatccgtctaacttggccgtgcacttcgccggcgaagtgaagggcttcaacgtcgaggagtacctctcggccaaggatgctcgccagatggataccttcatccattacggcattgccgctggggtgcaggcactcaaggacagcggcctggaggtgaacgaggccaacgccgagcgtgcaggcgtgctggtcggctccggcatcggtggcctgccgatgatcgaagacacccattccacgtacgtcgaacgcggtccgcgccggatttcgccgttcttcgtgccggggtcgatcatcaacatgatctcggggcacctcagcatcatgcatggcctgaaggggccgaacctggcggcggtcacggcttgcacgaccgggctgcacagcatcgggttggcggcgcgcctgattcaggcgggcgatgccgacgtgatgctggcgggtggcgccgagtcgacggtctcgccgctcggcatcggcggcttcgcagcagcgcgcgcgctgtcgacccgcaacgacgatccggccaccgcgtcccgtccgtgggacaaggatcgcgacggcttcgtgctgggcgagggtgcaggcgtgatggtgctggaagagtacgagtccgccaaggcgcgcggagccaggatctacgcggagctcgtgggcttcggcatgagcggtgacgcttatcacatgactgcgcccaacatggatggtccgcgccgctgcatgctcaatgcgctgcgcgatgccggcatcaacaccgaccaggtgcagtacctgaacgcgcacggcacgtccaccccgctgggcgacaagaatgaatccgacgccatcaaggcggcttttggcgagcacgcccgcaaggtcgtcgtgaactccaccaagtccatgaccggccatctgctgggcggcgcgggcggcctggagtcggtgttctcggtgttggcgctccaccatcaggtgtcgccgccgaccatcaatattttcaaccaggatcccgagtgcgatctcgattactgcgccaatacggcgcgtgacatgaagatcgacgtggccgtgaagaacaacttcggctttggcgggaccaacggcacgctggtgttccgacgcctgtga

SEQ ID NO: 19705 - protein, 410 aa, Ralstonia solanacearum GMI1000
MSRRRVVVTGLGLVSPVGNSVAEGWANLVAGKSGIATVTKFDPSNLAVHFAGEVKGFNVEEYLSAKDARQMDTFIHYGIAAGVQALKDSGLEVNEANAERAGVLVGSGIGGLPMIEDTHSTYVERGPRRISPFFVPGSIINMISGHLSIMHGLKGPNLAAVTACTTGLHSIGLAARLIQAGDADVMLAGGAESTVSPLGIGGFAAARALSTRNDDPATASRPWDKDRDGFVLGEGAGVMVLEEYESAKARGARIYAELVGFGMSGDAYHMTAPNMDGPRRCMLNALRDAGINTDQVQYLNAHGTSTPLGDKNESDAIKAAFGEHARKVVVNSTKSMTGHLLGGAGGLESVFSVLALHHQVSPPTINIFNQDPECDLDYCANTARDMKIDVAVKNNFGFGGTNGTLVFRRL

SEQ ID NO: 19706 - DNA, 1263 bp, Agrobacterium tumefaciens str. C58
  CDS (1)..(1263): transl_table=11
atgaggcgtgtcgttatcaccggtaccggcatggtatctcctcttggatgcggaacggaagtgacctgggagcggctgttggccggccagaatggtgcccgtctcgtgactgaattcgaggtcgaagacctgcccgcaaagatcgcctgccgcattcccgtcggcgacggctccaacggcaccttcaatgccgatgactggatggagcccaaggaacaacgcaaggtcgatcctttcattctctacggcatggctgccgccgacatggcgcttgccgacgcaaactggcatccggaaacggacgacgaccagatcgctaccggcgttctgatcggctccggcattggcggtctggaaggcattgtcgaggcgggttacacgctgcgcgacaagggcccacgccgcatttctccattcttcattcccggccgtctgatcaacctcgtatccggtcaggtttccattcgccacaagctgcgtggaccgaatcattccgtggtaacggcctgctcgaccggcgcacacgctatcggcgacgccgcccgactgatcgcgcttggcgatgccgaggtcatggtcgccggtggtgccgaatcgccggtctgccgcatttcgctcgccggatttgccgcctgcaaggcgctctccacccagcacaatgacgatccgcaaaaggcctcgcgcccctatgatcgcgaccgcgacggtttcgtcatgggcgagggtgccggcatcgttgttctcgaagaactcgaacacgccaaggcgcgcggcgcgaagatttacgccgaagtcgtcggttatggcctgtccggcgatgccttccacatcacggcgccgtccgaggatggcgacggtgcgtatcgctgcatgtccatggcgctgaagcgcgctggcctcacgcctgacgatatcgactatatcaacgcccacggcacctccaccatggccgacacgatcgagcttggcgcggtcgaacgtctggtcggcgaatctgctccgaagatttccatgtcttccaccaagtcggccaccggccatcttctcggcgctgccggcgcaatcgaggcgattttcgcgacgcttgcgatccgcgacaatatcgttccgccgacgctcaacctcgacaatcccgatgtcgagacgaagatagacctcgtgccgcacaaggcccgcaagcggcaggtcaatgtggcgctttcgaattccttcggtttcggcggcaccaacgcatcgctcgtgctgcgtcgttacgaagcataa

SEQ ID NO: 19707 - protein, 420 aa, Agrobacterium tumefaciens str. C58
MRRVVITGTGMVSPLGCGTEVTWERLLAGQNGARLVTEFEVEDLPAKIACRIPVGDGSNGTFNADDWMEPKEQRKVDPFILYGMAAADMALADANWHPETDDDQIATGVLIGSGIGGLEGIVEAGYTLRDKGPRRISPFFIPGRLINLVSGQVSIRHKLRGPNHSVVTACSTGAHAIGDAARLIALGDAEVMVAGGAESPVCRISLAGFAACKALSTQHNDDPQKASRPYDRDRDGFVMGEGAGIVVLEELEHAKARGAKIYAEVVGYGLSGDAFHITAPSEDGDGAYRCMSMALKRAGLTPDDIDYINAHGTSTMADTIELGAVERLVGESAPKISMSSTKSATGHLLGAAGAIEAIFATLAIRDNIVPPTLNLDNPDVETKIDLVPHKARKRQVNVALSNSFGFGGTNASLVLRRYEA

SEQ ID NO: 19708 - DNA, 1299 bp, Agrobacterium tumefaciens str. C58
  CDS (1)..(1299): transl_table=11
atgcgtcgtatcgttgtaacaggaatgggagccgtcagccctcttggcgcgaatgtggatatctcatggtcgcggctccttgctggccaaagcgggatccggcgactgaccgacgatgtcgtcggagatcttcctgcgaaagtgggaggcgttgtcccttctctcgccgaagacccagaaagaggattcgatccggacaggatcattgcacccaaggatcagcgcaaggtcgaccgcttcatcatcttcgcgctggcggcggcggaagaagcgctcgtgcaggcaaactggaagccggtctcgaatgaagacaggttgcgaaccgcgacaatcatcgcatccggcatcggcggtttccctgccatcacggaagccgtgcgaaccgttgatcaacgcggtgtacgccgcctctctcccttcacgataccgtcgttcctcgtcaatctcgcagccgggcaagtctcgatccgccacggtttcaaaggtccgctgggagcacccgtaacggcgtgtgctgccggcgttcaggcgatcggcgacgctgcacggcttatccggtccaatgaagccgacattgcggtttgcggtggaacggaagcttgcatgaacatcgtcagcctcggcggcttcgcggcggcaaggtcgctttccaccggtttcaacgagacgccgaccaaggcgtcgcgtcccttcgataccgcgcgtgacggcttcgtcatgggtgaaggcgcgggcgtactcgtcatcgaggcactcagccacgctctcgcccgcggagccaccccgattgccgaactcgttggatacggcacgacagccgacgcccaccacatcacgtcaggccccgaggatggaagtggggcacgcagggccatggagattgccatcgcgcaagcgggcatcgcccctcatgagattggtcatctgaacgcgcatgcgacatcgacgccggttggggacctcggagaaatcagggccatcaagagtgtgtttgggcaacgaaagtcggttgctgtcagtgggaccaagtcggcgacggggcacctgcttggcgcggccggcgggctggaagccatcttcacgattctagcgctcaaaaatcggatcgcccctccgacactgaacctgaacgcgccggatacggaatcggacgggatcgattttgttgcaaacctggcacgatccctggacgctgaatatgccatatccaacggcttcggttttggcggcgtcaatgccagcgttcttttccgacgttggccaaaggcaagcaatagcgggatatcctccgtgcgctga

SEQ ID NO: 19709 - protein, 432 aa, Agrobacterium tumefaciens str. C58
MRRIVVTGMGAVSPLGANVDISWSRLLAGQSGIRRLTDDVVGDLPAKVGGVVPSLAEDPERGFDPDRIIAPKDQRKVDRFIIFALAAAEEALVQANWKPVSNEDRLRTATIIASGIGGFPAITEAVRTVDQRGVRRLSPFTIPSFLVNLAAGQVSIRHGFKGPLGAPVTACAAGVQAIGDAARLIRSNEADIAVCGGTEACMNIVSLGGFAAARSLSTGFNETPTKASRPFDTARDGFVMGEGAGVLVIEALSHALARGATPIAELVGYGTTADAHHITSGPEDGSGARRAMEIAIAQAGIAPHEIGHLNAHATSTPVGDLGEIRAIKSVFGQRKSVAVSGTKSATGHLLGAAGGLEAIFTILALKNRIAPPTLNLNAPDTESDGIDFVANLARSLDAEYAISNGFGFGGVNASVLFRRWPKASNSGISSVR

SEQ ID NO: 19710 - DNA, 1242 bp, Clostridium perfringens str. 13
  CDS (1)..(1242): transl_table=11
atggaaaacagagttgttataacgggattgggagcaattacaccaattggaaacaatgtaaatgaattttggaccaatgctaaaaaaggtgtttgtggaattgatgaaataactttatttgatgctagtgattataaagttaaaattgcaggagaagttaaaaactttaaagcagaggattttatagataaaaaggaagctaagcgtttagatagatttactcattttgctcttgcagctacagaagaggcaatgaaggatgctaaattagacttaaaggatgaaaatgtagatcaaaatagagtaggtgttatagttggttcaggaataggtggatatggtaccttagaagcacaatttgatgttttattaactaaaggaccaaatagagtttcaccttttgcaattccatcaggaataataaacttagttgctggaaatattgctattaagtatggggcaaaaggagtatgtgaatcactagttactgcctgcgctacaggggtaagctctataggggcagcttatagaagtataaaacatggatattcagatatagttatatcaggtggatcagaagcttctataactagagctgccattgcaggatttactaatcttaaggcattaaatactaataatgatcctaaaagagcttcaatacctttcgataaagaaagatctggattcgttatgggagaaggcgctggaatattaatattagaaagtttagagagtgctcaaaaaagaggtgctagaatctatggagaaattataggatatggtgcaacttgtgatgcatatcatataacttcacctgatccagaaggtgatggagctaagagagctatagaagcagctatagaagaaggaaaaataaataaggatgaaatttcatatataaatgcacatggaacaagtactcctttaaacgataaatttgaaactttagctattaaaggatgttttggtgaaaaagcttatgatataccagtttcatcaacaaaatcaatgactggtcatttattaggtgcagctggagctatagaatcagtaatatgtgttaaagctttagaagaaggatttattccaccaacaataggatataaagttcctgatgaagattgtgatttagattatgttgtaaatgaaggtagagaattagaattaaattatgtaatcaataacgcattaggttttggtggtcataacgcatcattattatttaaaaagtgggattag

SEQ ID NO: 19711 - protein, 413 aa, Clostridium perfringens str. 13
MENRVVITGLGAITPIGNNVNEFWTNAKKGVCGIDEITLFDASDYKVKIAGEVKNFKAEDFIDKKEAKRLDRFTHFALAATEEAMKDAKLDLKDENVDQNRVGVIVGSGIGGYGTLEAQFDVLLTKGPNRVSPFAIPSGIINLVAGNIAIKYGAKGVCESLVTACATGVSSIGAAYRSIKHGYSDIVISGGSEASITRAAIAGFTNLKALNTNNDPKRASIPFDKERSGFVMGEGAGILILESLESAQKRGARIYGEIIGYGATCDAYHITSPDPEGDGAKRAIEAAIEEGKINKDEISYINAHGTSTPLNDKFETLAIKGCFGEKAYDIPVSSTKSMTGHLLGAAGAIESVICVKALEEGFIPPTIGYKVPDEDCDLDYVVNEGRELELNYVINNALGFGGHNASLLFKKWD

SEQ ID NO: 19712 - DNA, 1281 bp, Schizosaccharomyces pombe 972h-
  CDS (1)..(1281)
atgaaacgtgtggtaataactggactgggggccgtaacccctctaggcaatggagttaaaaccaattggcgaaatctaattcaaggaaaatcaggtatcgtatctcttaaaggatttcctgagtatgagcaaataccaagcaaagttgctggagtgataccaaggggaaaagaaaaggaagagtggaatgtattagactacgttgaccaagggaaattacgtgaagtagctacttttacccagttagctctcacttctgcagctgaagcattaaaagatgcaaggtggattgacatagatgaacaagaaaagctagcaacgggagtttgctttggaactggcataggaaatcttgacgatgctttaaatgaaaacggtgtattaaataaggctggaataagaaaagtttcaccgagggtcatttctaaaatactaattaatatgccagcagggtatatttcacaaagatatggttttactgccttaaatcacacaacaactacagcatgtgcagcaggttgtcatgctataggagatgccttcaattttataaagcttggacatgcagatgttattattgccggtggttctgaatcctgtattaatccgctaaccgttgctggtttttcaaaagcaagaagcttgtcaaccaagttcaacgataatccaaaagcggcctcaagaccgtttgatgcaaatcgtgatggatttgtaattggagaaggctccgctgccttagtccttgaggaattggagcatgccaaaaatcgaaatgctcatatatatgctgaaatagtcggttatggtttggcatctgattcatatcatattacagctccaaatccaaatggggatgctgcttactatgctatgaagcgttccttaaaacaagctggtctttctgcaagtcaattggattatatcaatgctcatgcaacttcaaccaagcttggagatgtagcagaaagcatagcgattactaggttactttgtgatgtgaaccggaatcctgaggcatttcctgtatctagtagcaaaggctctattggccatcttttaggagcagcaggtgcaatcgaatctgtctatacggtcttgactgtccaaaagggcgtcttaccccctacgttaaatttcgaatactctgatattcctcagcagtttcagtgcgattatgtgccgaatgtggctaaagagagccgcattaatgttgctttgtcaaacagctttggatttggtggtaccaatgcgtctttatgctttaagaaattcttacagtaa

SEQ ID NO: 19713 - protein, 426 aa, Schizosaccharomyces pombe 972h-
MKRVVITGLGAVTPLGNGVKTNWRNLIQGKSGIVSLKGFPEYEQIPSKVAGVIPRGKEKEEWNVLDYVDQGKLREVATFTQLALTSAAEALKDARWIDIDEQEKLATGVCFGTGIGNLDDALNENGVLNKAGIRKVSPRVISKILINMPAGYISQRYGFTALNHTTTTACAAGCHAIGDAFNFIKLGHADVIIAGGSESCINPLTVAGFSKARSLSTKFNDNPKAASRPFDANRDGFVIGEGSAALVLEELEHAKNRNAHIYAEIVGYGLASDSYHITAPNPNGDAAYYAMKRSLKQAGLSASQLDYINAHATSTKLGDVAESIAITRLLCDVNRNPEAFPVSSSKGSIGHLLGAAGAIESVYTVLTVQKGVLPPTLNFEYSDIPQQFQCDYVPNVAKESRINVALSNSFGFGGTNASLCFKKFLQ

SEQ ID NO: 19714 - DNA, 1242 bp, Fusobacterium nucleatum subsp. nucleatum ATCC 25586
  CDS (1)..(1242): transl_table=11
atgaaaagagttgttgtaacaggattaggacttatttcttcattaggaataggtttagaagaaagttggaaaaaacttatagatggtgaaacaggaatagatttaataacttcttatgatacaacagaccaaccagttagaatagctggggaagtaaaaggttttgaaccaactgattatggaatagaaaaaaaagaagttaaaaaattagcaaggaatactcaatttgctttaatagccacaaaaatggctttggaagatgctaattttaaaatagatgaaactaatgcagatgatgtaggagttcttgtatcagctggtgttggtggaattgaaataatggaagaacaatataagaatatgttggaaaagggacctaaaagaatatctcctttcacaattccagcaatgatagaaaatatggcagctggaaacatagctatatactatggagcaaaaggacctaataaatcaatagttactgcttgtgcatcaggaactcactcaataggagacggttttgatttaattcgtcatggtagagcaaaagctatgatagttggaggaacagaagcaagtgtaactaaattctgtataaattcatttgctaatatgaaagctctttcaactagaaatgaaactcctaaaacagcttcaagaccattttcaaaagatagagatggttttgtaatgggagaaggagcgggaatcttaatattagaagaattagaaagtgctttagcaagaggagcaaaaatatatgcagaaatggtaggatatggagaaacttgtgatgcaaatcatatcactgcaccaatagaaactggagaaggagcaacaaaagctatgagagctgcattaaaagatgcaaatattcctcttgaagatgtgacatatataaatgctcatggaacttcaactcctacaaatgatgttgtagaaacaagagcaataaaagcactatttggtgataaagcaaaagacttatatatctcttctacaaagggagcaactggacatggactaggagctgctggaggaattgaaggagtaattattgcaaaagcaatagcagatggaataatacctcctacaatcaatttacatgaaacagaagaagaatgtgatttaaactatgtacctaacaaagctataaagacagatgtaaaagtagcaatgtctaactcactaggttttggaggacataactcagttattgttatgaaaaaatttgaaaaataa

SEQ ID NO: 19715 - protein, 413 aa, Fusobacterium nucleatum subsp. nucleatum ATCC 25586
MKRVVVTGLGLISSLGIGLEESWKKLIDGETGIDLITSYDTTDQPVRIAGEVKGFEPTDYGIEKKEVKKLARNTQFALIATKMALEDANFKIDETNADDVGVLVSAGVGGIEIMEEQYKNMLEKGPKRISPFTIPAMIENMAAGNIAIYYGAKGPNKSIVTACASGTHSIGDGFDLIRHGRAKAMIVGGTEASVTKFCINSFANMKALSTRNETPKTASRPFSKDRDGFVMGEGAGILILEELESALARGAKIYAEMVGYGETCDANHITAPIETGEGATKAMRAALKDANIPLEDVTYINAHGTSTPTNDVVETRAIKALFGDKAKDLYISSTKGATGHGLGAAGGIEGVIIAKAIADGIIPPTINLHETEEECDLNYVPNKAIKTDVKVAMSNSLGFGGHNSVIVMKKFEK

SEQ ID NO: 19716 - DNA, 1230 bp, Thermoanaerobacter tengcongensis MB4
  CDS (1)..(1230): transl_table=11
atgaacagagtagttgtaacaggattgggagtaatcagccctttaggcaacactgttgaaaagttctggaattcactgataaatggagaaaatggaataggacttgtcaccaaatttgatacctctgaatttcccacaaaagtggctgctgaagtgaaagactttgaccctactttatacatagacaaaaaagaagccagaagaatggataggtttatacagtttgctgtggcaagcacaaaacttgcactggaggatgcggggattgaacttgacaaagtagacttaaatagatttggagtgatttacgggacaggcatagggggaattgagacctttgaaaatcagatgaaagtgatgtacgaaaaaggccccagcaaagtaagtccctttttcatccctatgatgatagccaatatggcagctgggcagatagccataacctttggccttaagggaatcaatgagactatagtaaatgcatgtgcttccagcactaacgccataggagaagcttttaaagccattcaaagaggagatgcagatttaatagtgactggaggtacagaagctgcgataactcccatgtcctttgcaggtttttgcgctatgaaagctatgtccacaaatcctgacccttccactgcttcaaggccctttgatttgaatagagatggatttgttatgggagaagggtctgctacgttgattctggagtcattggaacatgctcaaaaaagaggggcgaagatatacgcagagataatagggtatggcgctacagatgatgcttaccacataacagctccagctccagaaggggaaggggcagcgagagcgatggaagcagcccttaaagacggaaaagtaagttatgatatggtagactacatcaatgcccatggaacctctacagagtacaacgataagttcgaaactatggcaataaagaaagttttcaaagaccacgcttataagctctgcgtaagctctaataagtccatgttgggacatttgttaggagcagcaggggcagtagaagctgtagctacggtgctgaccataactcacgggatagtgcctccaaccattaattaccagactcccgatccagagtgcgatttaaactacgttccaaacaaggcaatagaaagggaagtgaattacgccatttctaactcttttggttttggcggacacaatgctactttgctctttaaaaaattttga

SEQ ID NO: 19717 - protein, 409 aa, Thermoanaerobacter tengcongensis MB4
MNRVVVTGLGVISPLGNTVEKFWNSLINGENGIGLVTKFDTSEFPTKVAAEVKDFDPTLYIDKKEARRMDRFIQFAVASTKLALEDAGIELDKVDLNRFGVIYGTGIGGIETFENQMKVMYEKGPSKVSPFFIPMMIANMAAGQIAITFGLKGINETIVNACASSTNAIGEAFKAIQRGDADLIVTGGTEAAITPMSFAGFCAMKAMSTNPDPSTASRPFDLNRDGFVMGEGSATLILESLEHAQKRGAKIYAEIIGYGATDDAYHITAPAPEGEGAARAMEAALKDGKVSYDMVDYINAHGTSTEYNDKFETMAIKKVFKDHAYKLCVSSNKSMLGHLLGAAGAVEAVATVLTITHGIVPPTINYQTPDPECDLNYVPNKAIEREVNYAISNSFGFGGHNATLLFKKF

SEQ ID NO: 19718 - DNA, 1287 bp, Streptomyces coelicolor A3(2)
  CDS (1)..(1287): transl_table=11
gtgagtccacgacacgcggccggcccggcccccggggagcgggccgccgtcgtcacggggctggggctgaccacctcgctgggcggcgacgtcccctccacctggcgggccctgctggacggcgggtgcggcgtcgaacgcgtcgacttcggcgagccggccgggcccgcacaggtgtacctcgcggccccggccgcggtcgaccccgggacggtcctgtcgtccgccaaggcggcgcactgcgaccgctcggcgcagttcgccctcgtggccgcccgcgaggccgttcgcgacgcggggttccccgacccgtccgcgctcgccggggacgggtcgcgggtggccgtggtcgtcggggtggggctgggcggcctcaccagcgtcctggagcaggaccaccgcctgcggacgcagggcgcggggcgggtgagcccgcgcaccatcccggtcatgctgcccaaccacgcggccgccgaagtggggctcatggtgggcgcgaaggccggggtgcacgcgcccgtcagtgcctgcgccgccggtgccgaggccctcgcccaggccctcggcatgatccgggacggccgcgcggacatcgtggtcgcgggcggcaccgaggccgcgctgcatccgctggtcctggccgggttcgcgcggctgcgggccctctcccggcgccacgacgatcccaagggggcctccaggcccttcgacgccgaccgggacggcttcgtgatgggggagggcgccggcatgctcgtggtcgagagcgccgcgcacgccgccgcccgcggcgcccgcgtccacggccggctcaccggggcgggcatcaccaacgacagccaccacgtggcccagccggcgcccggcggtccgggctgcgcggcggccgtcgacgccgcactgcgcgacgcggggctcgtgccggagcagatccagcacgtcaacgcccacgccaccgccacaccgctcggcgacctcggcgaggcgcaggcgctgcacagcgtcttcgccaagggcgtggacgacgtcacggtcagcgccaccaagggggccttcggacacaccctcggtgccgccggagccatcgaggccgtcctcaccgtcctcgccctgcgggacagaacggcaccgccggcctgcagcctcgaacgggtcgaccccgagatcggcctgaacgtcgtcggccgcgacccggcgacactgccctgcgggcccctcgcggccgtcagcacgagcatgggcttcggcgggcacaacgtcgcgctcgccttcgccgacgcctcatga

SEQ ID NO: 19719 - protein, 428 aa, Streptomyces coelicolor A3(2)
MSPRHAAGPAPGERAAVVTGLGLTTSLGGDVPSTWRALLDGGCGVERVDFGEPAGPAQVYLAAPAAVDPGTVLSSAKAAHCDRSAQFALVAAREAVRDAGFPDPSALAGDGSRVAVVVGVGLGGLTSVLEQDHRLRTQGAGRVSPRTIPVMLPNHAAAEVGLMVGAKAGVHAPVSACAAGAEALAQALGMIRDGRADIVVAGGTEAALHPLVLAGFARLRALSRRHDDPKGASRPFDADRDGFVMGEGAGMLVVESAAHAAARGARVHGRLTGAGITNDSHHVAQPAPGGPGCAAAVDAALRDAGLVPEQIQHVNAHATATPLGDLGEAQALHSVFAKGVDDVTVSATKGAFGHTLGAAGAIEAVLTVLALRDRTAPPACSLERVDPEIGLNVVGRDPATLPCGPLAAVSTSMGFGGHNVALAFADAS

SEQ ID NO: 19720 - DNA, 1269 bp, Streptomyces coelicolor A3(2)
  CDS (1)..(1269): transl_table=11
gtgaccggcgcccgtcccgacgtcgccgtcaccgggatcggcctggtcactccggccggcaccggccgcgaggccacctgggacggcgtgtgcgcgggccgccccaccgcccggcacgtccccgaactcaagggcctcccggtcgacttcgcctgcctcgtaccggacttctcccctcgtgatcacgtccccggctcacgcccctggcagtacgaccgcttcacccagttcgccctccacgccgccctggaggcggtctccgacgccggtctggacccggccgactgggacggggaccgcgtcgcggtggtcttcggcagctcggccggcggcaccggcaccatgctggaccagcaccgcaaactgctggaactgggcacggcacgcgtctcaccgctgctgctgccgatgttcctgcccaacatggccaccggacagctcaccatccacctgcgggcccggggcccggcgctgtgcacggtcaccgcctgcgcctccggcgccaccgccatcggcaccgccctgcaactcctgcgctccggggcctgcgacatcgccgtcgcgggcgcctccgacgcggtcgtacagcccctctgggtcaccggcttcgaccggatgggcgcgctgtcccggcgcggcgacgacccgcgggccgcctcccggcccttcgacaccgcccgggacggcttcgtcatggcggagggcggtgcggccctggtcctggagccggcgagtgcggcccgggcccgcggacgccccggctacgccctgctggcgggctacggggcatcgtccgacgcccaccaccccgtggcacccgaccccgagagcaagggcgccgccctcgccgtgcggcgggccctcgacgacgccggcgcccgccccgcggacgtgcagcacatcaacgcgcacggcaccagcacgccgctcaacgacgccgccgaggcccgtctgatccgccgcctcttccctcaccagccctccgtgacctcggtcaagggcaccctcggccacctgctcggcgcggccggagcggtcgaagcggcgatcaccgccctgtccgtggcccacggccgggtgccgcccgtggccaacctggagaagcaggaaggagacgccgagatcaacgccgtcaccggcaccagccgggcgcagcccgtcgacctcgccctgagccattccttcggcttcggcggccacaacgccgtactcgccttcagaagctgccccaccgaaccggcccgggagccggccgctccttcaccgtga

SEQ ID NO: 19721 - protein, 422 aa, Streptomyces coelicolor A3(2)
MTGARPDVAVTGIGLVTPAGTGREATWDGVCAGRPTARHVPELKGLPVDFACLVPDFSPRDHVPGSRPWQYDRFTQFALHAALEAVSDAGLDPADWDGDRVAVVFGSSAGGTGTMLDQHRKLLELGTARVSPLLLPMFLPNMATGQLTIHLRARGPALCTVTACASGATAIGTALQLLRSGACDIAVAGASDAVVQPLWVTGFDRMGALSRRGDDPRAASRPFDTARDGFVMAEGGAALVLEPASAARARGRPGYALLAGYGASSDAHHPVAPDPESKGAALAVRRALDDAGARPADVQHINAHGTSTPLNDAAEARLIRRLFPHQPSVTSVKGTLGHLLGAAGAVEAAITALSVAHGRVPPVANLEKQEGDAEINAVTGTSRAQPVDLALSHSFGFGGHNAVLAFRSCPTEPAREPAAPSP

SEQ ID NO: 19722 - DNA, 1290 bp, Streptomyces coelicolor A3(2)
  CDS (1)..(1290): transl_table=11
gtgagctcgaccaatcgcaccgtggtcgtcaccggtatcggcgcaaccacaccgctgggtggcgacgcagcctcgacctgggagggtctggtcgccggcaggtccggcgtccggcccctggagcaggagtgggccgccgaccaggcggtccgtatcgccgcgccggccgccgtcgacccctccgaggtcatcccgcggccgcaggcccgccgcctggaccgctcggcgcagttcgcgctgatcgcggcgcaggaggcctggaaggacgccgggtacgccggcaaggcgggcgagagccccgccgaggacggcgcggcccacgtcgaccccgaccggctcggtgcggtcatcgcctccggcatcggcggcgtgaccacgctgctcgaccagtacgacgtgctgaaggagaagggcgtccgccgcgtctccccgcacaccgtccccatgctgatgccgaacggtccctccgccaacgtcggcctggccgtgggcgcccgcgcgggcgtgcacaccccggtctcggcctgcgcgtcgggcgccgaggccatcggctacgccatcgagatgatccgcaccggccgcgccgacgtcgtcgtcgcgggtggcacggaggcggcgatccacccgctgcccatcgccgcgttcggcaacatgatggcgatgtccaagaacaacgacgacccgcagggcgcctcccgccccttcgacacggcgcgcgacggcttcgtcctcggcgagggcgccggcgtcctggtcctggagtccgccgagcacgccgccgcgcgcggcgcccgcgtctacgcggaggcggtcggccagggcatctccgccgacagccacgacatcgtgcagccggagccggagggccgcggcatctccgccgccctgcagaacctgctggacggcaacgacctggacccggccgagatcgtgcacgtcaacgcgcacgccacctcgacgccggccggtgacatcgccgagctgaaggcgctgcgcaaggtcctcggcgacgacgtcgaccacatggcggtctccggcaccaagtcgatgaccggtcacctgctcggtggcgcgggcggcgtggagtccgtggcgaccgtgctcgcgctgtaccaccgggtggcgccgccgaccatcaacgtcgagaacctcgacccggaggccgaggccaacgcggacatcgtccgcggggaggcccgcaagctcccggtggagggccgtatcgccgcgctgaacgactcgttcggcttcggcgggcacaacgtggtgctcgcgttccggtcggtctga

SEQ ID NO: 19723 - protein, 429 aa, Streptomyces coelicolor A3(2)
MSSTNRTVVVTGIGATTPLGGDAASTWEGLVAGRSGVRPLEQEWAADQAVRIAAPAAVDPSEVIPRPQARRLDRSAQFALIAAQEAWKDAGYAGKAGESPAEDGAAHVDPDRLGAVIASGIGGVTTLLDQYDVLKEKGVRRVSPHTVPMLMPNGPSANVGLAVGARAGVHTPVSACASGAEAIGYAIEMIRTGRADVVVAGGTEAAIHPLPIAAFGNMMAMSKNNDDPQGASRPFDTARDGFVLGEGAGVLVLESAEHAAARGARVYAEAVGQGISADSHDIVQPEPEGRGISAALQNLLDGNDLDPAEIVHVNAHATSTPAGDIAELKALRKVLGDDVDHMAVSGTKSMTGHLLGGAGGVESVATVLALYHRVAPPTINVENLDPEAEANADIVRGEARKLPVEGRIAALNDSFGFGGHNVVLAFRSV

SEQ ID NO: 19724 - DNA, 1224 bp, Streptomyces coelicolor A3(2)
  CDS (1)..(1224): transl_table=11
atgaccgacccctccctcgccgtgaccgggctgggtctggtgaccgcggccggcatgggcgtcgacgccacctgggagggggtgttgcgcggccggtcggcgggcgccagggacgagcggctcgccggactgcccgtggacatcgcctgtgcggtgccgggcctgcaaccggcgcgtcacgtggaccggcgcagcgtcctgatccacgaccgcttcgtccagctggcgatcgtggccgcccgggaggccgtggccgacgccggactcgacccgctgacctgggacggcgcccgggtgggcgtggtcgtcggctgcgggctcggcggggtgacgacgtgggagacccagcaccggcgcctgctggagcgcggccccgaagcggtgtccgcgctcctggtgccgatgctggtgcccaacatggcggccgggcacctcgcgatggacctgcgtgcgctgggcccgaacctggtgacggcgaccgcctgcgcctcgggcggcaccgcgctgggcaccgcggcccggctgctgcgggacgggacgtgcgacatcgtcgtggccggtggcaccgaggcgggcgtcagccccctcatggtcaccggtttcgcgcagatgggcgcgctgtcgcgccgggtcgacgatccggcggcggcgtccaggcccttcgacgccgaccgggacggcttcgtgatcggtgagggcagcggcatgctcgtcctggagcgcgcggcggacgccgaggcgcgcggcgcgacggtgcgcgcgcggctgctgggccacggcgcgtcggcggacgcccaccacgtcaccgcgcccgacccggagggcgccggcgccctgcgggcgatggaggcggccctcgcccaggcgggcgtcaccggccgcgacatcgaccacgtgaacgcgcacggcacctcgaccccgctcaacgacgcggtggaggccgcggtgctgggccggctgctgggcgaccgggcgaccgtgacctcggccaagggcgtcctcgggcacacgctgggcgccgccggtgcgatcgaggcggcgctgaccgtgctcagcatcgagcgctccaccgttcccccgaccgcgaacctgcgacggcgggacccggccgtcgacctggacgtggtcgccgacgctccgcgggagcagaaggtggagctggcgatgagcaactccttcggcttcggcgggcagaacgcggtcctggtcttcgcctccccgtga

SEQ ID NO: 19725 - protein, 407 aa, Streptomyces coelicolor A3(2)
MTDPSLAVTGLGLVTAAGMGVDATWEGVLRGRSAGARDERLAGLPVDIACAVPGLQPARHVDRRSVLIHDRFVQLAIVAAREAVADAGLDPLTWDGARVGVVVGCGLGGVTTWETQHRRLLERGPEAVSALLVPMLVPNMAAGHLAMDLRALGPNLVTATACASGGTALGTAARLLRDGTCDIVVAGGTEAGVSPLMVTGFAQMGALSRRVDDPAAASRPFDADRDGFVIGEGSGMLVLERAADAEARGATVRARLLGHGASADAHHVTAPDPEGAGALRAMEAALAQAGVTGRDIDHVNAHGTSTPLNDAVEAAVLGRLLGDRATVTSAKGVLGHTLGAAGAIEAALTVLSIERSTVPPTANLRRRDPAVDLDVVADAPREQKVELAMSNSFGFGGQNAVLVFASP

SEQ ID NO: 19726 - DNA, 1236 bp, Xanthomonas axonopodis pv. citri str. 306
  CDS (1)..(1236): transl_table=11
atgagtcgtcgtgttgtcgttaccggcatgggcatggtgtcgccgctgggcaatgatctggccaccagctgggacggaatcgtccacggccgctcaggcattggcccgatcacgcagatcgatgcctcgcagttcaccaccaagatcgccggtgaaatcaagaatttcgaccccacgctttttgtgtccgccaaggacgtcaagaagatggattcgttcatccactacggtgtcggcgcctcgttcatggcgctggacgattccggactggaaatcgacgaaagcaatgccgaacgcgtgggcgccattctcggctccggcatcggcgggctgctcggcattgaagagcagaccatcaaattccatgagggcggcgcgcgcaagatttcgccgttctatgtgcccagcaccatcatcaacatgctgcccggccaggtgagcctgatcaaaggcctgaaaggcccgacgttctcggctgtatcggcctgcgccacatccaaccattcgatcggcaccgcgatgcgcatgatccagcacggcgatgccgatgtgatgctggctggcggtgccgagcgcggttcgtcgccgagttcggtgggcggcttttgtgcgatgaaagcgatgtccacccgtaacgacgacccggccggcgcgtcgcggccgtgggacaagcagcgcgatggcttcgtgctgggcgacggcgccggcgtgctggtgctggaggagtacgaacacgccaaggcgcgtggcgcacgcatctatgccgagctggtcggcttcggcgccagttccgatgcgtttcacatgaccgcccccagcgaagacggcgagggcgcggcgcgcagcatggcggcagcgatgcgcgacgccaagctcaaccccgagcagatcggctacctcaacgcgcacggcacctccacgccgctgggcgatctggccgaaacgatggcgatgaagcgcgcgctgggcgatcacgcctacaagaccatggtgagctcgaccaagtcgatgacggggcatctgctcggcgcggccggcggtgtggaagcgatcttctcggtgatggcgctgcacaccggcatcatcccgccgaccatcaacctggaagagccaagcgaaggctgcgacctggattacgtgccgaacgtggcgcgccaggtgcaggtggatgcggtgatgtccaacggcttcggctttggcggcaccaacggcacgctggtgttcaagcgcgtttga

SEQ ID NO: 19727 - protein, 411 aa, Xanthomonas axonopodis pv. citri str. 306
MSRRVVVTGMGMVSPLGNDLATSWDGIVHGRSGIGPITQIDASQFTTKIAGEIKNFDPTLFVSAKDVKKMDSFIHYGVGASFMALDDSGLEIDESNAERVGAILGSGIGGLLGIEEQTIKFHEGGARKISPFYVPSTIINMLPGQVSLIKGLKGPTFSAVSACATSNHSIGTAMRMIQHGDADVMLAGGAERGSSPSSVGGFCAMKAMSTRNDDPAGASRPWDKQRDGFVLGDGAGVLVLEEYEHAKARGARIYAELVGFGASSDAFHMTAPSEDGEGAARSMAAAMRDAKLNPEQIGYLNAHGTSTPLGDLAETMAMKRALGDHAYKTMVSSTKSMTGHLLGAAGGVEAIFSVMALHTGIIPPTINLEEPSEGCDLDYVPNVARQVQVDAVMSNGFGFGGTNGTLVFKRV

SEQ ID NO: 19728 - DNA, 1317 bp, Drosophila melanogaster
  CDS (1)..(1317)
atgcgagttttaggaaagtgcactgttttggtcaggcaaacccgcagcttatccacgccatctgggcgccgcagagtggtggtcacgggaagtggcgcagtcactccgctgggcaacaatggaccggattcttggcgacgcatcctggccggcgagtcggcaatttctcggctgagtgcggagtttaagggcttgccctgccaggttgcggctcaaatcccgagggaaaacctacagctggatcaacacctgaccaagtcggacattaagctgatgagccccgccacgcagcttgccgtattggcggctgaggaggccttgtcaaccggaaagctgtgccccaagcaattgagcgaggaggagcttgagcggttcggagtgtgcgtgggcatgggcatgttcgaccttgcagaggtctatggcgcctggaaccagctgcaacgaggttacaacagagtaagcccctttttcgtgcccaggctgctgcccagtatggcgtgtggtcacataagcatgcgacatggcttaagaggacctaaccactcggtgtccacggcctgcgccacaggtgcccatgccctgggcgatgccatgcgcttcattcgcagcggagatgccgacttgatgctggcggggagtggtgaggcctgcatagatccgctctccatcgctggattttgcagactgcgggctctgagcaccgcattcaacgataatccggcggttgcgtccagaccgtttgacaagtcccgggatggcttcgtgatgggcgagggcgcagctgtgctcttgctggaagaactggagcacgcccgcgctcggggagctcccattctagctgagattctgggctacggcttgtccggcgatgcctatcacataacgtcgcccagcgatgacggcgccggagccactcttgccatgaagcgggccatacaagatgctgggattgcaccagaggatgttacgtatgtaaatgcccacgcaacctccacgcccaccggggatcgcattgagtcacacgctataggtcgtgttttcggggcgcacactccgcaggtgagggtctcctccaccaagggagcacatggccacctgctgggctcctctggcaacctggaagcgctctttgtggtgctcgcctgcgcgaataacaagctgccgccctccatcaacattgagcacctcgatgtggacgtcaatgtggtcacgaaagctactgattggtcggcggaccaaaagcggcgtgttgccctcaagaattccttcggctttggaggaaccaatgcctccctctgcattgctagctacatttaa

SEQ ID NO: 19729 - protein, 438 aa, Drosophila melanogaster
MRVLGKCTVLVRQTRSLSTPSGRRRVVVTGSGAVTPLGNNGPDSWRRILAGESAISRLSAEFKGLPCQVAAQIPRENLQLDQHLTKSDIKLMSPATQLAVLAAEEALSTGKLCPKQLSEEELERFGVCVGMGMFDLAEVYGAWNQLQRGYNRVSPFFVPRLLPSMACGHISMRHGLRGPNHSVSTACATGAHALGDAMRFIRSGDADLMLAGSGEACIDPLSIAGFCRLRALSTAFNDNPAVASRPFDKSRDGFVMGEGAAVLLLEELEHARARGAPILAEILGYGLSGDAYHITSPSDDGAGATLAMKRAIQDAGIAPEDVTYVNAHATSTPTGDRIESHAIGRVFGAHTPQVRVSSTKGAHGHLLGSSGNLEALFVVLACANNKLPPSINIEHLDVDVNVVTKATDWSADQKRRVALKNSFGFGGTNASLCIASYI

SEQ ID NO: 19730 - DNA, 1242 bp, Chlorobium tepidum TLS
  CDS (1)..(1242): transl_table=11
atgaaaagagtcgtcgtcaccggaatcggggttctgtcgccaatcggcctttcggctggggcattctggaacgccctcatggagggaaaaagcggcgctgcaccgatcacctatttcgatacgaccaatttcgcgaccaccttcgcctgcgagctcaagaatttcaaggccgatgagtacatcgaccggaaatccgcggatcgcatggatccatactgtcagtacggcgttatctctgccgaacaggcgctgaaagattccgggcttgacctgaccgcgatcgatccgaccaggatcggcgtcgtgcacggctcgggcatcggcggcatgacggtctacgaccagcagtttcgccagtatctggaacgcggcccccgcagggtcagcccgttcttcattccgatgctcattcccgacatcgccgccggacagatttcgatccgcaacggtctgatggggccaaactatgcgacagcatccgcctgcgcgacctccctgcacgctatcatggacgccgtcatgctcctgcagatgggcatggccgactacatggtctgcggcggctcggaagcaccgatcacgcagatgagcgtggctggcttcaactcggccaaagcgctctcgacccgcaacgacgctccgacaaaagcctcacgcccgtacgatgtggatcgcgacggtttcgtcatgggtgaaggcgccggttcgctggtgatcgaaacctacgagtcggctgtgaagcgcggcgcaaaaatctacgcagagatcgtcggcatgggcgcgtctgccgatgcgtatcacctcaccgctccgcacccggagggtcttggcgcttgcagcgcgatgaccaccgccctgaacatggcgggcatcaccccggacaagatcgactacatcaacacccacggcaccgccacgccgcttggcgatctggcggaaatcaaggcaatcaagaaggtgttcggcgagcacgcatcaaaactcagcatcagctcgaccaagtcgatgaccggtcacctgcttggtgcggcgggcgtggtcgaatcgatcgcctgcatccttgcgctgcagaaccagaccgttcctccaaccatcaacctcgacaatgtcgatcccgagatcgatgtggatgtgacgccgaacgtcccgaaacagcgctcgattgagtatgcgctgaacaacggtttcggattcggcgggcacaacggctgcctgatcttcaggaaggctccggccgcctga

SEQ ID NO: 19731 - protein, 413 aa, Chlorobium tepidum TLS
MKRVVVTGIGVLSPIGLSAGAFWNALMEGKSGAAPITYFDTTNFATTFACELKNFKADEYIDRKSADRMDPYCQYGVISAEQALKDSGLDLTAIDPTRIGVVHGSGIGGMTVYDQQFRQYLERGPRRVSPFFIPMLIPDIAAGQISIRNGLMGPNYATASACATSLHAIMDAVMLLQMGMADYMVCGGSEAPITQMSVAGFNSAKALSTRNDAPTKASRPYDVDRDGFVMGEGAGSLVIETYESAVKRGAKIYAEIVGMGASADAYHLTAPHPEGLGACSAMTTALNMAGITPDKIDYINTHGTATPLGDLAEIKAIKKVFGEHASKLSISSTKSMTGHLLGAAGVVESIACILALQNQTVPPTINLDNVDPEIDVDVTPNVPKQRSIEYALNNGFGFGGHNGCLIFRKAPAA

SEQ ID NO: 19732 - DNA, 1029 bp, Yersinia pestis KIM
  CDS (1)..(1029): transl_table=11
ttgggccgttggtggagatataagtggatcacttttcatccgtcgttgacacatgcggataacacagagaaacaagagcgtaccgcgacaatcataggcgcgggtattggtggttttccggccattgcccatgcagtgcggacttccgacagccgtgggccaaaacgcctctcaccgtttactgtcccttcattcttagtgaatttggccgctggccatgtttctatcaaacatcattttaaaggcccgattggcgcaccagtcactgcctgtgctgccggtgtacaggcaatcggtgacgccgtgcggatgatccgcaacaatgaagcagatgttgccctgtgcggtggcgcagaagccgtgatcgataccgtgagtctggccggttttgctgccgctcgtgcgttatcaacacactttaatagcacaccagaaaaagcctcccgccccttcgacactgcccgtgacggttttgtgatgggagaaggtgctggtttactgattattgaggagttggagcatgctttagccagaggcgcgaagccactagcagaaatagtcggctatggtaccagtgccgatgcttaccatatgacctctggcgctgaggatggcgacggggcctatcgcgccatgaaaatcgctttgcgtcaggccggtattacgcccgagcaagttcagcatctgaatgcccacgcgacctcaacaccggtaggtgatctcggtgaaattaatgccattaaacatttgtttggcgagagtaatgcgttagcgattacctcaacaaaatccgccacagggcacctgttgggcgctgctggtgggctggaaaccattttcactgtactggcattgcgtgatcaaatcgtgcccgcaacgttgaatctggaaaatccagatcctgcagccaagggactcaacattattgcaggtaacgcacaacctcatgacatgacgtatgccctttccaatggttttggctttgctggggtgaacgcaagtatcttactgaaacgctgggtggactaa

SEQ ID NO: 19733 - protein, 342 aa, Yersinia pestis KIM
MGRWWRYKWITFHPSLTHADNTEKQERTATIIGAGIGGFPAIAHAVRTSDSRGPKRLSPFTVPSFLVNLAAGHVSIKHHFKGPIGAPVTACAAGVQAIGDAVRMIRNNEADVALCGGAEAVIDTVSLAGFAAARALSTHFNSTPEKASRPFDTARDGFVMGEGAGLLIIEELEHALARGAKPLAEIVGYGTSADAYHMTSGAEDGDGAYRAMKIALRQAGITPEQVQHLNAHATSTPVGDLGEINAIKHLFGESNALAITSTKSATGHLLGAAGGLETIFTVLALRDQIVPATLNLENPDPAAKGLNIIAGNAQPHDMTYALSNGFGFAGVNASILLKRWVD

SEQ ID NO: 19734 - DNA, 1263 bp, Thermosynechococcus elongatus BP-1
  CDS (1)..(1263): transl_table=11
atggcaaaggcgcatcaaaaacgggtcgttgtcaccgggatgggggcgattacccccctcggcaacacccttgcggagtattgggaaggattaatggccggtcgcaacggcattgattacatcacggcttttgatgccagtcgtcatgactgccgcattgcggctgaggtgcgtggctttgatcccaccctctacatggatcgcaaagatgccaagcgcatggatcgctttgctcaatttgccgtggccgccagtaagcaagcccttgcggatgcccaattgaccattgacgagggcaatgccactgacattggcatcattattgggactggtgtggggggtctaaaggtgatggaggatcagcaggaggtctatctcactagggggcccgatcgctgtagtccttttatgatcccaatgatgattgccaatatggccgcaggactcaccgccattcacaccggtgccaagggccccaattcctgttcggtaaccgcctgtgcagcaggttccaatgccattggcgatgccttccgcatggtgcaacacggttacgccaaggcgatgatctgtggtgggacagaggcggcgattactcccctatcggtggctggttttgcggcagctcgtgccctttccacccgcaatgatgacccccaccatgccagccgtccctttgacctcaaccgcgatggctttgtccttggggaaggggcaggcatcttgatcctggaagaattggagtttgcccttgcccggggagcacgcatctatgcggaaatggtgggctacggcttgacctgtgatgcctaccacatgactgctccctcaccggggggagaaggggcggcccgtgccattgaagcctgcctcaaggatgcgcagattgctccggatcaggtgagctatatcaacgcccacggtaccagtacccccgccaacgacagtacggaaactgccgccattaaacgtgcccttggcgaagaaaatgcgcgtcgcgttcccgtgagttcgacaaaatccatgacaggacacctgctggggggatcaggggggatcgaggcgatcgcgacggtaatggccatagcccacgatcgcatcccccctacaattaacttggagcaaccggatcccgcctgcgatctggactatgttccccatcagagccgggcctgtccggtgacggtggctttgtccaactcctttggctttggtgggcacaacgtcacgttggccttccgcaagtttactcccgacctttaa

SEQ ID NO: 19735 - protein, 420 aa, Thermosynechococcus elongatus BP-1
MAKAHQKRVVVTGMGAITPLGNTLAEYWEGLMAGRNGIDYITAFDASRHDCRIAAEVRGFDPTLYMDRKDAKRMDRFAQFAVAASKQALADAQLTIDEGNATDIGIIIGTGVGGLKVMEDQQEVYLTRGPDRCSPFMIPMMIANMAAGLTAIHTGAKGPNSCSVTACAAGSNAIGDAFRMVQHGYAKAMICGGTEAAITPLSVAGFAAARALSTRNDDPHHASRPFDLNRDGFVLGEGAGILILEELEFALARGARIYAEMVGYGLTCDAYHMTAPSPGGEGAARAIEACLKDAQIAPDQVSYINAHGTSTPANDSTETAAIKRALGEENARRVPVSSTKSMTGHLLGGSGGIEAIATVMAIAHDRIPPTINLEQPDPACDLDYVPHQSRACPVTVALSNSFGFGGHNVTLAFRKFTPDL

SEQ ID NO: 19736 - DNA, 1233 bp, Streptococcus agalactiae 2603V/R
  CDS (1)..(1233): transl_table=11
atgacattacagcgagtagtagtaacaggttacggtgtaacctcacctattggaaacacaccagaagaattttggaatagtcttaaagaaggaaatgttggtattggacctatcactaaatttgattcaagtgatttcatggtcaaaaatgctgctgaaattcatgattttccatttgataaatattttgtcaaaaaagatctgaacagatttgatatgtattccctttatgccttatatgcttcaagtgaagctattcaacatgctaatttaaatttagatgaaattgatgcagatcgatttggtgtcatcgttgcatcaggtattggagggattcaagagattgaagaacaagtgattcgtcttcatgaaaaagggccaaaacgcgtaaaaccaatgacgcttccaaaagctctaccaaatatggcagctggaaatgttgcgatgaggttaggcgctcatggtgtatgtaaatcaattaatacagcttgtgcttcttctaatgatgctattggagatgctttccgtaatataaaatttggtattcaagatattatggtagtcggtggtgcagaagctgctattacaaaatttgccattgctggattccaaagtcttacagcattatcaacaactgaagatccatcaagagcatctattccatttgataaagatcgcaatggatttatcatgggagaaggttctggaatgttggtcttagaaagtttagaacacgctgaaaaacgaggagctactattcttgcagaagttgttggttatggtaacacttgtgacgcatatcatatgacttcaccacatccagaaggtttaggagccactaaagctattcaacttgcactggttgaagctaatattaaacctgaagaagttaactatgtaaatgctcatggaacttcaacacctgctaacgaaaaaggagagagtcaagctattgttgctgcacttgggacagacgttccagtttcttcgactaaatcttttactggtcatcttttgggtgccgcgggagctgttgaggcaattgcaactattgaagcgatacgtcatagttatgttccaatgactgctggaacgacagaattatcagaagatattacagcgaatgttatttttggtcaagggcaagacgctgatattcgttatgccatttcaaatacatttggttttggaggacacaatgcagttctggccttcaaacgctgggaggattaa

SEQ ID NO: 19737 - protein, 410 aa, Streptococcus agalactiae 2603V/R
MTLQRVVVTGYGVTSPIGNTPEEFWNSLKEGNVGIGPITKFDSSDFMVKNAAEIHDFPFDKYFVKKDLNRFDMYSLYALYASSEAIQHANLNLDEIDADRFGVIVASGIGGIQEIEEQVIRLHEKGPKRVKPMTLPKALPNMAAGNVAMRLGAHGVCKSINTACASSNDAIGDAFRNIKFGIQDIMVVGGAEAAITKFAIAGFQSLTALSTTEDPSRASIPFDKDRNGFIMGEGSGMLVLESLEHAEKRGATILAEVVGYGNTCDAYHMTSPHPEGLGATKAIQLALVEANIKPEEVNYVNAHGTSTPANEKGESQAIVAALGTDVPVSSTKSFTGHLLGAAGAVEAIATIEAIRHSYVPMTAGTTELSEDITANVIFGQGQDADIRYAISNTFGFGGHNAVLAFKRWED

SEQ ID NO: 19738 - DNA, 1239 bp, Oceanobacillus iheyensis HTE831
  CDS (1)..(1239): transl_table=11
ttgaataagcgagttgttattacgggactaggagcattaagcccagtgggcaataatgtagatgaaatgtgggaaagtgttacgacaggaaaatcaggaatagattttgttacaaaggtggataaagatttatttccagcaaaggtagcggcagaagtgaaaaactttgatcctacactgtatatggataaaaaagacgcacgtaaaatggatccatttacacaatatgcagttgctgctgctaaaatggctgtagaagatgctaatttaaccattaatgaagcgaacgctgaacgagtaggtgtatggattggatctggtattggtggtatgaagacttgggaagaccaacataccaagttcatggagaaaggcgcaaaacgcgtaagtcctttctttgtaccgatgatgattccagatatggctgctggtcaggtttcgattcaattaggagcgaagggaattaattcttgttcggttacagcatgtgcatctggtgccaattctatcggtgatgctttcaaggctattcagcgtggagatgcagatattatgatttcgggcggtacagaggctccgatatcagatatggcattcgctggattctcttcttcaaaagcgttatctacaaatgaggatccacaaaaagcaagtagaccttttgataaaaatcgtaacggatttgttatgggagaaggagcagggatcttgatattagagtctttagaatctgccctgcaaagagatgcgacgatttatggagagatagtaggatatggtgccactggagacgcttatcatatcactgcgcctgcagagaatggcgagggtgcaacccgagcaatgcaaatagcgttaaaagatgctaatctagaaccttcggatgtacagtatgtgaatgctcatggaacaagcacagatttaaatgataaatatgagacgcaagcaatcaaagctgtatttggtgaccatgcaagtgatttagcaatttcgtctacgaagtcgatgactggccacttattaggagctgctggtggaattgaagcggtaatatctattaaagcaattcaagatagtataattccgccgacgattaattatgaaacgcctgatccagattgtgatttggattatgtaccaaatgaagcaagaaaacaaacagtagatgcggtggtaagtaattcattaggttttggcggacataacgttgccttggtatttaaaaaatttgtgaaataa

SEQ ID NO: 19739 - protein, 412 aa, Oceanobacillus iheyensis HTE831
MNKRVVITGLGALSPVGNNVDEMWESVTTGKSGIDFVTKVDKDLFPAKVAAEVKNFDPTLYMDKKDARKMDPFTQYAVAAAKMAVEDANLTINEANAERVGVWIGSGIGGMKTWEDQHTKFMEKGAKRVSPFFVPMMIPDMAAGQVSIQLGAKGINSCSVTACASGANSIGDAFKAIQRGDADIMISGGTEAPISDMAFAGFSSSKALSTNEDPQKASRPFDKNRNGFVMGEGAGILILESLESALQRDATIYGEIVGYGATGDAYHITAPAENGEGATRAMQIALKDANLEPSDVQYVNAHGTSTDLNDKYETQAIKAVFGDHASDLAISSTKSMTGHLLGAAGGIEAVISIKAIQDSIIPPTINYETPDPDCDLDYVPNEARKQTVDAVVSNSLGFGGHNVALVFKKFVK

SEQ ID NO: 19740 - DNA, 1263 bp, Brucella suis 1330
  CDS (1)..(1263): transl_table=11
atgaggcgtgtcgtcatcaccggtctcggtctggtgtcaccgctcgcaagcggtgtggaagagacttggaagcggcttcttgccggtgaaagcggggctcgccgcgttacggaattcgaggtggacgatctggcctgccagattgcctgccgcattcccgttggcgatggcacgaacggtacgttcaatcccgacctgcatatggacccgaaggaacagcgcaaggtcgatcctttcatcgtttatgccgtcggtgcagccgatcaggctctggatgatgccggctggcacccggaaaatgatgaggatcaggtccgcaccggcgttcttatcggttcgggcatcggcggcatcgaaggcattgtcgaggcgggctacacgctgcgcgacaagggcccgcgccgtatttcgcccttcttcattccgggccgtctcatcaatctggcctccggccatgtgtcgatcaagcacaagctgcgcgggccgaaccactcggtcgtcacggcctgtgcaaccggcacgcacgctattggcgatgccgcccgcctcattgctttcggcgatgcggatgtgatggttgccggtggcacggaatcgccggtgagccgcatttcgcttgctggctttgccgcctgcaaggcgctttccaccaagcgcaatgacgatccgaccgccgcttcacgtccttatgacgaggatcgtgacggcttcgtcatgggcgaaggcgctggcattgtggtgcttgaagagctggaacacgctttggcgcgcggtgcgaagatttatgccgaagtcatcggctatggcatgtcgggcgatgccttccatatcacggccccgaccgagagcggtgagggcgcacagcgctgcatggtggcggctctcaagcgtgccgggatcgtgccggacgagatcgactatatcaatgcgcatggcacgtccaccatggccgatacgatcgagcttggcgcggtggagcgcgtggtgggtgaggcggctgcgaagatttcgatgtcttccaccaaatcatccatcggccacctgttgggtgcggcaggggctgccgaagcgatcttctccacgctggccattcgcgacaatatcgcgcctgccacactcaatctggacaatccggcggcgcagaccaggatcgatctcgtgccgcacaagccgcgcgaacgcaagatcgatgtggcgctgtcgaattcgttcggtttcggtggcaccaatgcatcgctggtgctgcgccgctacacggcctga

SEQ ID NO: 19741 - protein, 420 aa, Brucella suis 1330
MRRVVITGLGLVSPLASGVEETWKRLLAGESGARRVTEFEVDDLACQIACRIPVGDGTNGTFNPDLHMDPKEQRKVDPFIVYAVGAADQALDDAGWHPENDEDQVRTGVLIGSGIGGIEGIVEAGYTLRDKGPRRISPFFIPGRLINLASGHVSIKHKLRGPNHSVVTACATGTHAIGDAARLIAFGDADVMVAGGTESPVSRISLAGFAACKALSTKRNDDPTAASRPYDEDRDGFVMGEGAGIVVLEELEHALARGAKIYAEVIGYGMSGDAFHITAPTESGEGAQRCMVAALKRAGIVPDEIDYINAHGTSTMADTIELGAVERVVGEAAAKISMSSTKSSIGHLLGAAGAAEAIFSTLAIRDNIAPATLNLDNPAAQTRIDLVPHKPRERKIDVALSNSFGFGGTNASLVLRRYTA

SEQ ID NO: 19742 - DNA, 1425 bp, Plasmodium falciparum 3D7
  CDS (1)..(1425)
atgaatattagatgtagaaaagaaaaaaaaaaaaaaaaaaaaaaaaacattaatcatgttaacagtaaaaggtatgccttcattaaaaggggtatacctggaatatccaagaattattttaaaggtttcaagttgtacaattcgagagaaatgaaaaatctttgtgaaacttctagagtggtgtgcacaggtgtaggggtagtaactggattagggattggcatagaacatttttggaataatattataaatggatatacatcaatagataaaattacaaaatttgatataaccggtatgtcatgtggtattggtagtgaaataaagaaaagcgattttaatcctagtgattattacacaaataaaaaagatgttaatcgtaatgatgattgtactcattatgcagtcgcagccacacgtttagctttagacgatgcaaaactaaatttggaaaaattagacaaagataaaacaggtactatcataggtagtggcataggtggactaagatttttagaaaaagaaatgaaaacaatgtatgaaaaaggacataaaagaataacaccatatttaatacctgcaatgatagcaaatactccatctggatatgtatctatcgaaaacaatattagagggatctctcttggtatgttaagtgcatgtgctacgtctggtaacacaataggtgaagcctatagatatataaaatataaagagtatgatgttatgatatgtggtggaactgaagctagtataactcctataagttttgctggattcaattcattaaaggctttatgtacaggttataacgataatccaaaaaaaggttgtagacccttcgatttaaaaagaagtggtttcgttatgggagaaggttcaggcatcttaattctagaatcatacgaacatgcaataaaaagaaatgcaccaatatatggagaaattatttcatattcttcagaatgtgatgcataccatattactgcaccagaacctaatgggaaaggtttaacaaattctattcataaagcattaaaaaatgcaaatataaacataaatgacgttaaatatattaatgcacatggtacttcaacaaatttaaatgataaaatagaaaccaaggtttttaaaaatgttttcaaagatcatgcatacaaattatatatatcatcaactaaaagtatgacaggacattgtataggtgctgctggagctatagaatctattgtatgtcttaaaactatgcaaacaaatattataccacctactattaattatgaatataaggacccagattgtgatctaaattatacacctaataaatatattcatgcaaaggaaaatattgatatatctctcaatacaaatttgggatttggaggccataacacagcattacttttcaaaaaaattgtaaagtga

SEQ ID NO: 19743 - protein, 474 aa, Plasmodium falciparum 3D7
MNIRCRKEKKKKKKKNINHVNSKRYAFIKRGIPGISKNYFKGFKLYNSREMKNLCETSRVVCTGVGVVTGLGIGIEHFWNNIINGYTSIDKITKFDITGMSCGIGSEIKKSDFNPSDYYTNKKDVNRNDDCTHYAVAATRLALDDAKLNLEKLDKDKTGTIIGSGIGGLRFLEKEMKTMYEKGHKRITPYLIPAMIANTPSGYVSIENNIRGISLGMLSACATSGNTIGEAYRYIKYKEYDVMICGGTEASITPISFAGFNSLKALCTGYNDNPKKGCRPFDLKRSGFVMGEGSGILILESYEHAIKRNAPIYGEIISYSSECDAYHITAPEPNGKGLTNSIHKALKNANININDVKYINAHGTSTNLNDKIETKVFKNVFKDHAYKLYISSTKSMTGHCIGAAGAIESIVCLKTMQTNIIPPTINYEYKDPDCDLNYTPNKYIHAKENIDISLNTNLGFGGHNTALLFKKIVK

SEQ ID NO: 19744 - DNA, 1239 bp, Shewanella oneidensis MR-1
  CDS (1)..(1239): transl_table=11
gtgtctaaacgtcgtgtagtggtaaccggtttagggttagtaacgcccgtgggcaatactgtcgacacaacttggaaagccctgctttcgggtaagagtgggattgcgcccataaccaaatttgatgccagcgaattcaccactcgtttcagtggttctgtaaaagatttcgatgttgagcagtacttaaccaaaaaagacgcccgcaaaatggacctctttattcagtatggtatggctgcaggcatccaagctatccaagactcaggtctggatatgagcaaagtaaacccaggccgcgttggtaccgctatcggtgctggtatgggtggaatgtggttgattgagcaaaatcacagtgcgttaatgaacggtggtccacgtaaaatttcgcctttcttcgtgccgagcaccatcattaatatgattgcaggccatttatcgattatgtacggaatgacaggccctaactttgccgtcactaccgcctgtacaaccggtgtgcataatatcggttttgcggcgcgcaccatcgcctatggtgatgctgacgtaatggttgccggtggggcggaagatgtcacgtgcccattaggtgtaggtggttttggtgcagcaaaagccctctcaactcgcaatgatgatccaactgcagcgagccgtccatgggataaagaccgtgatggttttgtgatcggtgatggcgctggtgtaatggtgatggaagaatacgagcacgctaaagcgcgcggtgcgaccatttatggtgaactcgttggctttggtatgagcggtgatgctttccatatgacctcgccaccaagtgatggtgcgggtgccgcagcggctatggtcaatgccgttaatgatgctaagctaccacttgagaaaattggctatatcaatgcccatggcacttcaacccccgcaggtgataaagcggaagcggcggcggttaagtcggtctttggtgatcacgcttataatctgcttgtgagttcgactaagtcgatgacgggtcacctattaggtgctgcgggcgcggtggaggcgattttcactttattggcactacgtgaccaagcggtaccaccgaccattaacctcgataatcctgacgaagggtgtgatttagactttgtggcacacactgcccgcgatgtgaagttagattacgctctatgtaactccttcggctttggtggaactaacggttcattactgtttaagaaagtctaa

SEQ ID NO: 19745 - protein, 412 aa, Shewanella oneidensis MR-1
MSKRRVVVTGLGLVTPVGNTVDTTWKALLSGKSGIAPITKFDASEFTTRFSGSVKDFDVEQYLTKKDARKMDLFIQYGMAAGIQAIQDSGLDMSKVNPGRVGTAIGAGMGGMWLIEQNHSALMNGGPRKISPFFVPSTIINMIAGHLSIMYGMTGPNFAVTTACTTGVHNIGFAARTIAYGDADVMVAGGAEDVTCPLGVGGFGAAKALSTRNDDPTAASRPWDKDRDGFVIGDGAGVMVMEEYEHAKARGATIYGELVGFGMSGDAFHMTSPPSDGAGAAAAMVNAVNDAKLPLEKIGYINAHGTSTPAGDKAEAAAVKSVFGDHAYNLLVSSTKSMTGHLLGAAGAVEAIFTLLALRDQAVPPTINLDNPDEGCDLDFVAHTARDVKLDYALCNSFGFGGTNGSLLFKKV

SEQ ID NO: 19746 - DNA, 1233 bp, Streptococcus mutans UA159
  CDS (1)..(1233): transl_table=11
atgacattaaaaagagttgtagtgacaggttacggcgtaacatcgccaatcggacatacaccagaagatttttggaatagtcttcatgatggtaaaatcggtattaaaccaattactaagtttgatgcttcagaaattcctgttttcaatgcaggcgaaattcaagattttccatttgataaatactttgttaaaaaagataaaaatcgtatggatacttactctctttatgccatttatgcagccatggaagctattgaaaatgctgcacttgacatggcacaagaaattcgtgatcgtgttggtgttattgtatcctcaggtattggtggtttacaagaattagaagatcaaatcattcgtatgcatgagcgtggcatgaaacgcattaaaccaatgtttatccctaaagctctgtctaacatgggagctggaaatattgccctcaagattggcgcacaaggagtctgcaaatctattactacagcttgtgcttcagctaatgatgctattggtgaagctttccgtgaaattaaatacggttttcatgatgtgattcttgcaggtggttcagaagcatccattactaagattggtattggtggtttcaacgctttgactgctctttctacaacagaggatccagcgcgttcagctattccatttgataaagatcgcaatggttttgtcatgggtgaaggtgctgccgttcttattctggaaagtcttgaacatgctcaaaaacgtggggctaggattttggcagaggttgttggttatggaagtaactgtgatgcctaccatatgacaacaccgactcctgatggttcgggtgctgctaaggctattaaattagcaattaatgaagcaggtatctcaccagaggaagtcaattatgttaatgctcatggtacatcaacacaggccaatgaaaaaggagaaagcaaggcaatcgttgctgttttaggtaaagatgtacctgtctcttctacaaaatcattcacaggccatcttcttggtgctgctggcggtgttgaggctattgccactattgaagcaattcgtaatcattttgtacctatgacagctggcactaaggaactttcagaagatattgaagcgaatgttgtttatggtcaaggtcaagaagcagttatcaaatatgctatctcaaatacctttggatttggcggacacaatgccgttcttgcctttaagcgttgggaggattaa

SEQ ID NO: 19747 - protein, 410 aa, Streptococcus mutans UA159
MTLKRVVVTGYGVTSPIGHTPEDFWNSLHDGKIGIKPITKFDASEIPVFNAGEIQDFPFDKYFVKKDKNRMDTYSLYAIYAAMEAIENAALDMAQEIRDRVGVIVSSGIGGLQELEDQIIRMHERGMKRIKPMFIPKALSNMGAGNIALKIGAQGVCKSITTACASANDAIGEAFREIKYGFHDVILAGGSEASITKIGIGGFNALTALSTTEDPARSAIPFDKDRNGFVMGEGAAVLILESLEHAQKRGARILAEVVGYGSNCDAYHMTTPTPDGSGAAKAIKLAINEAGISPEEVNYVNAHGTSTQANEKGESKAIVAVLGKDVPVSSTKSFTGHLLGAAGGVEAIATIEAIRNHFVPMTAGTKELSEDIEANVVYGQGQEAVIKYAISNTFGFGGHNAVLAFKRWED

SEQ ID NO: 19748 - DNA, 1245 bp, Pseudomonas putida KT2440
  CDS (1)..(1245): transl_table=11
gtgtcgcgtagacgcgtcgtggtcaccggtatgggtatgctgtcgccactgggtaccgatgtaccgagcacctggcagggcattctggctggccgcagtggcatcggtccgatcgaacacacggacctgtctgcctactccacccgttttggcggctcggtgaaaggcttcgaggttgagcagtacctgtcggccaaagaggcccgcaagctcgacctgttcatccagtacggcctggcggctggtttccaggccgtgcgtaatgccggcctggaggtcaccgatgccaaccgcgagcgtattggcgtggccatgggctcgggtatcggtggtttgaccaacatcgaagaaaccagccgcaccctgcacgattcagggccgcgccgcatttcgccgttcttcgtgccgggttcgatcatcaacatgatctccggtttcctgtcgatccacctgggtctgcaagggccgaactatgccatcgccactgcgtgcaccactggcacccattgcatcggcatggccgcgcgcaatatcgcctacggtgaggctgacgtgatgatcgccggtggcgccgaaatggccgcttgtggtctgggcatgggcggttttggcgcttcgcgcgcactgtctacccgcaacgatgaacccagccgggccagccgcccgtgggacaagggtcgtgacggctttgtattgtccgacggtgccggagccctggtgctcgaggagctggagcacgccaaggcccgcggtgcgactatctatgccgagctggttggctttggcatgagcggcgacgcctaccacatgacctcgccacccgactctggcgagggcgctgcccgctgcatggccaacgccttgcgcgatgccggtatccagccggaagaagtcagctacatcaacgcccacggcacttctaccccggcgggcgatgtggccgaagtggcggcgatcaagcgcgtgttcggcgagcatgcctacaagctggcggtcagctcgaccaagtcgatgaccggtcacttgctgggcgccgcgggcgcggtggaggcgatcttcagcgtgctggccatcaatagccagatggccccgccgaccatcaacctggacgagccggacgaggggtgtgacctcgacttcgttccccaccaggcgcgcagcatgccgatcgacgtggtgctgtccaactcgttcggctttggcggcaccaacggctcgctggtattccgccggtttgccggctga

SEQ ID NO: 19749 - protein, 414 aa, Pseudomonas putida KT2440
MSRRRVVVTGMGMLSPLGTDVPSTWQGILAGRSGIGPIEHTDLSAYSTRFGGSVKGFEVEQYLSAKEARKLDLFIQYGLAAGFQAVRNAGLEVTDANRERIGVAMGSGIGGLTNIEETSRTLHDSGPRRISPFFVPGSIINMISGFLSIHLGLQGPNYAIATACTTGTHCIGMAARNIAYGEADVMIAGGAEMAACGLGMGGFGASRALSTRNDEPSRASRPWDKGRDGFVLSDGAGALVLEELEHAKARGATIYAELVGFGMSGDAYHMTSPPDSGEGAARCMANALRDAGIQPEEVSYINAHGTSTPAGDVAEVAAIKRVFGEHAYKLAVSSTKSMTGHLLGAAGAVEAIFSVLAINSQMAPPTINLDEPDEGCDLDFVPHQARSMPIDVVLSNSFGFGGTNGSLVFRRFAG

SEQ ID NO: 19750 - DNA, 1314 bp, Pseudomonas putida KT2440
  CDS (1)..(1314): transl_table=11
atgatccaacgagaggtcgaaatgactcacaacgttaatcaaaagcgcatcgtggtgaccggcaccggcgttgtcagcccgctgggctgcggcgtaaaggaagtctggcggcgattgctggctgggcagtccgggattcgcgcgcttgctggcgatgtcgtcgaaggcactggcgtgtcagtgggcggcagcgtgcccacattggccgaggatgcagtggcaggctatcaacccgagcgggtcatccacgccaaggaacgcaagaagatggatcggttcatcgagtttgcgctggtagcagcggatgaagcattgcagcaagccggctggaatcccgagcgtcaggctgaacgcgcgcgcaccgccaccatcatcgcatcaggcgtcggtggcttcggcgccatcgcagaggcggtgcgcaccactgacgcacgtggccctcgcaagttgtcgcccttcacggcgccatcgttcctggccaatatggcagcgggtcatgtctccatacgctatggcttcgaaggcccacttggggcacccgtcacagcctgcgctgcgggggtgcaggccattggcgacgccgctcggctcatcagaagcggcgaagcggatatcgcgatctgcggtggcgccgaggcggcaattgatcgtgtgacgctaggctgctttgcggctgcacgagcgctcagcacgggcttttcggatagccctgagcaagcctcccgtcctttcgatagccaacgggacgggtttgtcatggctgaaggggctggcttgctggtgatcgagtcgctggaacatgcgctggcccgtggcgccaagccgctggccgagctggtcggctacggaacgagcgctgatgcctatcatctgaccgctggccccgaagacggaagcggtgccaggcgcgccatgcaactcgcgctgcaacaggcgtcgatagcgcctggggacgtggaccatatcaatgcgcatgcgacttcgacccaggttggcgacaagggtgaacttgcagcaattcgcgccgtattcggtagcggcagcggcgtggcgattacatcgaccaaatcggccaccggccacctcctgggggcggcaggcggtgtcgaagccattttcacggtgttggcgctgcaagatcagatcgttccacccacgctcaacctgactcaggtcgatgatgctgcgcttggccttgacctggttgcacgaatagcccgtgaaatgcccatcgaatatgccttgtccaacggtttcggattcggtggtgtgaacgccagcgtactgttccgccgctgggaggccaacgtatga

SEQ ID NO: 19751 - protein, 437 aa, Pseudomonas putida KT2440
MIQREVEMTHNVNQKRIVVTGTGVVSPLGCGVKEVWRRLLAGQSGIRALAGDVVEGTGVSVGGSVPTLAEDAVAGYQPERVIHAKERKKMDRFIEFALVAADEALQQAGWNPERQAERARTATIIASGVGGFGAIAEAVRTTDARGPRKLSPFTAPSFLANMAAGHVSIRYGFEGPLGAPVTACAAGVQAIGDAARLIRSGEADIAICGGAEAAIDRVTLGCFAAARALSTGFSDSPEQASRPFDSQRDGFVMAEGAGLLVIESLEHALARGAKPLAELVGYGTSADAYHLTAGPEDGSGARRAMQLALQQASIAPGDVDHINAHATSTQVGDKGELAAIRAVFGSGSGVAITSTKSATGHLLGAAGGVEAIFTVLALQDQIVPPTLNLTQVDDAALGLDLVARIAREMPIEYALSNGFGFGGVNASVLFRRWEANV

SEQ ID NO: 19752 - DNA, 1263 bp, Vibrio vulnificus CMCP6
  CDS (1)..(1263): transl_table=11
gtgtccaagcgtcgtgtagttgtcactggcatgggtatgttgtcaccggttggcaacaccgtagcagaatcctggaaatccctgcttgaaggcaaaagtggtatcgtcaatatcgaacatttcgatgcaactaacttctctacccgtttcgccggtttggtaaaagacttcaactgcgaagaatacatgtctaaaaaagatgcacgtaaaatggatctcttcatccagtacggcattgcagcaggtattcaggctttagacgattcaggtcttgaaattacggatgaaaacgcacaccgcgttggtgttgcgatcggctctggtatcggcggtcttgatcttattgaagcaggccacaccgctttagttgaaaaaggcccacgtaaagttagcccattcttcgttccttcaactattgtaaacatggttgcaggtaatctatctatcatgcgtggcatgcgcggtccgaacatcgcgatttctacggcatgtactactggtctgcataacatcggccatgcagcgcgaatgatcgcttacggcgatgctgatgctatggttgctggtggtgctgagaaagcatcaacaccgcttggtatggctggctttggtgcggcgaaagctctttctactcgtaacgatgaaccacaaaaagcgtctcgtccttgggacaaagatcgcgatggtttcgtattaggcgatggtgctggcatcatggtacttgaagagtacgaacatgcaaaagcacgtggcgcaaaaatttacgctgagctggttggctttggtatgtcgggtgatgcttatcacatgacttcaccaagcgaagacggctctggtggcgctctagcgatggaagcggcaatgcgtgacgcaggtattgttggtacacaagtgggttatgtgaacgctcacggtacatcaacaccagcaggcgatgtggctgaaattaaaggcgtaaaacgtgctcttggtgaagagggcgcaaaacaagttaaagtatcttcaacaaaatctatgaccggccacctacttggtgccgcaggctctgttgaagcgatcattacaccgtgttgtcgctggttgatcagatcgttccaccaaccattaacctggataatccagaagaaggtttggatatcgatcttgttccacatactgcgaagaaagtggatatggaatacgcgatctgtaactcattcggcttcggtggaacaaacggctcactcgtatttaagaaaatctaacactcatttaggtttctga

SEQ ID NO: 19753 - protein, 420 aa, Vibrio vulnificus CMCP6
MSKRRVVVTGMGMLSPVGNTVAESWKSLLEGKSGIVNIEHFDATNFSTRFAGLVKDFNCEEYMSKKDARKMDLFIQYGIAAGIQALDDSGLEITDENAHRVGVAIGSGIGGLDLIEAGHTALVEKGPRKVSPFFVPSTIVNMVAGNLSIMRGMRGPNIAISTACTTGLHNIGHAARMIAYGDADAMVAGGAEKASTPLGMAGFGAAKALSTRNDEPQKASRPWDKDRDGFVLGDGAGIMVLEEYEHAKARGAKIYAELVGFGMSGDAYHMTSPSEDGSGGALAMEAAMRDAGIVGTQVGYVNAHGTSTPAGDVAEIKGVKRALGEEGAKQVKVSSTKSMTGHLLGAAGSVEAIITPCCRWLIRSFHQPLTWIIQKKVWISILFHILRRKWIWNTRSVTHSASVEQTAHSYLRKSNTHLGF

SEQ ID NO: 19754 - DNA, 1263 bp, Bradyrhizobium japonicum USDA 110
  CDS (1)..(1263): transl_table=11
atgcgtcgtatcgtcgtgacgggaatgggcgcggtgtcgccgctcgcctgcggtgtcgaactgtcctggcgccggctgctggcaggccaaagcgggctgcgtcccctgcccgaatgggcgcaggcgctccccgcgcgcatcgcgggcctcgtgcccgacaaggccggcgatgcggacggcggcttcgatcccgcgcaggccgccgcgccgaaagaccagcgcaagatggaccgcttcatcctgttcgcgctgctcgccaccgccgaagcggtcgcacaggccggatggacaccgcaggacgcgagcgcgctggaacggaccgcgacggtcatcggctccggcgtcggcggctttccggcgatggcggaggcagtgcgcatcaccgagcagcgcggcgtgcgccggctctcgccattcacgatcccctcgttcctcgccaatctcgccgccggccacgtctcgatcaaatacggctacaagggaccgctgggaacgccggtcacggcctgcgccgccagcgtccaggcgatcggcgatgccgcgcgcatgatccgcgccggcgaggccgatgtggcgatctgcggcggcgcggaggcctgcatcgacatcgtcagcctcggcggcttcgccgcggcgcgcgcgctgtcgagctccttcaacgaggagccgaggcgcgcctcgcgcccgttcgatcgcgaccgcgacggcttcgtcatgggcgaaggcgccggcatcctggtgatcgagacgctcgagcatgcgctggcgcgcggcgcgacaccgatcgcggagatcgtcggatacggcacgacggcggacgcctaccacatgacgtcggggccgcccgatggcgacggcgcgcgccgcgccatggagatcacactgcggcaggcgcggcttgagcccggcgaattgcagcacctgaacgcgcatgcgacgtcgacgcccgccggtgacgaaagcgagcttggcgcgatcggcgcgctgttcggccgtagccgcagcatcgcggtgagcgcgaccaaatcggccaccggccatctgctcggcgccgccggcgggctggaggcgatcttcaccgtgctcgccttgcgcgatcaggtcgcgccgccgacgctcaatttcgagaaccccgacgcgagcgctgatggcatcgacatcgtctcaggtagcgcgcggccgatgccgatgcggcacgccatctccaacggatttggcttcggcggggtgaatgcctgcgtgatcttccgccggatggactaa

SEQ ID NO: 19755 - protein, 420 aa, Bradyrhizobium japonicum USDA 110
MRRIVVTGMGAVSPLACGVELSWRRLLAGQSGLRPLPEWAQALPARIAGLVPDKAGDADGGFDPAQAAAPKDQRKMDRFILFALLATAEAVAQAGWTPQDASALERTATVIGSGVGGFPAMAEAVRITEQRGVRRLSPFTIPSFLANLAAGHVSIKYGYKGPLGTPVTACAASVQAIGDAARMIRAGEADVAICGGAEACIDIVSLGGFAAARALSSSFNEEPRRASRPFDRDRDGFVMGEGAGILVIETLEHALARGATPIAEIVGYGTTADAYHMTSGPPDGDGARRAMEITLRQARLEPGELQHLNAHATSTPAGDESELGAIGALFGRSRSIAVSATKSATGHLLGAAGGLEAIFTVLALRDQVAPPTLNFENPDASADGIDIVSGSARPMPMRHAISNGFGFGGVNACVIFRRMD

SEQ ID NO: 19756 - DNA, 1266 bp, Bradyrhizobium japonicum USDA 110
  CDS (1)..(1266): transl_table=11
atgaggcgggttgtcgtcacgggtctcggcatggtctcgccactcggctgtggcgtcgagccgacctggaaacgcatcctcaacggcgaaagcggtgcgcgcaggatcgagagcttcgatgtctccgatcttcagaccaagatcgcctgcacggtggtgcgcggcgacgggtcgaacgacaccttcaatcccgacaagtggatggagccgaaggaccagcgcaaggtcgacgacttcatcatcttcggcatggccgcagccggccaggcgctcgacgatgccaactggcatcccgaaaccgaagaggacaagtgtgcgaccggcaccatgatcgggtccggcatcggcggccttaacggcatcgcggaaaccgccatcctgctgaaggagcgcggaccgcgccgggtgtcgccgttcttcattccgggccgcctgatcaatctcgcctccggctacgtctcgatcgcgcacgggctgaaggggccgaaccattcggtggtcacggcctgctcgaccggcgcgcatgcggtcggcgatgccgcccgcctgatcgcgctgggcgatgccgacgtgatggtcgccggcggcgctgagtcgccgatcagccgcatcggcattgccggcttcaacgccgcgcgcgcgctctcgaccggtttcaacgacacacccgagaaggcctcacgtccctacgacaaggatcgcgacggcttcgtgatgggcgagggcgccggcgtcctcgttctggaagaactcgagcacgcgaggcgacgcggcgccaagatctatgccgaggtgatcggctatggtctgtcgggcgacgcctatcacatcacgtcgccgtcgcccgacggcgatggcggcttccgcagcatgcaggccgcgctcaagcgcgccggcctcacggcgtccgatctcgactacatcaacgcgcacggcacctcgacgccgctcggtgacgagatcgagctcggcgcggtcgagcgtctgctcggcaatgccgcctccaaggtcgcgatgtcctcgaccaaatcgtcgaccggccatctgctcggcgcggccggtgcgatcgaggcgatcttcgccattctcgcgattcgcgataatgtcgtgccgccgactatcaacctcgacaatccgtcggtcgaaactacgatcgatctcgtgccgcacacggcgaagaagcgagaggtcaacgtcgcgttgtcgaattctttcggttttggcggtaccaatgcgtcggtgatcgtccgccgtttggccaattag

SEQ ID NO: 19757 - protein, 421 aa, Bradyrhizobium japonicum USDA 110
MRRVVVTGLGMVSPLGCGVEPTWKRILNGESGARRIESFDVSDLQTKIACTVVRGDGSNDTFNPDKWMEPKDQRKVDDFIIFGMAAAGQALDDANWHPETEEDKCATGTMIGSGIGGLNGIAETAILLKERGPRRVSPFFIPGRLINLASGYVSIAHGLKGPNHSVVTACSTGAHAVGDAARLIALGDADVMVAGGAESPISRIGIAGFNAARALSTGFNDTPEKASRPYDKDRDGFVMGEGAGVLVLEELEHARRRGAKIYAEVIGYGLSGDAYHITSPSPDGDGGFRSMQAALKRAGLTASDLDYINAHGTSTPLGDEIELGAVERLLGNAASKVAMSSTKSSTGHLLGAAGAIEAIFAILAIRDNVVPPTINLDNPSVETTIDLVPHTAKKREVNVALSNSFGFGGTNASVIVRRLAN

SEQ ID NO: 19758 - DNA, 1236 bp, Xylella fastidiosa Temecula1
  CDS (1)..(1236): transl_table=11
atgaatcgtcgggttgtcgttactgggatggggatggtgtcgccgttgggcaatgatttgaccacaagttgggatggcatcgttcacggacgttcgggtatcgctcccatcgtccagattgatgcttctaagttccccactcagattgctggcgaaatcaagggattcgatccaacgaagttcgtatccgcgaaggatgcgaagaaaatggattcgttcatttactatggtataggcgcagcgtttatggcgctggatgatgctggtttagagatcaatgagatcaatgctgagcgtgttggtgccctgatcggttctggtataggtggcgtgtttggcattgaagagcaaaccatcaagctctatgaggggggcgcacgcaagatatctcctttctatgtgccagcgacgatcatcaacatgctgccaggacagttgagtgttttgaaaggcttgaaaggcccgacgttctctgcggtatctgcctgcgcgacttcaaaccactccattggtatggcaatgcgcatgatccagtatggtgatgctgatgttatgttggctggtggttctgagcgcgcttcttcgccaactgcgattggtggcttttgtgcgatgagggcgatgtctacgcgtaacgatgatccaaccggcgcttcgcggccgtgggacaaggggcgcgatggctttgtgcttggtgatggtgccggcattctagtgctggaagagtatgagtatgctaaagcgcgaggcgcacgcatctatgctgaattggctggtttcggcgccacttccgatgccttccacatgacgatgccagtcgaggatggtgaaggtgcagcgcgttgtatgcgtatagcgttgcaggatgcgagggtcactccggagcaaattgattatctcaatgcacacggtacctcaactcctttgggcgatctgtgcgaaaccaacgcgatcaagacggtattaggaggtcatgcctacaaagtgatggttagctcgaccaaatcaatgaccggacatctactcggtgcggccggtggtgtggaagcaattttctcagtgatggcgttgcatactggcatcgttccgccgacgattaatctcgaagaaccagacgaaggctgtgatcttgattacgtgccgcatgtggcgcgtgaggccaaactggatgtggtgatttcaaacggttttggttttggtggtactaacggcacattagtgttcaagcgtatatga

SEQ ID NO: 19759 - protein, 411 aa, Xylella fastidiosa Temecula1
MNRRVVVTGMGMVSPLGNDLTTSWDGIVHGRSGIAPIVQIDASKFPTQIAGEIKGFDPTKFVSAKDAKKMDSFIYYGIGAAFMALDDAGLEINEINAERVGALIGSGIGGVFGIEEQTIKLYEGGARKISPFYVPATIINMLPGQLSVLKGLKGPTFSAVSACATSNHSIGMAMRMIQYGDADVMLAGGSERASSPTAIGGFCAMRAMSTRNDDPTGASRPWDKGRDGFVLGDGAGILVLEEYEYAKARGARIYAELAGFGATSDAFHMTMPVEDGEGAARCMRIALQDARVTPEQIDYLNAHGTSTPLGDLCETNAIKTVLGGHAYKVMVSSTKSMTGHLLGAAGGVEAIFSVMALHTGIVPPTINLEEPDEGCDLDYVPHVAREAKLDVVISNGFGFGGTNGTLVFKRI

SEQ ID NO: 19760 - DNA, 1245 bp, Clostridium tetani E88
  CDS (1)..(1245): transl_table=11
atgttaaaaatgaaaagagtagtaattacaggcatgggtgcagtaacacctttaggtaatgatgtaaatactttttggaataatataaagcttggaacttgcggtatagattttataaagaattttaatacagaaggatttaaagtaaaattagcggcagaagtaaaagattttgagccttcagatgtaatagaaaaaagagaattaaaaagaatggataaatattgtcaatttgccgtagtagcagcagaagaagcaataaaagatgctaatttaaatttagataatatagataaagataagtttggagtagtagttggttcaggtataggtggcatagagactatagaaaaacaatataaaactttaatggaaaagggacctaatagagttcatccattatttatacctatgataataagtaatatggcagcaggaaatattgctataagatatggggcaaaaggaatatgcacaacagtagtaacagcttgtgctacaggaacaaactctattggagaagcttatagaatgatacaaaatggaacttctgatgtaatgattgctggaggaacggaagcatctataactcctttagctatggctggatttacatcccttactgcattaagtaaaagtgaagatcctacaagagcatctataccttttgacaaagagagaaatggatttgtaatgggagaaggatcaggaatattaattttagaatctttagaacatgctcaaaaaagaggagctaaaatatatgctgaaatggttggatatggagcaacctgtgatgcttatcatataacatcaccggcaccaggaggagaaggagcatctagagcaattaggttagcaatagatgaagcaaagatatctcctagggaaatatcctatataaatgctcatggtacaggtacagaatataacgataaatttgaaacagaagcaattaaagatgtctttggagaatatgctataaatataccaataagctctataaaatccatgacaggacatttattaggagcagcaggagcagtggaggctattacttctgtaaaatctatatgtgaaggttttgtaccgccaactataggatacaagataaaagatgaagaatgtgatttagactatgtgcctaataaaggtagataccaagaaataaaatatgctatgtctaattctttaggatttggagggcataatgcaataatcctatttaaaaagtggagtgattaa

SEQ ID NO: 19761 - protein, 414 aa, Clostridium tetani E88
MLKMKRVVITGMGAVTPLGNDVNTFWNNIKLGTCGIDFIKNFNTEGFKVKLAAEVKDFEPSDVIEKRELKRMDKYCQFAVVAAEEAIKDANLNLDNIDKDKFGVVVGSGIGGIETIEKQYKTLMEKGPNRVHPLFIPMIISNMAAGNIAIRYGAKGICTTVVTACATGTNSIGEAYRMIQNGTSDVMIAGGTEASITPLAMAGFTSLTALSKSEDPTRASIPFDKERNGFVMGEGSGILILESLEHAQKRGAKIYAEMVGYGATCDAYHITSPAPGGEGASRAIRLAIDEAKISPREISYINAHGTGTEYNDKFETEAIKDVFGEYAINIPISSIKSMTGHLLGAAGAVEAITSVKSICEGFVPPTIGYKIKDEECDLDYVPNKGRYQEIKYAMSNSLGFGGHNAIILFKKWSD

SEQ ID NO: 19762 - DNA, 1233 bp, Lactobacillus plantarum WCFS1
  CDS (1)..(1233): transl_table=11
atgacagaacgagtagttgtgactggaatgggtgcggtgacgcccctcggtaatagtgttgatgaatttttaacggggttattcgcgggacaagttgggattaagcccatcacgaagtttgacgcgacgcccactgggattacagttgccggtgaggttaaggattttcagccagaagaacgaattgaaaagaaattagcgaaaagattggatttattttccgtttatggtctatacagtgcaagtgaagcgatggcgcaagccggactaaatgaagcaaatattgacccagaacgattaggcgttatttatggttcgggtatcggtggtttaacgacgattgaagcgcaagtgatcaagatgcacgacaagagtcccaaacgagtttcaccgttattcgtccctaattcaatcattaacatggttgttggtaatatcgcgatgcaatttaacgcacagaataccagtcaagcgattgtgaccgcgtgtgcgtcggcgacgaatgccatcggcgatgcgtttgaatatttgcgtcaaggaaaggcagatgtgatcatcacgggtggttcagaagcttccgtcaacgaaatcggtattgcagggtttgcgtccctgactgcgttgtcgaaagccactgacccaacgttggcttcgttaccgtttgatcgtcaacgcaatgggtttgtgatgggtgaagggggtgcgacgttagtcttagaaacgttggcccatgcccaagcccgaggcgcccagattcttggtgaagtcgtgggttacggaacgactagcgatgcttatcatatgacagccccccgaccggatggtgctggtgccaaacgtgcaatgcaacaagccgttgcggaagccggcattcaaccgcgtgatgtggattacatcaatgctcatggaacagccacacatgcgaatgatagtgccgaagctcaagcaattagcgcgttgtttggtcaagatgtacaagtcagcagtactaaaggaatgacggggcacttattaggcgctgcgggtgcaattgaagctgttgcaacgattggtgctctgcaagcgggtcagttacctgcgaatattggttgtacggaccaagatcctgagtgtccagtcaatttagtaacgccagcaactcaacatcaagccgcaacctatgctttgagtaattcatttggttttgggggccataatgccgtggttgcctttaagaagtgggtgaatgtatga

SEQ ID NO: 19763 - protein, 410 aa, Lactobacillus plantarum WCFS1
MTERVVVTGMGAVTPLGNSVDEFLTGLFAGQVGIKPITKFDATPTGITVAGEVKDFQPEERIEKKLAKRLDLFSVYGLYSASEAMAQAGLNEANIDPERLGVIYGSGIGGLTTIEAQVIKMHDKSPKRVSPLFVPNSIINMVVGNIAMQFNAQNTSQAIVTACASATNAIGDAFEYLRQGKADVIITGGSEASVNEIGIAGFASLTALSKATDPTLASLPFDRQRNGFVMGEGGATLVLETLAHAQARGAQILGEVVGYGTTSDAYHMTAPRPDGAGAKRAMQQAVAEAGIQPRDVDYINAHGTATHANDSAEAQAISALFGQDVQVSSTKGMTGHLLGAAGAIEAVATIGALQAGQLPANIGCTDQDPECPVNLVTPATQHQAATYALSNSFGFGGHNAVVAFKKWVNV

SEQ ID NO: 19764 - DNA, 1245 bp, Pseudomonas syringae pv. tomato str. DC3000
  CDS (1)..(1245): transl_table=11
gtgtcgcgtagacgcgtcgtggtcaccgggatgggcatgctttcgccactgggcaatgacgtgcccagcagttggcaaggcattctggcgggccgcagtggcattggccttatcgagcacacggacttgtcagccttcaccacccgtttcggcggttcggtcaagggtttcaacgtcgaagaatacctggcgcccaaagaagcgcgtcggctcgatctcttcattcagtacggcctcgcagccagctttcaggcggtgcgtaacgccggccttgaagtcactgatgcaaaccgtgagcgcatcggcgtggcaatgggttcgggcatcggtggtctgaccaacatcgaaaacagcagtcgtctgctgcatgagcaaggtccagggcggatttctccgttttttgtgccaggctcgatcatcaacatgatttccggtttcctgtctatccatctgggtgcacaggggcctaactacgccatcgccacagcgtgcacgaccgcgactcactgcatcggcatggcggcgcgcaacatcgcctacgacgaagctgacgtgatgattgccggtggtgctgaaatggcagcctgtggcctcggtctgggcggcttcggcgctgcacgcgcgttgtcgacccgcaacgacgaccccacgcgtgccagccgtccgtgggacaaaggccgtgacggtttcgtgctgtccgacggtgccggtgcgatggtgcttgaagaactcgagcacgccaaagcgcgcggcgcgaccatctatgccgaactggtcgggtttggcatgagtggcgacgcctatcacatgacctccccgcctgatgacggtgccggcgccgcacgttgcatcgtcaacgccctgcgtgatgccaaggtcaatgcggatcaggtgcagtacatcaacgcacacggtacctcgacacctgcgggcgatctggccgaggcatctgcgatcaagtcggtgttcggcgatcacgcctacaagctggcggtcagctcgaccaagtcgatgaccggccacttgctgggggctgccggtgcggtcgaggcaattttcagcgtgctggcaatggttgatcaggtggctccgccgaccatcaatctggatgaaccgagcgaaggctgcgacctgaactttgtgcctcacgaagcgcgccggatgccgattgatgtagtcctgtcgaactccttcgggttcggtggcaccaacggctcgctggtgtttcgtcggttcgccgagtaa

SEQ ID NO: 19765 - protein, 414 aa, Pseudomonas syringae pv. tomato str. DC3000
MSRRRVVVTGMGMLSPLGNDVPSSWQGILAGRSGIGLIEHTDLSAFTTRFGGSVKGFNVEEYLAPKEARRLDLFIQYGLAASFQAVRNAGLEVTDANRERIGVAMGSGIGGLTNIENSSRLLHEQGPGRISPFFVPGSIINMISGFLSIHLGAQGPNYAIATACTTATHCIGMAARNIAYDEADVMIAGGAEMAACGLGLGGFGAARALSTRNDDPTRASRPWDKGRDGFVLSDGAGAMVLEELEHAKARGATIYAELVGFGMSGDAYHMTSPPDDGAGAARCIVNALRDAKVNADQVQYINAHGTSTPAGDLAEASAIKSVFGDHAYKLAVSSTKSMTGHLLGAAGAVEAIFSVLAMVDQVAPPTINLDEPSEGCDLNFVPHEARRMPIDVVLSNSFGFGGTNGSLVFRRFAE

SEQ ID NO: 19766 - DNA, 1251 bp, Vibrio parahaemolyticus RIMD 2210633
  CDS (1)..(1251): transl_table=11
gtgtccaagcgtcgtgtagttgtcactggcatgggtatgttgtcaccggtaggcaacacagtagaatcatcttggaaagccctgcttgaaggtaaaagcggtatcgtaaatatcgaacacttcgatactacgaacttctcaactcgttttgcaggtcttgttaaagatttcgattgcacagagtacatgtctaaaaaagatgctcgtaaaatggatctattcatccagtacggcattgcagcgggtatccaagcgctagatgactctggcttacaaattaccgaagaaaacgctcctcgagttggtgttgcaatcggctcaggtattggcggcctagacctcattgaaactggtcactcagcactggttgagaaaggtcctcgcaaagttagcccattttttgttccttcgaccatcgtaaacatggttgcgggtaacctgtctatcatgcgtggtcttcgtggtccaaacatcgcgatctctactgcatgtactacaggtctacataacattggccacgctgctcgtatgattgcatacggtgatgcagacgcgatggttgctggtggtgcagagaaagcttctacgcctcttggtatggctggcttcggtgctgctaaagcactttctactcgcaatgacgaacctcaaaaggcatctcgcccatgggataaaggccgtgacggcttcgttctaggtgatggtgctggcgtgatggttcttgaagaatacgaacatgcgaaagcacgtggcgctaagatttacgcagagctagttggctttggtatgtctggcgatgcttaccacatgacttcaccaagtgaagatggttcaggtggtgcgttagcaatggaagcagcaatgcgtgatgcgaacatcacgggtactcaagtaggttacgtgaatgctcacggtacatctactcctgctggcgacgttgctgaaatcaagggtgtgaaacgtgctcttggtgaagaaggtgcaaaacaagttcttgtttcttcaactaagtcaatgactggtcacctattgggtgctgctggttcagttgaagctatcatcacgattatgtctttggttgaccaaattgttccaccaacgattaaccttgatgatccagaagaaggtctagatattgaccttgtgccacacactgcgcgcaaagttgaaggtatggaatacgcaatctgtaactcgtttggctttggtggtacaaacggttctttgatcttcaaaaagttcgctgagtaa

SEQ ID NO: 19767 - protein, 416 aa, Vibrio parahaemolyticus RIMD 2210633
MSKRRVVVTGMGMLSPVGNTVESSWKALLEGKSGIVNIEHFDTTNFSTRFAGLVKDFDCTEYMSKKDARKMDLFIQYGIAAGIQALDDSGLQITEENAPRVGVAIGSGIGGLDLIETGHSALVEKGPRKVSPFFVPSTIVNMVAGNLSIMRGLRGPNIAISTACTTGLHNIGHAARMIAYGDADAMVAGGAEKASTPLGMAGFGAAKALSTRNDEPQKASRPWDKGRDGFVLGDGAGVMVLEEYEHAKARGAKIYAELVGFGMSGDAYHMTSPSEDGSGGALAMEAAMRDANITGTQVGYVNAHGTSTPAGDVAEIKGVKRALGEEGAKQVLVSSTKSMTGHLLGAAGSVEAIITIMSLVDQIVPPTINLDDPEEGLDIDLVPHTARKVEGMEYAICNSFGFGGTNGSLIFKKFAE

SEQ ID NO: 19768 - DNA, 1212 bp, Vibrio parahaemolyticus RIMD 2210633
  CDS (1)..(1212): transl_table=11
atgaaacgagtcgtaatcaccggtatgggtattgtttcaagtatcggtaacaacgtcgaagaagttctagcgtctcttaaagcgggcaaatctggcatcactgcgtctgagcagttcaaagaacacggtcttcgttcgcaagtttggggtgatctaaaaatcaaccctgcggagcatattgaccgtaaacagatgcgctttatgggtgatgcggctgcttatgcatacctatcaatgcagcaggcgattgaagacgctggtctaactgaagaacaagtttcaaacgatcgtacaggtatcgttgctggttctggtggtgcttctgcattaaaccaaacagtagcaaccgatattatgcgcgagaaaggcgtaaaacgcgtaggcccttacatggttcctcgtactatgtcttctaccgtatcagcatgtcttgcgacaccatttaaaattcgtggtgtgaactactcaatgagttcagcttgtgcgacttctgcacactgtatcggccacgcaatggagcttatccaacttggcaaacaagacatcgtgttcgctggtggtggtgaagagctagattggtctcaaacgatgatgtttgatgcgatgggcgcactatcaactaaatacaacgatacgccagaaaaagcgtctcgtacttacgatgcagaccgtgacggttttgttatctctggcggcggcggcatgctggttatcgaagaacttgagcacgctctagcacgtggcgcgaaaatctacggcgaaatcgtaggctacggtgcgacttctgatggctacgacatggtagcaccttcaggtgaaggtgcagtgcgttgtatgaagatggctatgcaagacgttgacagcattgattacgttaacactcacggtacgtctactcctgttggcgacgtgaaagagctaggcgcaatccaagagctatttggcgacaacagcccagcaatctctgcaacaaaagcgatgacaggtcacgctctaggtgcggctggtgttcacgaagcgatttactcgactctaatgctagacaacaacttcatcgcgccaagcatcaatattgaaaacttggatgaagcggcaaaaggtctggatatcgtgacagaagctcgcgacgcagagctaacgacagtcatgtcaaacagctttggcttcggtggtaccaacgcaacattggttatcaaaaaataccaagcgtaa

SEQ ID NO: 19769 - protein, 403 aa, Vibrio parahaemolyticus RIMD 2210633
MKRVVITGMGIVSSIGNNVEEVLASLKAGKSGITASEQFKEHGLRSQVWGDLKINPAEHIDRKQMRFMGDAAAYAYLSMQQAIEDAGLTEEQVSNDRTGIVAGSGGASALNQTVATDIMREKGVKRVGPYMVPRTMSSTVSACLATPFKIRGVNYSMSSACATSAHCIGHAMELIQLGKQDIVFAGGGEELDWSQTMMFDAMGALSTKYNDTPEKASRTYDADRDGFVISGGGGMLVIEELEHALARGAKIYGEIVGYGATSDGYDMVAPSGEGAVRCMKMAMQDVDSIDYVNTHGTSTPVGDVKELGAIQELFGDNSPAISATKAMTGHALGAAGVHEAIYSTLMLDNNFIAPSINIENLDEAAKGLDIVTEARDAELTTVMSNSFGFGGTNATLVIKKYQA

SEQ ID NO: 19770 - DNA, 1233 bp, Streptococcus pyogenes SSI-1
  CDS (1)..(1233): transl_table=11
atgacatttaaaagagtagtggtaacaggttatggtctaacatctccaatcgggcatgatcctgaaacgttttgggacaatctgaaagctggccaaattggtattggtcctattactaaatttgacacgactgattatgcagtcaagaatgctgctgaaattcaggattttccatttgacaaatactttgtgaaaaaagatttgaaccgtttcgatagatattctctttatgctctttacgcagcgaaagaggctattaatcatgctgatttaaatattgagatgattgattccgatcgatttggcgttattgtcgcttcaggtattggtggaattgcggagattgaagagcaggtgattcgcttacatgaaaaagggccaaaacgtgtgaagccaatgacgttgccaaaagcgctaccaaatatggctgcaggaaatgtcgccatgtctttaaaagctcaaggagtatgtaaatcagttaatactgcctgcgcttcttcaaatgatgcgattggggatgcctttcgtgccattaaatttgggactcaagatgtgatgatagttggtgggtcagaggcggccataaccaagtttgccattgctggcttccaaagtttaacagctctctcaacaactgaagatccaagcagaagctctattccatttgataaagaccgaaatggttttatcatgggagaaggatcaggaatgcttgttttagaaagcctagaacatgcgcaagaacgcggggcgacaatcttagcagaaattgtgggttatggaaatacctgcgatgcctaccatatgacatctccaaatcctgagggattaggagctcgtaaagccatccacttagccttacaagaagctggtattgaagccagtgctattaattatgtcaatgcgcacggaacttcaaccccagctaatgaaaaaggagaaagtcaagcaattgtagccgttcttggtaaggatgttccggtgtcttcaacaaaatcgtttacgggtcaccttcttggagcagcaggcgctattgaagctattgccactatcgaggctatgcgtcataactatgttccgatgacggctgggacacaagctttatcagaggatatcgaagcaaatgtcatctttggagaaggaaaagaaacagctatcaactatgccatttcaaatacttttggatttggtggtcataatgctgtattagctttcaaatgttgggaggagtag

SEQ ID NO: 19771 - protein, 410 aa, Streptococcus pyogenes SSI-1
MTFKRVVVTGYGLTSPIGHDPETFWDNLKAGQIGIGPITKFDTTDYAVKNAAEIQDFPFDKYFVKKDLNRFDRYSLYALYAAKEAINHADLNIEMIDSDRFGVIVASGIGGIAEIEEQVIRLHEKGPKRVKPMTLPKALPNMAAGNVAMSLKAQGVCKSVNTACASSNDAIGDAFRAIKFGTQDVMIVGGSEAAITKFAIAGFQSLTALSTTEDPSRSSIPFDKDRNGFIMGEGSGMLVLESLEHAQERGATILAEIVGYGNTCDAYHMTSPNPEGLGARKAIHLALQEAGIEASAINYVNAHGTSTPANEKGESQAIVAVLGKDVPVSSTKSFTGHLLGAAGAIEAIATIEAMRHNYVPMTAGTQALSEDIEANVIFGEGKETAINYAISNTFGFGGHNAVLAFKCWEE

SEQ ID NO: 19772 - DNA, 1242 bp, Salmonella enterica subsp. enterica serovar Typhi Ty2
  CDS (1)..(1242): transl_table=11
gtgtctaagcgtcgtgtagttgtgaccggacttggcatgttgtctcctgtcggcaataccgtagagtctacctggaaagctctccttgccggtcagagtggcatcagcctgatcgaccatttcgatactagcgcctatgcaacgaaatttgctggcttagtaaaggattttaactgtgatgacattatctcgcgcaaagaacagcgcaagatggatgccttcattcaatatggaattgtcgctggcgtacaggccatgcaggattctggccttgaagtgacggaagagaacgcaagccgtattggcgccgctatcggctccggtatcggtggtctcggtctgatcgaagaaaaccacagttcgctggtaaaaggcggaccgcgtaagattagcccgttctttgtcccgtcgacgattgttaacatggtagcaggccatctgactatcatgtatggcctgcgtgggccaagcatctctattgcgactgcctgtacttcaggcgtgcataacatcggccatgccgcgcgtatcatcgcctatggtgatgcggacgcgatggtggcaggtggcgcagaaaaagccagtacgccgctgggcgtaggtggttttggcgcagcgcgcgcgctgtcgacccgcaacgataacccacaggcggcgagccgtccgtgggataaagaacgcgatggttttgtactgggcgacggtgccggtatgttggtgcttgaagagtacgaacatgcaaaagcgcgtagtgcgaaaatctatgctgaaatcgtcggctttggtatgagcagcgatgcttaccatatgacgtcgccgccggaaaatggcgcaggcgctgcgctggcgatggttaacgcgttgcgtgatgccgcgattgagcctgctcagattggctacgtcaacgcgcacggcacgtcgacgcctgccggcgacaaagctgagacgcaggcggttaagtcagtctttggcgatgctgcaagccgagtgatggtgagctcgaccaaatcgatgaccggccatctgttgggcgccgcaggcgcagtagagtctattttctctattctggcgctacgcgatcaggccattccgccaaccattaatctggataacccggatgaaggttgcgatctggacttcgtgccgcatgaagcgcgccaggtcagcgatctggagtacgcgctgtgtaactcctttggctttggcggaactaacggttccttgatctttaaaaagatctaa

SEQ ID NO: 19773 - protein, 413 aa, Salmonella enterica subsp. enterica serovar Typhi Ty2
MSKRRVVVTGLGMLSPVGNTVESTWKALLAGQSGISLIDHFDTSAYATKFAGLVKDFNCDDIISRKEQRKMDAFIQYGIVAGVQAMQDSGLEVTEENASRIGAAIGSGIGGLGLIEENHSSLVKGGPRKISPFFVPSTIVNMVAGHLTIMYGLRGPSISIATACTSGVHNIGHAARIIAYGDADAMVAGGAEKASTPLGVGGFGAARALSTRNDNPQAASRPWDKERDGFVLGDGAGMLVLEEYEHAKARSAKIYAEIVGFGMSSDAYHMTSPPENGAGAALAMVNALRDAAIEPAQIGYVNAHGTSTPAGDKAETQAVKSVFGDAASRVMVSSTKSMTGHLLGAAGAVESIFSILALRDQAIPPTINLDNPDEGCDLDFVPHEARQVSDLEYALCNSFGFGGTNGSLIFKKI

SEQ ID NO: 19774 - DNA, 1263 bp, Bacteroides thetaiotaomicron VPI-5482
  CDS (1)..(1263): transl_table=11
atggaattaaaaagagtggtagtaacaggccttggcgccattactcctgttggcaatgatgtacccgaattctgggaaaatctagtgaacggggttagtggagcagggcctattactcattttgatgcgtcgcaattcaagacccagtttgcatgcgaagtgaaaaacttcgatgtaactaaatatatcgaccgtaaagaggcaagaaagatggacttatacactcagtatgctgtcgctgttgccaaagaagcggtatcggactccggtcttgacgtcgaaaaagaagatttgaacagaatcggtgttatttttggcgccggtatcggtggtatacatacattcgaggaagaagtaggcaactactacactcatcaggaaataggtcccaagttcaatccgttcttcatcccgaagatgatctcggatattgctgccggacagatttctatcatgtatggcttccatggtcctaactacgcgacttgttcagcatgtgctacttctaccaatgccattgcggatgccttcaacctgattcgtctgggtaaagcaaacgtaatcgtatccggtggttcggaagcagccatcttccctgcaggcgtaggcggtttcaacgctatgcatgctctgtcaacacgcaacgatgagccgagcaaggcttcacgtccattcagcgcaagccgtgacggcttcatcatgggcgaaggtggcggttgcctgatcttggaagaactggaacacgctaaggcccgtggtgcgaaaatctatgcagaagttgccggtgtaggtatgtctgcagatgctcatcacctgacagcttcccatccggaaggtcttggtgccaaactggtaatgctgaacgctctggaagatgcagaaatggatccgaaagaagtagattacatcaacgttcacggaacatctactccggtaggtgatatttctgaagcgaaagcaattaaggaagtattcggtgatcacgcatacgaactgaacatcagttctacaaaatcaatgactggtcacttgctgggagctgccggtgcggtagaatctatcgcaagcatccttgccatcaagaacggcattgttcctccgactatcaaccacgaagaaggtgacaacgacgagaacattgactacgaccttaatttcacgttcaacaaagctcagaaacgtgaggttaatgttgccctgtccaatacatttggattcggtggtcacaatgcgtgcgttatcttcaagaaatacgctgagtaa

SEQ ID NO: 19775 - protein, 420 aa, Bacteroides thetaiotaomicron VPI-5482
MELKRVVVTGLGAITPVGNDVPEFWENLVNGVSGAGPITHFDASQFKTQFACEVKNFDVTKYIDRKEARKMDLYTQYAVAVAKEAVSDSGLDVEKEDLNRIGVIFGAGIGGIHTFEEEVGNYYTHQEIGPKFNPFFIPKMISDIAAGQISIMYGFHGPNYATCSACATSTNAIADAFNLIRLGKANVIVSGGSEAAIFPAGVGGFNAMHALSTRNDEPSKASRPFSASRDGFIMGEGGGCLILEELEHAKARGAKIYAEVAGVGMSADAHHLTASHPEGLGAKLVMLNALEDAEMDPKEVDYINVHGTSTPVGDISEAKAIKEVFGDHAYELNISSTKSMTGHLLGAAGAVESIASILAIKNGIVPPTINHEEGDNDENIDYDLNFTFNKAQKREVNVALSNTFGFGGHNACVIFKKYAE

SEQ ID NO: 19776 - DNA, 1239 bp, Enterococcus faecalis V583
  CDS (1)..(1239): transl_table=11
atgaaaagagtggtcataaccggcatgggtgccgtaacaccattaggcaataccgtaaaagaattttggcataatctagtggatggcaagctaggaattggcaaaattactaaatttgattctgaagatactggggtggctttggctggtgaagtgaaagagtttgacccaagtgctgttttagaacgcaaagagcaaaaaagaatggacttattttctcaatatggcttggtcgctgctttagaagcgtgggaaatgagtggtttaacagaagcaacgattgacccgactcgtttaggtgtgattgtcggtagtgggattggcgggatgactaccttacaagaccaagtacgggtaatggataaaaaaggcgcaaaacgcgtaacaccatttttcgtgcccatggtaattgctaatatggcagcgggaaatatttcgattcgtctaggtgcaaaaggaccttctcaaactatcgtgactgcttgtgcttctgcgacgaatgcgattggtgaagcttttcgcacgattaaatatggtttagcggacatgatggtaactggggggacagaagccacagtatgtgaaattgggattgcaggctttgcagcattgaatgctttaaatacaacagaagatgcgactcgggcttcgattccttttgataaagaacgaaaaggttttgtgatgggtgaaggcgcaggaatgctggttttagaagaactcgagcatgcacagaaacgtggcgcaactatctacggcgaaattgttggatatggcagcaactgtgatgctagccacatgaccgctcctttaaaagacggtagtggcgcggcagctgcgatggaaatggcgattgcagaagcagggattacaccggaacaaattgggtatatcaatgctcatggtacgtcaaccccagcgaatgacgctgcggaaacaacggccatcaaacgtgtctttggtgagcgagcatcgcaaattccaatttcaagtacaaagagtatgactggacatttattgggcgcggctggcggtatcgaagcgatcgcttgtgtgcaaacattgcaagaaggaaaagctcatccgacagtaggctaccaagttgctgatccagattgtgatttagattatgtcacagaaggtgcacgtgacattacagcggactatacaattagtaattcgtttggctttggtggccataatggtgtaatttgcttgaagaaatgggaggaaaactag

SEQ ID NO: 19777 - protein, 412 aa, Enterococcus faecalis V583
MKRVVITGMGAVTPLGNTVKEFWHNLVDGKLGIGKITKFDSEDTGVALAGEVKEFDPSAVLERKEQKRMDLFSQYGLVAALEAWEMSGLTEATIDPTRLGVIVGSGIGGMTTLQDQVRVMDKKGAKRVTPFFVPMVIANMAAGNISIRLGAKGPSQTIVTACASATNAIGEAFRTIKYGLADMMVTGGTEATVCEIGIAGFAALNALNTTEDATRASIPFDKERKGFVMGEGAGMLVLEELEHAQKRGATIYGEIVGYGSNCDASHMTAPLKDGSGAAAAMEMAIAEAGITPEQIGYINAHGTSTPANDAAETTAIKRVFGERASQIPISSTKSMTGHLLGAAGGIEAIACVQTLQEGKAHPTVGYQVADPDCDLDYVTEGARDITADYTISNSFGFGGHNGVICLKKWEEN

SEQ ID NO: 19778 - DNA, 1236 bp, Enterococcus faecalis V583
  CDS (1)..(1236): transl_table=11
atgaatcgagtagttattaccggttacggtgtcacctcgccgattggcaatgaacctgagacttttttagaaagtttgaaaacagggaaaaatggtatcggaccgattagtaaatttgatgttagtgaaacaggtgtcaccttagcagctgaagtgaaagactttccaatggaaaaatattttgttaaaaaagatggcaaacgcatggataagttttcgttatttggcatttatgcggccttagaagcaatggctatgagtggcttggataccagtcaactagatgtggatcggtttggcgttatggtgggttccggaattggtggtttggaaacaattcaaaatcaagtaattcggatgcacgacaaaggacctgaacgtgtggcaccgttatttattccaatggcgattggaaacatggtggcgggaaatattgctttacgtgttggtgccaaaggaatttgtacttcaacagtgacagcttgtgctagtgcaactcattcaattggggaagcgttccgcaatatcaaacatggctactccgatgtcattattgctggtggagcagaagcgcctattacagaaatcggtatttcaggatttgcttccttgaccgctttaacaaaggcgactgatccagaaaaagcctcaattccctttgataaagaacgtagtggatttgtgatgggagaaggagcgggtgtctttattttagaatcattagatcatgctctagaacgaggcgcaactattttaggtgaagtggttggctatggtgctaattgcgatgcctatcatatgacatcaccaacaccagatgggagcggcgcagcgaaagccatggtactagcaatggaagaagcggggatttctccagaaaaaattggctatattaacgcccatggaacaagcacacaagccaatgacagtgcagaatctaaagcaattgaattggctttaggtgatgccgcaaaaacggcgtatgtaagtagtacaaagagtatgacgggacatctcttaggcgccgctggtggaattgaaggaattgctaccctaaatgctttacaacatcaatttattccgccaaccattaatgtggaaaatcaagatgaagcaattacggtgaacgttgttttaaacgaaagcaaagagcataaatttgattatgctttaagtaactcgctaggctttggtggccacaatgcagttatttgcttaaaacgctgggaggattaa

SEQ ID NO: 19779 - protein, 411 aa, Enterococcus faecalis V583
MNRVVITGYGVTSPIGNEPETFLESLKTGKNGIGPISKFDVSETGVTLAAEVKDFPMEKYFVKKDGKRMDKFSLFGIYAALEAMAMSGLDTSQLDVDRFGVMVGSGIGGLETIQNQVIRMHDKGPERVAPLFIPMAIGNMVAGNIALRVGAKGICTSTVTACASATHSIGEAFRNIKHGYSDVIIAGGAEAPITEIGISGFASLTALTKATDPEKASIPFDKERSGFVMGEGAGVFILESLDHALERGATILGEVVGYGANCDAYHMTSPTPDGSGAAKAMVLAMEEAGISPEKIGYINAHGTSTQANDSAESKAIELALGDAAKTAYVSSTKSMTGHLLGAAGGIEGIATLNALQHQFIPPTINVENQDEAITVNVVLNESKEHKFDYALSNSLGFGGHNAVICLKRWED

SEQ ID NO: 19780 - DNA, 1245 bp, Coxiella burnetii RSA 493
  CDS (1)..(1245): transl_table=11
ttggagaaacggcgcgttgtaataaccgggttgggggttgtgagccccctcggaaataaagtttcggatatgtggcaggcgctcttggcgggtaaaagtggagtgaagccgattactcgattcgatgcgtcctcttttcctacccaaattgcggccgaagtcagggattttgacccggccttagtattagatcttaaaagcattcgtaaaacggacgtttttgtgcaattcgccatggaatctgcccgtcaggcgtgggaggattcaggactagaaatcaacgaaactaacgcgcctcgcgtgggggtggctattgggtccggcatcggagggatgccttggattgaaaaaaattatgacgcgttattaacttccggtccgcgaaaaatttctcccttttttattccgggggctattattaatatggcttctggtatggtgtctattaaatacgatttaaagggtcctaatatctcaatcgtgaccgcctgtacgacgggtcttcataacatcggccacgcagcgagaatgattgcccacaatgatgcagatgcgatgattgcagggggaacggagatggcatccactcccctcggtattggcggctttgctgctgtgcgcgctttatcgacacgaaatgatgagcccgaaaaagcgagccgtccgtgggataaaggtcgcgatggttttgtgttgggggaaggcgccgcgtgtgtagtagtagaagagttagaacacgccaaaaagcgcaacgcgaccatctacgccgaaattatcggatttgggatgagtggtgatgcttatcacatgacacgcccagaccccgaagctgaaggatttaccacttgcatgaaaaattccctccgggatgccggcatcgctcctgagcgggtcgactacataaacgcccacggtacctcgacgcctgccgccgatccgcttgaggcgcgggccattaaaaaaacatttggggatcatgcttataaactagccgtaagctccacaaaatcaatgacaggacacatgctaggggcagcaggtgccttagaaaccgtaatttcagtgttagcgattcgcgataatacggcaccaccgacgattaatcttgaaaatcccgatgaaggctgtgatttagattttgtacccaatgaggcgcgggagatgaagatcgataccgtaatgtcaaattcatttggctttggtggcactaacggaaccttggttttaagccgagtttttgactaa

SEQ ID NO: 19781 - protein, 414 aa, Coxiella burnetii RSA 493
MEKRRVVITGLGVVSPLGNKVSDMWQALLAGKSGVKPITRFDASSFPTQIAAEVRDFDPALVLDLKSIRKTDVFVQFAMESARQAWEDSGLEINETNAPRVGVAIGSGIGGMPWIEKNYDALLTSGPRKISPFFIPGAIINMASGMVSIKYDLKGPNISIVTACTTGLHNIGHAARMIAHNDADAMIAGGTEMASTPLGIGGFAAVRALSTRNDEPEKASRPWDKGRDGFVLGEGAACVVVEELEHAKKRNATIYAEIIGFGMSGDAYHMTRPDPEAEGFTTCMKNSLRDAGIAPERVDYINAHGTSTPAADPLEARAIKKTFGDHAYKLAVSSTKSMTGHMLGAAGALETVISVLAIRDNTAPPTINLENPDEGCDLDFVPNEAREMKIDTVMSNSFGFGGTNGTLVLSRVFD

SEQ ID NO: 19782 - DNA, 1221 bp, Streptomyces avermitilis MA-4680
  CDS (1)..(1221): transl_table=11
atggccggcatggacatcgccgtcaccgggctcggcctggtcaccccgggcggtatcggggtcgggcccagctgggcggcggtctgcgacggcaggccggccgccgccctcgatccggtgctggcggacaatcccgtacgtatctcctgccgggtgcccgacttcgacccggagcaactgctcagcgcacgacgggcgcaccgcctggacaggttcgtgcagttcgctctggtcgccgcccatgaggcggtggccgacgccggtctcgacccgaccacctgggacggggctcgggtcggtgtggtgctgggctgcgcggacggcggtcccggcacggtcgaggagcagcaccgggtgctgctggagcagggcgccgaccgggtgtccccgctgctgctgcccatgcagctgccgaacatgctggccggtcagacggccatcgagttcggggcgaccgggcccaacctggtggtggccacggcctgcgcttcgggcgcgaccgccatcggcacggcccgggacctgctcgcgctcggccgctgcgacgtggtcctggcgggcggcagcgaggcgatgatcactccgctggtcatggccggcttcgcccagatgggcgcgctgtcgcggcgcgaggacgacccggcgtcggcgtcgcgtcccttcgacgccgaccgggacggcttcgtcgccggtgagggcgccgggatcctcgtcatggaacgtgtcgaggacgcccgggcccgcggtgcgcacatccacggccggatcatcggctacggggccaccgcggacgcccaccacatgacgtcgccgcacccggacggcgccggcatcgaggcggcggtccgcgcggctctcgccgacgccggcgcggacccggacgacgtgcagcacgtgaacgcccacggcacgtcgacgccgctcaacgatctggccgaggcacgcatgatccagcggaccctgcagggcgacccgctggtcacctcgacgaagggagtcaccggacatctgctcggcgcggccggcgcggtcgaggccgcgttcgccctgctgagcatcgagcacgagatggttccgccgatcgcgggcctgtgcatccccgatccccggatcgacatcaagctcgcccagtcggccacgtcgatgccgatcgacctcgcgctcagcaattcgtgcgggttcggcggccagaacacggcgcttgcgatcgctccggcctga

SEQ ID NO: 19783 - protein, 406 aa, Streptomyces avermitilis MA-4680
MAGMDIAVTGLGLVTPGGIGVGPSWAAVCDGRPAAALDPVLADNPVRISCRVPDFDPEQLLSARRAHRLDRFVQFALVAAHEAVADAGLDPTTWDGARVGVVLGCADGGPGTVEEQHRVLLEQGADRVSPLLLPMQLPNMLAGQTAIEFGATGPNLVVATACASGATAIGTARDLLALGRCDVVLAGGSEAMITPLVMAGFAQMGALSRREDDPASASRPFDADRDGFVAGEGAGILVMERVEDARARGAHIHGRIIGYGATADAHHMTSPHPDGAGIEAAVRAALADAGADPDDVQHVNAHGTSTPLNDLAEARMIQRTLQGDPLVTSTKGVTGHLLGAAGAVEAAFALLSIEHEMVPPIAGLCIPDPRIDIKLAQSATSMPIDLALSNSCGFGGQNTALAIAPA

SEQ ID NO: 19784 - DNA, 1251 bp, Streptomyces avermitilis MA-4680
  CDS (1)..(1251): transl_table=11
atggcgccgcgtcgggtcgtcgtcaccgggctcggtgccgtcaccccgctcggggtcggtgtgggtgagctctggcgggggctcctcgaaggggagtgcggcatacgggagttggacggggaggagttcgaggggctgcccgtgcgggtggccgggaccgtgcccgtggaccccgccacgctgctgccccggccgcaggcgcggcggatgaaccgggccgcccagttcgccgtgctcgccgcgcgggaggcctggcgggacgccgggttcgacggggccgggacggcggagagcgggctcgaccccgcgcgggtcggcgtgtccgtcggggccatcctcggggacgcgtccgtcctcgtcggaggcgaccgcaagctgcgcgccaaggggccgcgctcggtgtcgcccctcaccacccccatgacggtgccctcgcaggccgcctcgcaggtctctctcgcgttgcgcatcaccggcgaggcccgcaccgtgaccagcgcgtgcgcctccggcaccgaggcgatcgggctggccatcgaccggatccggtacggacatgtggacatcgcgctggccgggggcgccgaggccgtcgtcacgcccgcgatcatggcgtcgttcgccgcgatgcgggcgctgtcgcaccacggtctgacggagggctcgccctcccggcccttcgccaaggaccgcgacgggttcgtcaacggggagggtgccgggtttttgctgctggagacggaggagcacgcgcgggcgcgcggggcgcggatctactgcgaggccgccggctgggggctgtccgccgacgcccaccacatggccgcgcccgacccgtccggcagcggcgtcgcgctcgcgctgcggcgcgcgctgaaggacgccgggggtcatgtcgtggacgtcgtgcacgtcaacgcgcatgccacggccaccgtcgagggcgatctcgccgaggcgaacgcgttgcgggcggtgctcggcgggccggtgccggtcacggccctgaaggggcacctcggtcatctccagggcgccgcgggcggggtggaggccgtcgcgacggccctcacgctgcaccacggtctcatcccgcccacgatcggctgcgcgatccaggacgacgagatcggcctggacgtcgtgacccacagcgcgcgcccgctgccggccggcggagacctggccctcagcaactcgttcggcttcggcggccacaacgcggtgctggcgctgcggcgagtggggtag

SEQ ID NO: 19785 - protein, 416 aa, Streptomyces avermitilis MA-4680
MAPRRVVVTGLGAVTPLGVGVGELWRGLLEGECGIRELDGEEFEGLPVRVAGTVPVDPATLLPRPQARRMNRAAQFAVLAAREAWRDAGFDGAGTAESGLDPARVGVSVGAILGDASVLVGGDRKLRAKGPRSVSPLTTPMTVPSQAASQVSLALRITGEARTVTSACASGTEAIGLAIDRIRYGHVDIALAGGAEAVVTPAIMASFAAMRALSHHGLTEGSPSRPFAKDRDGFVNGEGAGFLLLETEEHARARGARIYCEAAGWGLSADAHHMAAPDPSGSGVALALRRALKDAGGHVVDVVHVNAHATATVEGDLAEANALRAVLGGPVPVTALKGHLGHLQGAAGGVEAVATALTLHHGLIPPTIGCAIQDDEIGLDVVTHSARPLPAGGDLALSNSFGFGGHNAVLALRRVG

SEQ ID NO: 19786 - DNA, 1272 bp, Streptomyces avermitilis MA-4680
  CDS (1)..(1272): transl_table=11
gtgagcccgaccaatcgcaccgtggtcgtcaccggtatcggcgcaaccacaccgctgggtggcgacgtagcctctacctgggagggcctggtcgccggacgttccggtgtccgtcccctggagcaggagtgggccgccgagcaggcggtccgcatcgcagcacagatcgccgtggagcccggcgaggtcattccccgtccgcaggcccgccgcctcgaccgctcggcgcagttcgcgctgatcgcggccaaggaggcctgggcggatgccggtttcaccgacaaggcgggcgccgacccggccgtcgacccggaccgcctcggcaccgtgatcgcctccggcatcggtggtgtgacgactctgctcgaccagtacgacgtgctgaaggagaagggcgtacgccgtgtctccccgcacaccgtgccgatgctgatgccgaacggcccgtccgccaacgtgggcctcgccgtgggcgcccgcgccggtgtgcacaccccggtctccgcctgcgcgtcgggcgccgaggccatcggctacgcgatcgagatgatccgcaccgggcgcgccgacgtcgtcgtcgccggtggtacggaggcggcgatccacccgctgcccatcgccgcgttcggcaacatgatggcgatgtccaagaacaacgacgacccgcagggcgcctcgcgtccctacgacgtcgcccgggacggcttcgtcctcggcgagggcgccggcgtcatcgtgctggagtcggccgagcacgccgcgaagcgcggtgcccgcgtgtacgcggaggcggtcggccagggcatctccgccgacagccacgacatcgtgcagccggagcccgagggccggggcatctcgcacgccctgcagaacctgctcgacagcaccgacctgaaccccgccgagatcgtgcacgtcaacgcgcacgccacctcgacgccggccggtgacgtcgccgaactgaaggcgctgcgcaaggtgttcggcgacgacgccgaccacttcgcggtctccgccaccaagtcgatgaccggtcacctcctcggcggcgccggcggtgtcgagtcggtcgcctcggtgctcgccctgtaccaccgggtggcgccgccgaccatcaacgtcgacaacctcgaccccgaggccgaggccaacgccgacatcgtccgcggcgaggcgcgcaagctccccgtcgagggccgcatcgccgcgctgaacgactcgttcggcttcggcgggcacaacgtggtgctggcgttccggacggtctga

SEQ ID NO: 19787 - protein, 423 aa, Streptomyces avermitilis MA-4680
MSPTNRTVVVTGIGATTPLGGDVASTWEGLVAGRSGVRPLEQEWAAEQAVRIAAQIAVEPGEVIPRPQARRLDRSAQFALIAAKEAWADAGFTDKAGADPAVDPDRLGTVIASGIGGVTTLLDQYDVLKEKGVRRVSPHTVPMLMPNGPSANVGLAVGARAGVHTPVSACASGAEAIGYAIEMIRTGRADVVVAGGTEAAIHPLPIAAFGNMMAMSKNNDDPQGASRPYDVARDGFVLGEGAGVIVLESAEHAAKRGARVYAEAVGQGISADSHDIVQPEPEGRGISHALQNLLDSTDLNPAEIVHVNAHATSTPAGDVAELKALRKVFGDDADHFAVSATKSMTGHLLGGAGGVESVASVLALYHRVAPPTINVDNLDPEAEANADIVRGEARKLPVEGRIAALNDSFGFGGHNVVLAFRTV

SEQ ID NO: 19788 - DNA, 1251 bp, Chlamydophila caviae GPIC
  CDS (1)..(1251): transl_table=11
atgaataaaaaacgtgtagtagtcacgggattgggcgttgtttcttgtttgggcaatgaaatagacaccttttatgataacctgcttgctggtatcagtggcgttcgtacaatcacttcttttccatgcgaagattatgctacccgttttgctgcttggattcctgaatttaatcccgagccttatttagataaaaaacaagcacgtagagttgatccttttattacttacgcagtagttgcagctaaaaaagctattgcgatgtctcgatgggataaagacaatcttcctgctgatcctctccgttgcggtgttatcatcggctctggtatgggaggtctacagactttagatgaaggtatggaacgtcttattttaggcaataagaagctttctcctttctttatcccttatattattactaatatggctcctgcgcttattgctatggactttggacttatgggtccaaattattcgatctccacagcttgcgcaacttcgaattattgtattgatgcagcttaccagcatcttgtttccggacgttctgacatgatagtttgtggtggaactgaggctgcagtgaaccgtgtcggattgaccggttttattgctaaccgtgctttatcggagaggaatgacgctcctcaagaagcgtctcgtccttgggatagagatagagatggttttgttattggagagggagctggagttttagttttagaaactttagagaacgctttgaagcgaggagctccgatatatgcggagatacttggttcatataccacctgtgatgctttccatattacagctcctagagatgatggagagggcattacttcatgtattcttggagctctagagagttctggcattcctaaagaacgcgtaaattatattaatgctcatgggacatcaactcctctaggagacatatcggaagttttggcattgaaaaaagcttttggtagtcatgtgaaaaatttacgaatgaattccacaaagtctcttataggtcattgcctgggagcggctgggggagtcgaagctgttgcaacaattcaagcaattcaaacgggcaaattacatcctacgattaatttagagaacccgattgcagaaattgatgattttgacgtggttgcaaataaggcccaagattgggatattgacgttgctatgtcgaattcttttggttttggtggacataattcaacgatattattctcgaggtatataccctaa

SEQ ID NO: 19789 - protein, 416 aa, Chlamydophila caviae GPIC
MNKKRVVVTGLGVVSCLGNEIDTFYDNLLAGISGVRTITSFPCEDYATRFAAWIPEFNPEPYLDKKQARRVDPFITYAVVAAKKAIAMSRWDKDNLPADPLRCGVIIGSGMGGLQTLDEGMERLILGNKKLSPFFIPYIITNMAPALIAMDFGLMGPNYSISTACATSNYCIDAAYQHLVSGRSDMIVCGGTEAAVNRVGLTGFIANRALSERNDAPQEASRPWDRDRDGFVIGEGAGVLVLETLENALKRGAPIYAEILGSYTTCDAFHITAPRDDGEGITSCILGALESSGIPKERVNYINAHGTSTPLGDISEVLALKKAFGSHVKNLRMNSTKSLIGHCLGAAGGVEAVATIQAIQTGKLHPTINLENPIAEIDDFDVVANKAQDWDIDVAMSNSFGFGGHNSTILFSRYIP

SEQ ID NO: 19790 - DNA, 1239 bp, Bacillus cereus ATCC 14579
  CDS (1)..(1239): transl_table=11
atggaaaaaaagagggtcgtaattacaggactaggagctgttacaccggtcggaacagatgttgaaacagcgtgggaaaacattaaaaagggtgtatctggaatcgggcgacttacaagaattgatccagaactatttccagcaaaagtagcagcggaaattaacgactttgaagtcgagaaatatattgataaaaaagaagcgcgccgtatggatcgctttacacaatatgcagtggcagcagcgaaaatggcagttgcagatgcaaaacttgaaattacagaagaaaacggacctcgaattggtgtatggattggatctggtattggcggtatggaaacatacgaagaacaatttaagatttttactgagaaaggcccacgccgcgtgagcccattcttcgtgccgatgatgattccagatatggcagcaggtcaagtatcaatcgcaacaggagcaaaaggaattaacacttgttctgtaacggcttgtgcatctggtgcaaactcaattggtgatgcatttaaagcaattcagcgtggtgatgctgatgcaatgattacaggcggagcagaagcgccgctaacaagtatggcattcgcaggatttagctcagcgaaagcattaacatttaatgaagacccagcaacggcttgccgtccatttgataaaaaccgtagcggtttcgtaatgggtgaaggctcaggtattctaattcttgaagaattagagcacgcattagcacgcggtgctcacatttacgcggaaattgcgggttatggtgcaactggagatgcattccatattacaatgcctgctcctggtggggaaggcggagtgcgtgcaatgcgtcaagctttagctgatgcaggcctacagccagaagatattgattacattaatgcgcacggtacaagtactgatgcgaatgaaaaatatgaaacgatggcaattaaagaaactttcggtgagcacgcgtataaagtagcaattagctcaacgaaatcaatgacaggtcacttattaggagcagctggtgctgttgaagcgattttctctattaaatcaattacagacggagtaattcctccaacaattaactatgagacaccagatccagaatgtgacttagattacgtcccaaatcaagcgagacaccaagaagtaaatgcagtattaagtaactcattaggatttggtggtcataacgcagtgttagtatttaaatcgtataaataa

SEQ ID NO: 19791 - protein, 412 aa, Bacillus cereus ATCC 14579
MEKKRVVITGLGAVTPVGTDVETAWENIKKGVSGIGRLTRIDPELFPAKVAAEINDFEVEKYIDKKEARRMDRFTQYAVAAAKMAVADAKLEITEENGPRIGVWIGSGIGGMETYEEQFKIFTEKGPRRVSPFFVPMMIPDMAAGQVSIATGAKGINTCSVTACASGANSIGDAFKAIQRGDADAMITGGAEAPLTSMAFAGFSSAKALTFNEDPATACRPFDKNRSGFVMGEGSGILILEELEHALARGAHIYAEIAGYGATGDAFHITMPAPGGEGGVRAMRQALADAGLQPEDIDYINAHGTSTDANEKYETMAIKETFGEHAYKVAISSTKSMTGHLLGAAGAVEAIFSIKSITDGVIPPTINYETPDPECDLDYVPNQARHQEVNAVLSNSLGFGGHNAVLVFKSYK

SEQ ID NO: 19792 - DNA, 1242 bp, Nitrosomonas europaea ATCC 19718
  CDS (1)..(1242): transl_table=11
ttgtccaaacgtaaagtagccattaccgggttaggcataatttcacccgtcggcaatacggtttctgaagcatgggaaaacgtcattgccggaaaatccggtattacacgaatcacgcgcttcgatgcatcagacttttcctcgaaaattgcaggagaagtcaacggattcgacataacagagtacctctccgccaaagaagcgcgccgtatggatatatttatccagtacggaatggcggctgccatccaagctatcagagatgccggcatcagtgatgtaagcgggttcaacgcagatcgtattggtgtgaacatcggctccgggatcggcggcctgcccatgattgaaaataccgatgctgcctatcatgctggcggcccccggaaaatctcccccttcttcatccctagtaccatcatcaacatggtagccggtaatctgtctatcatgttcgggtacaaagggcccaatcttgccatcgttactgcctgtacaactgccacgcactgtataggcagttctgccagaatgatcgaatatggcgatgctgatatcatggtctgcgggggtacggaatcatgtgttacaccacttgctgtcggtggatttgcttcagcacgtgccttgtcatcgaacaatgatgacccggcggcagcaagtcgaccatgggatctcaaaagagatggattcgttctgggagaaggagcaggtattctcgttctggaagagatggagcatgccagaaaacgtggtgcaaagatttatgcggaactggccggattcggtatgagtgcagatgctcatcacatgactgcaccctgtgaagatggagaaggcgcagcccgttgcatgacaaatgcattgtctgatgcgcaaatgcacgctgatgagcttcattacatcaatgcacacggaacatcgactccattgggagatattgcagaaacgattgcagtcaagcgctgctttggtgaacatgcaaaagatctggcagtcagctccaccaaatcgatgaccgggcatttattgggtgctgcaggaggtgtagaggcaattttttctgctttggctgtttatcaccagattgcccctcccactatcaatctcgatgacccggatcctgcatgcgatctggattatgtgcccaacaatgccagagaaatgaaaattgatgcagctctgtcgaactcgttcgggtttggcggaactaatggcacactagtcttcagaaaaatctga

SEQ ID NO: 19793 - protein, 413 aa, Nitrosomonas europaea ATCC 19718
MSKRKVAITGLGIISPVGNTVSEAWENVIAGKSGITRITRFDASDFSSKIAGEVNGFDITEYLSAKEARRMDIFIQYGMAAAIQAIRDAGISDVSGFNADRIGVNIGSGIGGLPMIENTDAAYHAGGPRKISPFFIPSTIINMVAGNLSIMFGYKGPNLAIVTACTTATHCIGSSARMIEYGDADIMVCGGTESCVTPLAVGGFASARALSSNNDDPAAASRPWDLKRDGFVLGEGAGILVLEEMEHARKRGAKIYAELAGFGMSADAHHMTAPCEDGEGAARCMTNALSDAQMHADELHYINAHGTSTPLGDIAETIAVKRCFGEHAKDLAVSSTKSMTGHLLGAAGGVEAIFSALAVYHQIAPPTINLDDPDPACDLDYVPNNAREMKIDAALSNSFGFGGTNGTLVFRKI

SEQ ID NO: 19794 - DNA, 1626 bp, Arabidopsis thaliana
  CDS (1)..(1626)
atggtgggtgcgtcttcctcttacgcatctccgttatgtacctggtttgttgctgcttgcatgtccgtctctcacggtggaggagatagccgtcaggctgttgctcttcaatctggtgggcggagtcggcgaaggaggcagcttagcaaatgctctgtcgcttctggatccgctagcattcaggctctcgtcacttcttgtttggattttggtccttgtactcactacaacaacaacaatgcattgtcttctctctttggatcgaatagtgtttctttgaatcgaaaccagaggagattgaatcgtgctgctagctccggtggagccatggcagtgatggagatggaaaaggaagctgcggttaacaagaaaccacctacggagcagcgtcgagttgtagtgacaggcatgggagttgaaacatcattgggtcatgacccacataccttctatgagaatttgctacaaggcaacagtggtattagccagattgaaaattttgattgttctgaatttcctacgcgaattgcgggagagatcaaaagcttctcgactgaaggatgggttgctccaaaactttctaaaaggatggacaaattcatgctctatcttctcacagctggtaagaaagctttggctgatggtggggttactgatgaagtaatggcagagtttgacaaaaccaaatgtggagttttgattggctcggcaatgggaggaatgaaggtcttttacgatgctattgaagctctgagaatctcttacaagaagatgaatcctttttgtgtaccttttgcgacaacaaacatgggttctgctatgcttgccatggatctgggatggatggggccaaactattctatttcaactgcttgtgccacaagcaacttttgcattctgaattcagcaaaccacattattaaaggtgaagctgatgtaatgctctgtggtggctcagatgcagttattattccaatagggttgggaggttttgttgcatgccgggctctttcacaaaggaataatgatcccacaaaagcttcacgtccttgggataccaatcgagatggtttcgtgatgggagagggagctggagttctacttttggaagaactcgagcatgctaagaaaagaggtgcaactatctacgcagagttcctcggtgggagtttcacatgtgatgcctatcacatgaccgagcctcaccctgatggggctggtgttattctctgtattgagagagcgttagctagtgctgggatttccaaggaacaaataaattacataaatgcacatgcaacctcaacgcatgctggagatattaaggaataccaagcccttgctcactgttttggccaaaatcctgagcttaaggtaaattccacaaaatctatgattggacacttgctgggagctgctggggccgtggaggctgttgcaactgtgcaggcgatacggaccggatgggttcatccaaatatcaacctcgagaatccagacagtggagtggatacaaagctgctggtgggtcctaagaaggagagactggacattaaagcagccttgtcaaattcattcgggtttggtggtcataactccagcatcatttttgctccttacaagtga

SEQ ID NO: 19795 - protein, 541 aa, Arabidopsis thaliana
MVGASSSYASPLCTWFVAACMSVSHGGGDSRQAVALQSGGRSRRRRQLSKCSVASGSASIQALVTSCLDFGPCTHYNNNNALSSLFGSNSVSLNRNQRRLNRAASSGGAMAVMEMEKEAAVNKKPPTEQRRVVVTGMGVETSLGHDPHTFYENLLQGNSGISQIENFDCSEFPTRIAGEIKSFSTEGWVAPKLSKRMDKFMLYLLTAGKKALADGGVTDEVMAEFDKTKCGVLIGSAMGGMKVFYDAIEALRISYKKMNPFCVPFATTNMGSAMLAMDLGWMGPNYSISTACATSNFCILNSANHIIKGEADVMLCGGSDAVIIPIGLGGFVACRALSQRNNDPTKASRPWDTNRDGFVMGEGAGVLLLEELEHAKKRGATIYAEFLGGSFTCDAYHMTEPHPDGAGVILCIERALASAGISKEQINYINAHATSTHAGDIKEYQALAHCFGQNPELKVNSTKSMIGHLLGAAGAVEAVATVQAIRTGWVHPNINLENPDSGVDTKLLVGPKKERLDIKAALSNSFGFGGHNSSIIFAPYK

SEQ ID NO: 19796 - DNA, 1266 bp, Streptomyces rochei
  CDS (1)..(1266): transl_table=11
atgagacgggtcgtcatcaccgggatcggggtggtcgcgccgggcggcgtcggcaccgcggacttctgggcgctgctgaccgaggggcgtaccgccacccgccgtatcaccctcttcgacgcctcctcgttccgctcccggatcgccgccgaggccgacttcgaccccgccgggcacggtttcgctcccgacgaggcgcgccgcctggaccgcgtcgcgcagttcgccctggtcgcggcgcgggaggcggtcgccgacagcgggctcgtgctcgccgccgagggggagcgcaccggggtgagcctgggcaccgcggtcggatgcagcagcggcctcgacgagacctacgcacacgtcagcgagtcgggcaggccgctggctgctggatcccgcacggccgaggcccggctcggggactacctcgtgcccagctcggtcgccgccgaggtcgcccgcgacagcggcgcgctgggctcggtcgccgtcgtgtccacgggctgcacctcgggactcgacgcgctcggccacgcgaccgagctgatccgcgagggcagcgccgacatcatggtggcgggcggcgcggaagcccccatcacccccatcaccctcgcctcgttcgacgccatccgcgccacctcggcgcgcaacgacgagcccgagaccgcctcccgcccctacgaccgcacccgcgacgggttcgtgctcggcgagggcagcgcggtgctcgtcctggaggagcacgaccgggcggtacggcgcggcgcccgcatctacgcggaggtgagcgggttcgccacccgctccaacgcctatcacatgaccggactgcgcccggacggcggggagatggccgaggccatccgggtcgccctggacgaggcccgcctgaaccccgcggacgtccactacgtcaacgcccacggttcggggaccaagcagaacgaccggcacgagacggccgcgttcaaggcgagcctcgggcagcacgcccaccgggtgccggtcagctccgtcaagtcgatgatcgggcactcgctcggcgccatcggcgggctcgaaatcgccgccagcgcgctggccatcgcccatgacacggtgccgcccaccgccaacctgcacgaggccgacccggcctgcgacctcgactacacgccgctgaccgcacgcgagcagcgcaccgacacggtgctcagcgtcggcagcggcttcggcggcttccagagcgcgatggtgctcaccagccggcacacgggggcggccgcgtga

SEQ ID NO: 19797 - protein, 421 aa, Streptomyces rochei
MRRVVITGIGVVAPGGVGTADFWALLTEGRTATRRITLFDASSFRSRIAAEADFDPAGHGFAPDEARRLDRVAQFALVAAREAVADSGLVLAAEGERTGVSLGTAVGCSSGLDETYAHVSESGRPLAAGSRTAEARLGDYLVPSSVAAEVARDSGALGSVAVVSTGCTSGLDALGHATELIREGSADIMVAGGAEAPITPITLASFDAIRATSARNDEPETASRPYDRTRDGFVLGEGSAVLVLEEHDRAVRRGARIYAEVSGFATRSNAYHMTGLRPDGGEMAEAIRVALDEARLNPADVHYVNAHGSGTKQNDRHETAAFKASLGQHAHRVPVSSVKSMIGHSLGAIGGLEIAASALAIAHDTVPPTANLHEADPACDLDYTPLTAREQRTDTVLSVGSGFGGFQSAMVLTSRHTGAAA

SEQ ID NO: 19798 - DNA, 1236 bp, Helicobacter hepaticus ATCC 51449
  CDS (1)..(1236): transl_table=11
atgcgtcgagtagtggtaactggtttaggaatgattaactcattaggcttaaacaaaagtgactcttttaaagctatcattaatggacaatgtgggattaaaagaatttcttgctttgatgtagaaaattttcctgtcaaaattgctggtgaaattacagactttaatgttgaagaagttcttgacccacgcgaggtaaaaaaggctgaccgatttatccagcttggcttaaaagcagcaaaggaagcaatgagtgagtgcggattgcttgaaggtaatgtcgtaaatatgtcacttagtgagcggtttggtgttagctccggcgcaggtattggtgggcttggcaatattgagaagaactccgttgtttgtgagcaaaaaggaccacgcagaattaatccattttttattccttctgcgcttgtaaatatgctcggaggttttatctctattgaatacgcacttaagggtcctaatcttgcaagtgttacggcttgtgcggctggaactcacgctattagcgaagcagcaaagactattatgctcaatggcgcagatgctatgcttgtaattggttcagaatcttcaatttgccctgtgggaattggtggttttgcagcgatgaaagcactaagtgatagaaatgatgaacccttgaaagcttcgcgtccatttgataaagaacgtaatggatttgttatgggtgaaggtgctggagcactggtgcttgaggaatatgagagtgctaaaaaacgtggtgcaaaaatttatgcagaattgattggttttggtgagagcggtgatgctaatcatatcacaactcctgctccacaaggtgaaggagcattaagggctatcaaagctgcactcaaaatggcaaataaacctgtgggatatgtcaatgcacacggcacaagcacggcttataatgacctttatgagacaatggcacttaaagctgcttttggttctaaagaatctgtgccacctgtaagttctacaaaagggcaaattgggcattgtttaggtgcagctggtgctatagaagcagtcatttctattatggcaatgcaagagggtatcttgcctccaacaattaaccaagaaaacccagaccctgaatgtgatttggattatattcccaatactgcacgtgaggcaaaagttgatgttgtaatgagtaactcatttggctttggtggcacaaatggtgttgtaatatttagcaaaatctaa

SEQ ID NO: 19799 - protein, 411 aa, Helicobacter hepaticus ATCC 51449
MRRVVVTGLGMINSLGLNKSDSFKAIINGQCGIKRISCFDVENFPVKIAGEITDFNVEEVLDPREVKKADRFIQLGLKAAKEAMSECGLLEGNVVNMSLSERFGVSSGAGIGGLGNIEKNSVVCEQKGPRRINPFFIPSALVNMLGGFISIEYALKGPNLASVTACAAGTHAISEAAKTIMLNGADAMLVIGSESSICPVGIGGFAAMKALSDRNDEPLKASRPFDKERNGFVMGEGAGALVLEEYESAKKRGAKIYAELIGFGESGDANHITTPAPQGEGALRAIKAALKMANKPVGYVNAHGTSTAYNDLYETMALKAAFGSKESVPPVSSTKGQIGHCLGAAGAIEAVISIMAMQEGILPPTINQENPDPECDLDYIPNTAREAKVDVVMSNSFGFGGTNGVVIFSKI

SEQ ID NO: 19800 - DNA, 1290 bp, Rhodopirellula baltica SH 1
  CDS (1)..(1290): transl_table=11
atgacggacgcttcttcaacgccttcttacgatccttccatgtcacgacgtgtcgtgatcaccggcttgggtaccgtcacacctttgggctgcgacgtcgaaactctttggtcagccttgttggccggaaagtccgggatccatgagttgtccatcatggacacgtcgaaatacaaggttcactttggcggcgacattcctgacttcaatgttgcggatcatgtcgaacccaaagaagccaaacgtctggatcgtttcactcagttcgccgttcacgctggtgcacaagcggtccaggattccggcatcgactgggaaaaaaccgaccgaacacgctgtggtgtgatattgggttcgggcattggtggcctcaacgaaatcgaagaacaaatcgagcgaatgctcaacaagggccccgaccgagtcagcccgttcaccgtcccaaagatgatggtcaacgccgccgggggaaacatctccatccgctatggactcaaaggccccaactacgcggtcgcaaccgcatgtgccagtgcaaccaacgccatgggagacgctctacgcagtatccgtggtggcgaaaccgatgttgtgatcaccggcggaaccgaagccgcgatcactcgcatgggcttggctgctttccaaaacatgaaagccctttcgacccgcaatgacgaacctcaacgggccagccgtccgtttgattctgaccgcgatggttttgtcttggccgaaggcgcagggctgctcgtcttcgaagaactcgagcacgcgaaagctcgcggtgcaaagatctacgcggaagtcctcggctatggaacaaccagcgacgcgggccatatcaccgctcctgatccagaaggattgggtgccgccgctgccatgcgagccgcgattcaggacagtggccgcgcggcctctgaaattgattatattaacgctcacgggacgagcacacctttgggtgacaaagcagaaactcgcgcgatccacaccgttttaggtgaccatgcccaaaacgttgcgatcagcagtaccaaaagcgctctgggacactccttgggtgctagcggcgggattgaagcggtgattctttgccaaacgatccaaaacaatgtgattgccccgacaattaatctcgacacaccagatccaagttgcgatctcgactatgttcccaaccaaccccgggaacaaaaagttgacctggcaatgagcaatagcttcggatttggcggtcacaacgcatgcgttctctttggacggttctctcatgacggctcttga

SEQ ID NO: 19801 - protein, 429 aa, Rhodopirellula baltica SH 1
MTDASSTPSYDPSMSRRVVITGLGTVTPLGCDVETLWSALLAGKSGIHELSIMDTSKYKVHFGGDIPDFNVADHVEPKEAKRLDRFTQFAVHAGAQAVQDSGIDWEKTDRTRCGVILGSGIGGLNEIEEQIERMLNKGPDRVSPFTVPKMMVNAAGGNISIRYGLKGPNYAVATACASATNAMGDALRSIRGGETDVVITGGTEAAITRMGLAAFQNMKALSTRNDEPQRASRPFDSDRDGFVLAEGAGLLVFEELEHAKARGAKIYAEVLGYGTTSDAGHITAPDPEGLGAAAAMRAAIQDSGRAASEIDYINAHGTSTPLGDKAETRAIHTVLGDHAQNVAISSTKSALGHSLGASGGIEAVILCQTIQNNVIAPTINLDTPDPSCDLDYVPNQPREQKVDLAMSNSFGFGGHNACVLFGRFSHDGS

SEQ ID NO: 19802 - DNA, 1290 bp, Rhodopirellula baltica SH 1
  CDS (1)..(1290): transl_table=11
atgtcgtcgcgtcgccgagtcgtcgtcaccggaatcggtatgatcaacccaatgggttgggatgtcgccaccgtttggtctggcctgcaagaaagcggcagtggcgttgcgcccacgacgctgttcaacgccagcggtttccccacgcgaatcagtgcggaaatcaaaaactgggacatcaccaaagcggttgaagacggtgaaaaacacgtccaacgcggacgtcacacgcaatttgcgattgcggctgccactcaagcgatgaaggacagcggtgtcctgtcgtcgatcaaggatcccacgcgaatcggcgtttatttgggcagtggtgaaggcaaccaagacttcaacacgttcagcaaaatgatggttgcggcactggccgacggaacctacgacccaaccaagttcattgccgccggattgagcctgctcgatccagccaaagaactggaacaagaaccgaatatgcccgcggcgcacctcgccgcccgcttcaacgcacagggcccaaacttcaactgcctgaccgcatgtgcggccagcagccaagccgttggcgaagccaccgaaatcatccgtcgcggcgaagccgatgcgatgttggcgggcggaacgcacagcatgattcacccgtttggtgtgaccggattcaacttgctgacggcgttgagcgaaagcaacgacgatccgaccaaggccagtcgcccctttgacgcgggccgcaacggttttgtgctgggtgaaggctccgccatggtcgtgctggaagaactcgaatcagccaagaaacgtggtgcaacgatctacggggaagttgccggctacggcacaaccgccgacgcctatcgcatcaccgacatcccgccggacggtcacggcggcatcgggtccatgcgaatggcaatcgccgacgcgggactcaatccgtccgacatcggttacgtcaacgctcacggaaccagcaccaaagtcaacgaccgcgttgaaaccaaagcttgtcgcgaggtgtttggcgagcatgccgaacagactcccgttagcagcaccaagagcatgatgggccacctgatcgcggccgcgggtgtgaccgagatgatcgtgtgcctgatggcgattcgcgattcggttttgccgccgacgatcaaccaagagacaccggacccggactgcgatttggactacgtgcccaatgaagctcgcccagccgagatcaaacacgcactgaacaacagcttcggctttggtggccaaaacgtgacgctgtgcctgagccgcttcgacggctaa

SEQ ID NO: 19803 - protein, 429 aa, Rhodopirellula baltica SH 1
MSSRRRVVVTGIGMINPMGWDVATVWSGLQESGSGVAPTTLFNASGFPTRISAEIKNWDITKAVEDGEKHVQRGRHTQFAIAAATQAMKDSGVLSSIKDPTRIGVYLGSGEGNQDFNTFSKMMVAALADGTYDPTKFIAAGLSLLDPAKELEQEPNMPAAHLAARFNAQGPNFNCLTACAASSQAVGEATEIIRRGEADAMLAGGTHSMIHPFGVTGFNLLTALSESNDDPTKASRPFDAGRNGFVLGEGSAMVVLEELESAKKRGATIYGEVAGYGTTADAYRITDIPPDGHGGIGSMRMAIADAGLNPSDIGYVNAHGTSTKVNDRVETKACREVFGEHAEQTPVSSTKSMMGHLIAAAGVTEMIVCLMAIRDSVLPPTINQETPDPDCDLDYVPNEARPAEIKHALNNSFGFGGQNVTLCLSRFDG

SEQ ID NO: 19804 - DNA, 1248 bp, Prochlorococcus marinus subsp. marinus str. CCMP1375
  CDS (1)..(1248): transl_table=11
atgatggagaaactccatcgagttgtcattactggtctcggcgctattacgcctattggcaataccgtcgcagattatctctctggattgaaatctggccttaatggggtcggaccaatctccctatttgatgcatcccaacatgcctgtaggttcgctgcagaagtatcaaattttgaccctactgggttactagagccaaaagagtccaaaagatgggaccgtttctccaaatttggagttattgctgcaaaagaagcaattgcagactcaggcttaattattgatgatgccaatgcctcaagaataggtgtcatcattggttctggagtggggggcttactaacaatggaaactcaagctcaggttctaaataacaaagggcctggaagagttagtccatttacagtcccaatgatgattcccaatatggctacaggacttacggctattgctcttggtgcaaaaggccctagttcagcagtagcaacagcatgtgctgcaggatcaaacgctataggagattcttttaggctgctgcaattaggaaaagcagatgcaatgatttgtggaggagcagaagcaagtattactccccttggagtagcagggttctcaagtgccaaggctctctcatttcgcaatgatgatccatcttcagcaagcagaccatttgatgcagatcgagatggttttgttataggagaagggtcaggtgtcttaattcttgaaacttttgaccatgcaaaagaacgtaatgcccaaatttacgcagagttaattggttatggcactacatgtgatgctcatcacataactgccccatctcctggcggaataggaggagcagaagctattaaagaaaccattcaagatggaaaaatcaatattgaagaaattgattacattaatgcccatggaacaagcacagccgcaaatgacaaaaatgaaacttctgcgataaaaaacgcacttggagaaagggctagacaaatcccaattagttcaacaaaatcgatgacaggtcatcttcttggaggatctgggggcattgaagccgtagcatgtgtactttctattaaacacggggtaatcccaccaacaatcaattattccaaaccagatcctgactgtgatctggattatgtgcctaacactgctcgagaaagcaaattaaatgttgtgctttctaattcgtttggcttcggagggcataatgtgtgcctggctttccgaaaaatcaactaa

SEQ ID NO: 19805 - protein, 415 aa, Prochlorococcus marinus subsp. marinus str. CCMP1375
MMEKLHRVVITGLGAITPIGNTVADYLSGLKSGLNGVGPISLFDASQHACRFAAEVSNFDPTGLLEPKESKRWDRFSKFGVIAAKEAIADSGLIIDDANASRIGVIIGSGVGGLLTMETQAQVLNNKGPGRVSPFTVPMMIPNMATGLTAIALGAKGPSSAVATACAAGSNAIGDSFRLLQLGKADAMICGGAEASITPLGVAGFSSAKALSFRNDDPSSASRPFDADRDGFVIGEGSGVLILETFDHAKERNAQIYAELIGYGTTCDAHHITAPSPGGIGGAEAIKETIQDGKINIEEIDYINAHGTSTAANDKNETSAIKNALGERARQIPISSTKSMTGHLLGGSGGIEAVACVLSIKHGVIPPTINYSKPDPDCDLDYVPNTARESKLNVVLSNSFGFGGHNVCLAFRKIN

SEQ ID NO: 19806 - DNA, 1230 bp, Bordetella bronchiseptica RB50
  CDS (1)..(1230): transl_table=11
gtgaagcgacgagtcgtcatcaccggcctgggtatcgttagccccgtgggcaacgacattgccagcgcctgggacaatatcgtcaacggacgttccggcatcagccgcatctcccgtttcgaccctaccccgctgacgacgcacatcgccggcgaggtcaaggatttcgacgtcacccagtacatgcccgccaaagaagcccgccagatggataccttcatccattatggcctggccgccggcatgcaggcgtggcgcgattgcggccttgaggtcaccgaaaccaatgccgagcgcattggcgtgatcgtggggtcgggcatcggtggcctgccgcgcatcgaagaaacccagaccgagatgttggccaagggaccgcgccgcatttcgccgttcttcgtgcctgcgtcgttgatcaatctcatttccggccagctctccatcgcctatggcatgaagggcccgagctacgcggtcgtgtccgcgtgcaccaccggcctgcattgcatcggcgatgccgcgcgcctgatcgaatacggcgatgccgatgtcatgcttgccggtggggccgaatcgaccgtctcgccgctgggcatcggcggctttgccgcgatgcgcgcgctgtcgacgcgcaacgacgatccgaccaccgcctcgcgtccctgggaccgcgaccgcgatggtttcgtgctgggcgaaggcgccggcgtgctggtgctcgaagagtacgagcatgccaagaagcgcggcgcgcgcatctacggcgaactggccggctacggcatgagctccgacgcgcaccatatcaccgcccccgacaaggacggcccgcgccgcggcattctcaatgcgctgcgcaacggcggcatcaatgccgacgaggtttcctatgtcaatgcgcacggcacgtccacgccgctgggcgacaagaacgaaaccgacgcgttgaaactggctttcggcgaccatgcctccaagctggtggtgaattcgaccaaatccatgaccgggcacctgctgggcgccgctggcgggatcgaagccgtattcacgaccctggccgtccataatcagatttcgccgccgaccatcaacatcttcaaccaggatccggagtgcgacctggattactgcgccaacgaggcgcggcccatgaagatcgagatcggcctgtcgaattcgttcgggtttggcggcaccaacggttcgatggccgttcgtcgggtctga

SEQ ID NO: 19807 - protein, 409 aa, Bordetella bronchiseptica RB50
MKRRVVITGLGIVSPVGNDIASAWDNIVNGRSGISRISRFDPTPLTTHIAGEVKDFDVTQYMPAKEARQMDTFIHYGLAAGMQAWRDCGLEVTETNAERIGVIVGSGIGGLPRIEETQTEMLAKGPRRISPFFVPASLINLISGQLSIAYGMKGPSYAVVSACTTGLHCIGDAARLIEYGDADVMLAGGAESTVSPLGIGGFAAMRALSTRNDDPTTASRPWDRDRDGFVLGEGAGVLVLEEYEHAKKRGARIYGELAGYGMSSDAHHITAPDKDGPRRGILNALRNGGINADEVSYVNAHGTSTPLGDKNETDALKLAFGDHASKLVVNSTKSMTGHLLGAAGGIEAVFTTLAVHNQISPPTINIFNQDPECDLDYCANEARPMKIEIGLSNSFGFGGTNGSMAVRRV

SEQ ID NO: 19808 - DNA, 1245 bp, Prochlorococcus marinus subsp. pastoris str. CCMP1986
  CDS (1)..(1245): transl_table=11
atgccaaatttccatcgagtagttattaccggtataggggcagtaaccccaattggtaacaacattgatgaatatttactcggcctacaaaaggggtcaaatggagtttcagatattactctctttaatcctgaacaacatccctgcaagtttgcagcagaagttaaaaatcttcaatccgaaaattttattgaacctaaagaatctaaaagatgggatcgattttcacaatttggagtaatagctgcaaagcaagctttcaatgattctggacttgaaataactgaagacaatgaatcaagaattggagtaataattggctctggtgttggaggcttacttacaatggaaagtcaagctcaaatattgagtcataaaggcccaaaaagagtaagcccctttacagttccaatgatgatacccaacatggcgacagggcttgctgctattgcgttaggagcaaaaggtccaagctctgctgtatctaccgcctgtgctgctggatcaaatgctattggagactcttttagattgttacagctggggaaagcagatgcgatgatttgcggaggggcagaggcaagtataactcctcttggagtagcaggttttgcaagcgctaaagcactctcttttagaaatgacagtcctcaaactgcaagtagaccttttgatgctgagagggatggatttgtgattggagaaggatctgggattcttgttctagaaacttttgaaagtgcaaaaaaaagaggcgcaaaaatttatgctgaaattattggttatgggtcaacttgtgatgctcatcacattacttcgccttctccagggggaactggaggggcagaagcaatcaagctagccattgatgatagttcaattaaccttgatcaggttgattacataaatgctcatggaactagcactacagcaaatgacaaaaatgaaacttctgcaattaaatccatatttaaagacagatcttacctcattcctgtaagctctactaagtcgatgactggtcatctcttagggggttcaggaggtatagaagctgtagcttgtattctttctttgacacataattttgtccctcctacaataaactacgtcaatcctgatccagactgcgatcttgattatgtaccaaataatgctagagatgctcaaataagagttgctctttctaattcattcggctttggtggtcacaacgtttgtctagcatttagcaaacttgattga

SEQ ID NO: 19809 - protein, 414 aa, Prochlorococcus marinus subsp. pastoris str. CCMP1986
MPNFHRVVITGIGAVTPIGNNIDEYLLGLQKGSNGVSDITLFNPEQHPCKFAAEVKNLQSENFIEPKESKRWDRFSQFGVIAAKQAFNDSGLEITEDNESRIGVIIGSGVGGLLTMESQAQILSHKGPKRVSPFTVPMMIPNMATGLAAIALGAKGPSSAVSTACAAGSNAIGDSFRLLQLGKADAMICGGAEASITPLGVAGFASAKALSFRNDSPQTASRPFDAERDGFVIGEGSGILVLETFESAKKRGAKIYAEIIGYGSTCDAHHITSPSPGGTGGAEAIKLAIDDSSINLDQVDYINAHGTSTTANDKNETSAIKSIFKDRSYLIPVSSTKSMTGHLLGGSGGIEAVACILSLTHNFVPPTINYVNPDPDCDLDYVPNNARDAQIRVALSNSFGFGGHNVCLAFSKLD

SEQ ID NO: 19810 - DNA, 1248 bp, Prochlorococcus marinus str. MIT 9313
  CDS (1)..(1248): transl_table=11
atgatggaggatctccatcgggttgtgatcaccggtctcggagcggtcacaccgattggcaacacggtcgcggactatttagaagggttgaagacagccaacaatggcgtaggcgccataagcctgtttgacgcgtcagcccatgcatgtcgctttgccgcagaggtcaaagactttgacccaaccggtttcctcgaagcgaaggaatcaaaaagatgggatcgattcagcaaattcggtgttgtagcagccaagcaggcagttgctgatgccgggctaagcatcgaagaggaaaattcctcccgcatcggggtgattattggttcaggtgtcggtggtctgctcaccatggagacccaagcccacgttttgaatgagaaaggtcccggtcgggtcagcccattcacagtgccgatgatgatccccaacatggctactgggcttgccgccattgcgttgggggccaaaggacccagctcagcagtggccacagcctgtgcagctggatccaatgccatcggcgatgccttccggctgctgcaactcggcaaagcggatgtcatggtgtgtggtggtgcagaagcaagcatcacaccactaggtgtggctggcttcgccagtgccaaggccctctccttccgcaatgacgaccccaccacggctagccgtccgttcgatgcagaacgagatggattcgtcatcggtgaaggctctggcgtcctggtccttgaaacccttgagcacgccaaaaatcgcgatgccacgatccatgctgagattgtgggctatggcatgacctgcgatgcccaccacatcactgccccaacccctggcggcgttggtggtgcagaagcaatccgcctggccctaaaagacggaaagctggagcccaccagcgtggattacatcaatgcccatggcaccagtactcctgccaatgacagcaacgaaacagcagccatcaaaaatgctctcggcgaaagggcttctcagattcctgtgagctccacaaaatccatgacgggtcaccttcttggtggatcgggcggcattgaagctgtggcgtgcgtgcttgcccttcagcacgacatggtgcctcccacaattaattacctcaacccagatccacagtgtgatctcgactatgtccccaacatggccagagaacacagattaagcgtggtgctctccaattccttcggcttcggcggccacaacgtctgcctcgccttccgccaaatgccctaa

SEQ ID NO: 19811 - protein, 415 aa, Prochlorococcus marinus str. MIT 9313
MMEDLHRVVITGLGAVTPIGNTVADYLEGLKTANNGVGAISLFDASAHACRFAAEVKDFDPTGFLEAKESKRWDRFSKFGVVAAKQAVADAGLSIEEENSSRIGVIIGSGVGGLLTMETQAHVLNEKGPGRVSPFTVPMMIPNMATGLAAIALGAKGPSSAVATACAAGSNAIGDAFRLLQLGKADVMVCGGAEASITPLGVAGFASAKALSFRNDDPTTASRPFDAERDGFVIGEGSGVLVLETLEHAKNRDATIHAEIVGYGMTCDAHHITAPTPGGVGGAEAIRLALKDGKLEPTSVDYINAHGTSTPANDSNETAAIKNALGERASQIPVSSTKSMTGHLLGGSGGIEAVACVLALQHDMVPPTINYLNPDPQCDLDYVPNMAREHRLSVVLSNSFGFGGHNVCLAFRQMP

SEQ ID NO: 19812 - DNA, 1248 bp, Synechococcus sp. WH 8102
  CDS (1)..(1248): transl_table=11
atggtggacggtctccatcgcgtcgtcgttacgggcctcggcgcggtcacaccgatcggcaatacggttcaggactactggagcggcctgatctccggacgcaacggggttgatgccatcaccctgtttgatgcgtcagcccatgcctgtcgtttcgcagcggaagtcaaggacttcgaccctgctgggttgattgaaccgaaggaagccaaacgctgggatcgcttctgcaagttcggtgtcgtggccgccaaacaggccatcgctgatgccggtctcacgatttccgacgccaacgccgatcgcatcggcacgatgattggttccggcgtgggcggtctgctcaccatggagacccaggctcacgtgctggagggcaaaggaccgggacgggtgagtccgttcacggtgccgatgatgattcccaacatggcgacgggtcttgccgccattgccttaggcaccaaggggccgagctccgccgtggccaccgcttgtgccgccggctccaatgccatcggagatgccttccggctgctccagctgggcaaagccgacgccatggtgtgcggtggtgccgaatcggcaatcacccctttgggggttgccggcttcgccagcgccaaggccctgtcgttccgcaacgacgaccccgccaccgctagtcgcccgttcgacaaggaacgcgacggcttcgtaatcggcgaaggtgccggtgtgctggtgctcgaaacgctggagcacgcccaagcccgcggcgccacgatcctcggtgaagtggtgggctacggcatgacttgcgatgcccaccacatcacctcacccacaccgggcggtgtcggcggcgctgaagcgatgcgactggccctggctgatggcggcatcgatccttcggagatcgattacgtgaacgcccacggcaccagcacccccgccaacgacaaaaacgagacctcggccatcaagagtgctctgggggatcgtgcgctgcagatcccagtgagctccaccaaatcgatgaccggccacctgctgggtggatcgggcggcatcgaggcggtggcctgcgtgctggccctccagcatggggtcgtgcccccgaccatcaaccacaccaacccggatcctgactgtgatctggatgtcgtgcccaatcaggcgcgggatcagacactgggaacggtgttgtccaactccttcggcttcggcggccacaacgtctgcctggctttcaaacgcgccagttga

SEQ ID NO: 19813 - protein, 415 aa, Synechococcus sp. WH 8102
MVDGLHRVVVTGLGAVTPIGNTVQDYWSGLISGRNGVDAITLFDASAHACRFAAEVKDFDPAGLIEPKEAKRWDRFCKFGVVAAKQAIADAGLTISDANADRIGTMIGSGVGGLLTMETQAHVLEGKGPGRVSPFTVPMMIPNMATGLAAIALGTKGPSSAVATACAAGSNAIGDAFRLLQLGKADAMVCGGAESAITPLGVAGFASAKALSFRNDDPATASRPFDKERDGFVIGEGAGVLVLETLEHAQARGATILGEVVGYGMTCDAHHITSPTPGGVGGAEAMRLALADGGIDPSEIDYVNAHGTSTPANDKNETSAIKSALGDRALQIPVSSTKSMTGHLLGGSGGIEAVACVLALQHGVVPPTINHTNPDPDCDLDVVPNQARDQTLGTVLSNSFGFGGHNVCLAFKRAS

SEQ ID NO: 19814 - DNA, 1242 bp, Chromobacterium violaceum ATCC 12472
  CDS (1)..(1242): transl_table=11
gtgtccaaacgcagagtagtagtcaccggcctgggccatgtgtccccggtcggcaacgacgtcgccaccggctgggccaatctgttggccggcaagagcggcatcgccaagatcacccgtttcgacgccagcgacatggcctgccagatcgcgggcgaggtcaaggacttcaatatcggcgactacatttcgccgaaggaagcgcgtcgcaacgacctgttcattcactacggcatcgccgcggccttgcaggccgtcgccgacgccgggctggacgacatcccgggcctggacaagacccgcgtcggcgtcaacatcggctccggcatcggcggcctgccgctgatcgaggaaaccggcgtggcgctgatggaaggcggtccgcgcaagatcggcccgtttttcatcccgggctcgctgatcaacctgatcgccggccaggtgtccatcctgaagggctatcaaggccccagctacggcatcgtgtccgcctgcaccaccggcgcgcactgcatcggcgacgccgcgcgcctgatccagtacggcgacgccgacatcatggtcgccggcggcgccgagggcgcggtgtcgcgcctgggcatcggcggcttcgccgcgatgaaggcgctgtccacgcgcaacgacgaccccgaggccgcctcccgtccgtgggacaagggccgcgacggcttcgtgatgggcgagggcgccggcgtgctggtgctggaagagtacgagcacgcggtcaagcgcggcgccaagatctatgccgagctgatcggtttcggcatgagctcggacgcgcaccacatcaccgcgcccaacgccgagggcccggcccgcggcgtggtcaacgcgctgcgcgacgccggcatcaatgccgacgcggtgcagtacgtgaacgcgcacggcacgtccaccccgctgggcgacgccaacgagaccaacgcgctgaagatcgcttttggcgatcacgccaagaagctggtcgtcaactccaccaagtccatgaccggccacttgctgggcggcgcgggcggcgtggaggcgatctacaccatcctggcgatccacaaccaggtgtctccgccgaccatcaacctggtcgagcaggatctggaagccggctgcgatctcgattacgcggccaacaccgcgcgcgagatgaagatcgaggtgggcatttccaactccttcggcttcggcggcaccaacggcaccctggtgttcaagcgcgtctga

SEQ ID NO: 19815 - protein, 413 aa, Chromobacterium violaceum ATCC 12472
MSKRRVVVTGLGHVSPVGNDVATGWANLLAGKSGIAKITRFDASDMACQIAGEVKDFNIGDYISPKEARRNDLFIHYGIAAALQAVADAGLDDIPGLDKTRVGVNIGSGIGGLPLIEETGVALMEGGPRKIGPFFIPGSLINLIAGQVSILKGYQGPSYGIVSACTTGAHCIGDAARLIQYGDADIMVAGGAEGAVSRLGIGGFAAMKALSTRNDDPEAASRPWDKGRDGFVMGEGAGVLVLEEYEHAVKRGAKIYAELIGFGMSSDAHHITAPNAEGPARGVVNALRDAGINADAVQYVNAHGTSTPLGDANETNALKIAFGDHAKKLVVNSTKSMTGHLLGGAGGVEAIYTILAIHNQVSPPTINLVEQDLEAGCDLDYAANTAREMKIEVGISNSFGFGGTNGTLVFKRV

SEQ ID NO: 19816 - DNA, 1257 bp, Porphyromonas gingivalis W83
  CDS (1)..(1257): transl_table=11
atggaactgaaaagagtagtagtaacagggttaggagccattactccgcttggcaactctgctcccgaaacgtgggaaagcttagtggcaggcaagagtggagccggacctatcacgctctttgatgcctccaagttcaaaacgcagttcgcctgcgaagtgaagggttttgaccctttgcaacattttgaccgcaaggaggtgcgtaagttagaccgctacgcgcaacttgcacaagtagcggccgatgagagtgtaaaagactccggcctcgatttggaccaattggacaagaatcgtgtgggagtgatcgtttctgccggaatcggtggtctgacgactttcgaaagtgaagtgcgcgactacaatccggagaacgggcctcgtttcaatccgtttttcatccccaagatgatctccgatattgcagccggccagatctcgatcaaatacggcttccatggtcctaactattccatcgcatccgcatgcgcttcctctaccaatgctctgatcgatgcttgccatctgatccgcttaggcaaagccaatgtaatcattgcaggaggctctgaggcgtcgatttgcgctgccggagtgggaggtttcaatgcaatgaatgctctctccactcgcaacgatgctccacaagaggccagccgccccttcagtgccagtcgtgacgggtttgtaatgggtgaaggagcagcatgtatagttctcgaagaactggaacatgctcttaaacgcggtgctcgcatctatgccgaattggtgggaacaggtctttcagccgatgcatatcacctgacggcaagtcatcctgacgggttgggagccaagctggttatgacaaacgctatcgaagatgctggattgaagccggaggatattgactacgtcaatgtacacggtacttctactcctgttggggacatttcagaggcaaaagctatcaaggatgtcttcggagaacatgcttataagctgaacatcagttctaccaagagtatgacaggacatcttctcggagctgccggagctgtagaagctatggtgtgcgttaagtctgtccacgaggatatcgttccgcctacgatcaaccatcaggacgacgatcgcgatccggaaatcgattataacctgaactttacattcaacgaagcacaaaagcgtcaggtacgtgtagccctgtccaatacttttggattcggaggacataatgccagcgttgtattcaagaagttcgagaaataa

SEQ ID NO: 19817 - protein, 418 aa, Porphyromonas gingivalis W83
MELKRVVVTGLGAITPLGNSAPETWESLVAGKSGAGPITLFDASKFKTQFACEVKGFDPLQHFDRKEVRKLDRYAQLAQVAADESVKDSGLDLDQLDKNRVGVIVSAGIGGLTTFESEVRDYNPENGPRFNPFFIPKMISDIAAGQISIKYGFHGPNYSIASACASSTNALIDACHLIRLGKANVIIAGGSEASICAAGVGGFNAMNALSTRNDAPQEASRPFSASRDGFVMGEGAACIVLEELEHALKRGARIYAELVGTGLSADAYHLTASHPDGLGAKLVMTNAIEDAGLKPEDIDYVNVHGTSTPVGDISEAKAIKDVFGEHAYKLNISSTKSMTGHLLGAAGAVEAMVCVKSVHEDIVPPTINHQDDDRDPEIDYNLNFTFNEAQKRQVRVALSNTFGFGGHNASVVFKKFEK

SEQ ID NO: 19818 - DNA, 1242 bp, Wolinella succinogenes DSM 1740
  CDS (1)..(1242): transl_table=11
gtgcgtagagtcgtcgtgacaggcatcggaatgatcaatgcactaggcaacaacagaggagattcttttaaggctatcgttgaaggaaagtgcggaattaaaagaatctcttgctttgacgtggaagattttcccgtgaaaatcgccgcggaaatcaccgattttgaccccagtcttgtcatggatcccaaggaggtcaaaaaagccgatcgattcattcaacttggcatcaaagctgccaatgaagcaatgcacgattcgggtcttttagggagtgatcaccgccttctccctgagattgatggcgatcgatttgggattagctctgcttcaggaatcggtgggcttcaaaacatcgaaaaaaactctgtcatcaacgccgaacgcggccccaagagaatctctcctttcttcattccctcttccttggtgaatatgctaggggggtttgtctcgattgattatggcgtcaaaggccccaacctctcaagcgtcacagcttgcgccgcaggaactcacgccatcatcgaagcggccaaaaccatcatgcttgatggtgccgatcgaatgctcgtggttgcctccgaagcggctatttgtgctgtagggatcggtggctttgccgctatgaaagcgctaagcgacctcaacgatgagccgcttaaagcctctaggccttttgatgcaaatcgcaatggttttgtcatgggcgaaggagccgcctccttagtgctcgaagagtatgaagcggccaaaaagcgtggagccactatctatggcgagctcatcggatttggtgaaagcggcgatgccaaccacatcaccacccccgctcccgagggtgaaggcgcgctaagagcgatgagggccgccctcaggatggcaaacacctccattgattatgtcaacgctcatggcaccagcaccaaatacaacgatatgtatgagacaatggctctcaaaagtgcttttggttccaaagaggccgttccccccgtgagctctaccaaaggtcaaacgggtcactgccttggtgcagcgggcgcgattgaggcagtcatctcccttatgtctatgcaagagggaattttgccccccactatcaactacgagacccccgatcctgattgcgatctagattacatccccaacaccgctagagaggccaaacccaccacggtcatgagcaactcctttggctttggtggaaccaacggagtcgttatctttaaaaaactctaa

SEQ ID NO: 19819 - protein, 413 aa, Wolinella succinogenes DSM 1740
MRRVVVTGIGMINALGNNRGDSFKAIVEGKCGIKRISCFDVEDFPVKIAAEITDFDPSLVMDPKEVKKADRFIQLGIKAANEAMHDSGLLGSDHRLLPEIDGDRFGISSASGIGGLQNIEKNSVINAERGPKRISPFFIPSSLVNMLGGFVSIDYGVKGPNLSSVTACAAGTHAIIEAAKTIMLDGADRMLVVASEAAICAVGIGGFAAMKALSDLNDEPLKASRPFDANRNGFVMGEGAASLVLEEYEAAKKRGATIYGELIGFGESGDANHITTPAPEGEGALRAMRAALRMANTSIDYVNAHGTSTKYNDMYETMALKSAFGSKEAVPPVSSTKGQTGHCLGAAGAIEAVISLMSMQEGILPPTINYETPDPDCDLDYIPNTAREAKPTTVMSNSFGFGGTNGVVIFKKL

SEQ ID NO: 19820 - DNA, 1272 bp, Gloeobacter violaceus PCC 7421
  CDS (1)..(1272): transl_table=11
atgaaaagcaggaatcaaagagagttaaagcgcgttgtcgtcacaggcatgggatcaattactcctctacaaaatgatccagaatccttctggcagcagttacttgttggcagatctggggtgagtcggatcacgtactttgacacatcgcatcatcgttgccagattgctgctgaagtaaaggggtttgaggcgtcagattatctatcattaaaagcagctaagcgcaccgaaagatgtattcagttcgctattgccggggctaggcaggcccttgacgatgctcaattttcgatcgatgcactgaatgccagtcaagtgggggtcgtgattggtacagccattgggggaatccgaatcttcgaagcacaagcaaatgtttatgcccagaaaggaccagatcgttgcagtccctttttgacgccgatgacgatttgcaatatggctgctgctcaggtcgctattcaaattggagcgacggggccatgtttttgcccagctactgcttgtgctgccggttccaatgcgattggagatgcttttcggttaattcagttggggcatgttcaagcagtgattgctggaggcaccgaagcgcccatcacaccattggtcatcgcagggtttgaagctgctagagttgtatctactctcaatcaggaaccggaaaaagctagtcgaccttttgataaaagtagggatggatttgtcattggagaaggttcaggaatccttttgcttgaggaacttgaacacgctctcaggcgcggtaaaaagatatatgcagaattgatcggatatggagctagttgtgatgcacatcatatcacttctcctttaccaaccggtgctggggcagctcaggcaatgcgactggctatcgaggatgccgacttatctcctggccaggtcaattacattaatgcccacggcactagcacccttgctaacgatgcaatggaaattaaaggaattagtcttgcatttggagaactagctcctctgattcctatcaactccaccaaatcgatgactggtcacctcttaggagcagcgggggggattgaagctatcgcaacaatcatgacgatcactaaggaccagatccctgccacgctcaatctccaaaatcctgatactgaatgcgatctcgattttgtgacgaaggaaagtcgtcacaaaattgtggatgtagcgatgtcaaattcatttggatttgggggacataacgtatcattaatttttcgcaagttccccggcatgcttgaataa

SEQ ID NO: 19821 - protein, 423 aa, Gloeobacter violaceus PCC 7421
MKSRNQRELKRVVVTGMGSITPLQNDPESFWQQLLVGRSGVSRITYFDTSHHRCQIAAEVKGFEASDYLSLKAAKRTERCIQFAIAGARQALDDAQFSIDALNASQVGVVIGTAIGGIRIFEAQANVYAQKGPDRCSPFLTPMTICNMAAAQVAIQIGATGPCFCPATACAAGSNAIGDAFRLIQLGHVQAVIAGGTEAPITPLVIAGFEAARVVSTLNQEPEKASRPFDKSRDGFVIGEGSGILLLEELEHALRRGKKIYAELIGYGASCDAHHITSPLPTGAGAAQAMRLAIEDADLSPGQVNYINAHGTSTLANDAMEIKGISLAFGELAPLIPINSTKSMTGHLLGAAGGIEAIATIMTITKDQIPATLNLQNPDTECDLDFVTKESRHKIVDVAMSNSFGFGGHNVSLIFRKFPGMLE

SEQ ID NO: 19822 - DNA, 1248 bp, Gloeobacter violaceus PCC 7421
  CDS (1)..(1248): transl_table=11
atggaaaaaaagcgggtggtggtgaccggcgtcggcgcggtgacgcctcttggcaacacggcggccgacttctgggaaggcttgctcgcaggccgttccggtgtggcacctatcagtctgtttgacccgagccgccacgacgcgcgcatcgcggccgaggtcaaaaattttgatccccaccagtacctcgagaaaaaagaagtcaagcgcacggtgcgctttacccagatggcggtggccgcgagcaagcaggcggtcgccgacgcggctcttgccatcaacgagttcaacagcgaacaggtcggggtgattatcggcaacggcaccggcggcatggagtggctggagcagcaggacggcatcctgcgcgagcagggacccaaccgcgtttcaccctttatggtgccgctgtttatcgccaatatggccgccggcttcaccgccattcagctgggcgccaaaggccccaattcctgcaccgtcaccgcctgcgccgccggctccaacgccatcggcgacgcttttcggcttatccagtacggcgaagcccaggcggtgatctgcggcggcaccgaggcgtgcatcaccccgctggtggtggcgggcttcgccgcgtcgcgcgccctttcgacccgcaacgacgaacctgaaacagcgagccggcctttcgatttaaaccgcgacggctttgtgattggcgagggggcgggcattctggtgctcgaagaactcagccacgccctggcgcgcggcgcgcgcatctacgccgaaatctgcggctacgcgatgacctgcgacgcttatcacatgacctcgcccgcaccggccggcgaaggggccgctcgggccatccggctggcgctcaaggatgcaggcgtgttcccggaccaggtgagctacatcaacgcccacggcaccagtacgcccctcaacgacaccaacgagacccaggcgattaagaccgtgctgggagaggctgcctacagcgtggcggtcagttccaccaaatcgatgaccggtcacctgctgggcggatccgggggcatcgaggcggtggccacggctctggctgtttaccacgacatcgcgccgcccaccatcaaccttgagacccccgacccgagctgcgacctcgactacgtgccgggggtcgcccggacgatgcctatcgaggtggctctatccaattccttcggcttcggcggccacaacgtcaccctggtatttagaaagttccgcgaagcctag

SEQ ID NO: 19823 - protein, 415 aa, Gloeobacter violaceus PCC 7421
MEKKRVVVTGVGAVTPLGNTAADFWEGLLAGRSGVAPISLFDPSRHDARIAAEVKNFDPHQYLEKKEVKRTVRFTQMAVAASKQAVADAALAINEFNSEQVGVIIGNGTGGMEWLEQQDGILREQGPNRVSPFMVPLFIANMAAGFTAIQLGAKGPNSCTVTACAAGSNAIGDAFRLIQYGEAQAVICGGTEACITPLVVAGFAASRALSTRNDEPETASRPFDLNRDGFVIGEGAGILVLEELSHALARGARIYAEICGYAMTCDAYHMTSPAPAGEGAARAIRLALKDAGVFPDQVSYINAHGTSTPLNDTNETQAIKTVLGEAAYSVAVSSTKSMTGHLLGGSGGIEAVATALAVYHDIAPPTINLETPDPSCDLDYVPGVARTMPIEVALSNSFGFGGHNVTLVFRKFREA

SEQ ID NO: 19824 - DNA, 1251 bp, Photorhabdus luminescens subsp. laumondii TTO1
  CDS (1)..(1251): transl_table=11
gtgtctaagcgtcgagtagttgtgaccggactaggcatgttatctcctgtcggtaatacagctgaatcttcttggaaagctgtttgtgccggacagagtggtatcagccttattgaccattttgacaccagtcaccatgcaactaagtttgctggtctggttaaaggttttaatcatgaagatttcaatatttcgcgcaaggatgcacgaaaaatggatgatttcattcaatatggtattgcagcaggtgtgcaagccattgaagattctggaattgaagtaacagaagccaatgctagtcgttttggtgctgctattggttctggtattggtggtttgggtctgattgaagaaaatcacggggcgttggtggcgagtggtcctcgtaagatcagcccgttcttcgtaccttctacgatcgtaaacatggtagcaggtcatctgagtattatttacggtttgcgtggcccaagtatttctatcgccacagcatgtacgtcaggtgtacataatattggtcatgctgcccgtattattgcttataatgatgctgacattatgctggccggtggtgcagaaaaagccagtactcctctgggggttggtggttttggtgctgcccgagctttatctacccgtaacggtaatccacaaggtgcaagtcgtccgtgggataaagaccgcgatggctttgttctgggggatggcgcaggtatcctggtactggaagagtatgagcatgcgaagagacgtggtgcgaaaatttacgcagaaatcgttggctttggcatgagcagcgatgcttatcatatgacgtcaccaccagaaaatggtgcaggtgctgcgttggcgatggaaaatgcgctgagagatgccggtatcactaccaagcaagtgggatatattaatgctcacggtacttcaacatctgctggcgacttagcagaagcgcatgcagttgagtccgtgtttggtgaaggcactgatgttttagtgagctccactaaatcaatgacgggtcatttgttgggcgctgcgggggccgttgaatctattttcactatcctggcattgcgtgatcaagttgttccgccgactatcaacctggaaaatcaggatgagaactgccgtctggatttcgtgccaaatgagtcccgtaaggtagaggggatggaatatgcattgtgtaactctttcggcttcggtggtactaacggctcactgattttccgtaagattaaacctgattaa

SEQ ID NO: 19825 - protein, 416 aa, Photorhabdus luminescens subsp. laumondii TTO1
MSKRRVVVTGLGMLSPVGNTAESSWKAVCAGQSGISLIDHFDTSHHATKFAGLVKGFNHEDFNISRKDARKMDDFIQYGIAAGVQAIEDSGIEVTEANASRFGAAIGSGIGGLGLIEENHGALVASGPRKISPFFVPSTIVNMVAGHLSIIYGLRGPSISIATACTSGVHNIGHAARIIAYNDADIMLAGGAEKASTPLGVGGFGAARALSTRNGNPQGASRPWDKDRDGFVLGDGAGILVLEEYEHAKRRGAKIYAEIVGFGMSSDAYHMTSPPENGAGAALAMENALRDAGITTKQVGYINAHGTSTSAGDLAEAHAVESVFGEGTDVLVSSTKSMTGHLLGAAGAVESIFTILALRDQVVPPTINLENQDENCRLDFVPNESRKVEGMEYALCNSFGFGGTNGSLIFRKIKPD

SEQ ID NO: 19826 - DNA, 1242 bp, Vibrio vulnificus YJ016
  CDS (1)..(1242): transl_table=11
gtgtccaagcgtcgtgtagttgtcactggcatgggtatgttgtcaccggttggcaacaccgtagcagaatcctggaaatccctgcttgaaggcaaaagtggtatcgtcaatatcgaacatttcgatgcaactaacttctctacccgtttcgccggtttggtaaaagacttcaactgcgaagaatacatgtctaaaaaagatgcacgtaaaatggatctcttcatccagtacggcattgcagcaggtattcaggctttagacgattcaggtcttgaaattacggatgaaaacgcacaccgcgttggtgttgcgatcggctctggtatcggcggtcttgatcttattgaagctggccacaccgctttagttgaaaaaggcccacgtaaagttagcccattcttcgttccttcaactattgtaaacatggttgcaggtaatctatctatcatgcgtggcatgcgcggtccgaacatcgcgatttctactgcatgtactactggtctgcataacatcggccatgcagcgcgaatgatcgcttacggcgatgctgatgctatggttgctggtggtgctgagaaagcatcaacaccgcttggtatggctggctttggtgcggcgaaagctctttctactcgtaacgatgaaccacaaaaagcgtctcgtccttgggataaagatcgcgatggtttcgtattaggcgatggtgctggcatcatggtacttgaagagtacgaacatgcaaaagcacgtggcgcaaaaatttacgctgagctggttggctttggtatgtcgggtgatgcttatcacatgacttcaccaagcgaagacggctctggtggcgctctagcgatggaagcggcaatgcgtgacgcaggtattgttggtacacaagtgggttatgtgaacgctcacggtacatcaacaccagcaggcgatgtggctgaaattaaaggcgtaaaacgtgctcttggtgaagagggcgcaaaacaagttaaagtatcttcaacaaaatctatgaccggccacctacttggtgctgctggctctgttgaagcgatcattaccgtgttgtcgttggttgatcagatcgttccaccaaccattaacctggataatccagaagaaggtttggatatcgatcttgttccacatactgcgaagaaagtggatatggaatacgcgatctgtaactcattcggcttcggtggaacaaacggctcactcgtatttaagaaaatctaa

SEQ ID NO: 19827 - protein, 413 aa, Vibrio vulnificus YJ016
MSKRRVVVTGMGMLSPVGNTVAESWKSLLEGKSGIVNIEHFDATNFSTRFAGLVKDFNCEEYMSKKDARKMDLFIQYGIAAGIQALDDSGLEITDENAHRVGVAIGSGIGGLDLIEAGHTALVEKGPRKVSPFFVPSTIVNMVAGNLSIMRGMRGPNIAISTACTTGLHNIGHAARMIAYGDADAMVAGGAEKASTPLGMAGFGAAKALSTRNDEPQKASRPWDKDRDGFVLGDGAGIMVLEEYEHAKARGAKIYAELVGFGMSGDAYHMTSPSEDGSGGALAMEAAMRDAGIVGTQVGYVNAHGTSTPAGDVAEIKGVKRALGEEGAKQVKVSSTKSMTGHLLGAAGSVEAIITVLSLVDQIVPPTINLDNPEEGLDIDLVPHTAKKVDMEYAICNSFGFGGTNGSLVFKKI

SEQ ID NO: 19828 - DNA, 1266 bp, Rhodopseudomonas palustris CGA009
  CDS (1)..(1266): transl_table=11
atgagacgggttgtcgtcacgggccttggcatggtgtcgccgctgggctgcggcgtcgaaccgacctggagccgagtgctcgccggcgaaagcggcgcacgcaagatcgatacgttcgacgtgtcggatctcgccagccagatcgcctgcgtcattccgcgcggcgacggcaccaacggcactttcaatcctgatcaatggatggagccgaaagaccagcgtaaggtcgatgacttcatcgtctatgcgatggcggcggcgcgtcaggcgctcgacgatgccggctggcatccctccacggaagaagagcgctgcgcctcgggcgtgctgatcggctccggcatcggcggcctgcagggcatcgccgagactgcgctgctgctcgagcaacgcggcccgcgccggatctctccgttctttattcccggccgcctgatcaatcttgcgtccggctatgtctcgatcgaattcggtctgaagggccccaaccattcggtcgtcacggcttgctcgaccggcgcccatgcgatcggcgatgcctcgcggttgatcgcgctcggcgacgccgacgtgatggtcgcgggcggtaccgaatctccgatcagccgtctggcgatggccggtttcgctgccgcgcgggcgctgtcgaccggtttcaacgatgcaccgaccaaggcttcgcggccttacgacaaggatcgcgacggcttcgtgatgggcgagggcgccggcgtggtcgtgctggaagagtacgaacacgccaaggcgcgtggcgcgcggatctatgccgaagtgatcggctacggtctgtcgggcgacgcttatcacatcacggcgccgagctctgatggtgacggcgcattccgctgcatgagcgccgcgatcaagcgcggcggcatcgcagtgtcggacatcgactacatcaacgcacacggcacctcgacgccgctcggtgacgagatcgagctcggtgcggcacagcgcctgctgggcaatgcggcctcgcgcgtgtcgatgtcgtcgaccaagtcgtcgatcggccatctgcttggggccgccggtgctgtggaagcgatcttctgcgtgctcgcgattcgcgacaacgttgcgccgccgacgatcaatctcgactccccctcggtcgagacggcgatcgatctggttccgtggaagccgcgggcccgcgagatcaacgttgcattgtcgaactcgttcgggttcggtggcacgaacgcgtcgctggtgttgcagcgcgtgccgaactaa

SEQ ID NO: 19829 - protein, 421 aa, Rhodopseudomonas palustris CGA009
MRRVVVTGLGMVSPLGCGVEPTWSRVLAGESGARKIDTFDVSDLASQIACVIPRGDGTNGTFNPDQWMEPKDQRKVDDFIVYAMAAARQALDDAGWHPSTEEERCASGVLIGSGIGGLQGIAETALLLEQRGPRRISPFFIPGRLINLASGYVSIEFGLKGPNHSVVTACSTGAHAIGDASRLIALGDADVMVAGGTESPISRLAMAGFAAARALSTGFNDAPTKASRPYDKDRDGFVMGEGAGVVVLEEYEHAKARGARIYAEVIGYGLSGDAYHITAPSSDGDGAFRCMSAAIKRGGIAVSDIDYINAHGTSTPLGDEIELGAAQRLLGNAASRVSMSSTKSSIGHLLGAAGAVEAIFCVLAIRDNVAPPTINLDSPSVETAIDLVPWKPRAREINVALSNSFGFGGTNASLVLQRVPN

SEQ ID NO: 19830 - DNA, 1233 bp, Geobacter sulfurreducens PCA
  CDS (1)..(1233): transl_table=11
atgagaagagtagtggtgacgggagtcggcgccgtatctccgctcggagtcggcaacgccgccaactgggacgcgctcgtttcaggcacgtcgggcattgggcacataacccgctttgacgcctccgacctgccggtgaggatcgccggtgaggttaagggctttgatcccgagcagtacatcgacaagaaagaggtcaagaagatggacctcttcatccagtacgccatggcagctgcccattacgccatggaagattccggcctccagatcaccgaggagaacgcggagcgtacgggtgtcctggtcggcgcgggactgggcggtttgccgaccatcgaaaagtatcatgccgccatgctcgaaggcgggcacaagaaaatttcccccttcttcattccgatgctgatcatcaatctggcacccggccacatttcaatcaagtatggggccaagggacccaatctgtcgtcggtatccgcctgcgccaccggtacacattccatcggtgatgcgtaccatatgatcaagcgcggcgatgcggacgccatgattgctggtggtaccgagtccacggtgactcccctcggaattggcggttttgcggtcatgaaggctctctccacgcgtaacgacgatccgaccgctgcgtcgcgtccctttgaaaagaatcgcgatggtttcgttctcgctgagggtgcgggtatcgtcgttcttgaggagtatgaggctgccaagaaacgcggggccaaaatttatgccgagatcgtcggctatggtctcacgggcgacgcctaccatctcaccgctccggcaccggagggagaaggtgcagcgcggtgtatgaaaatggctctcaacaacgccggggtccgtccggaggaagtggactacatcaacgctcatggcacgtccacgcccttcaatgactactacgagacccttgccgtcaagagcgtgttcggtgactacgcgaaaaaggttatggtgtcctccaccaagtccatgaccgggcacctgctcggcgcagccggcggtgttgaagctgtctttaccctcatggccatggacaagggtgtgattccgccgaccatcaactatcaggagcaggaccccgagtgcgatcttgattatgttcccaatgccgcccgggagaagtcgatcacgtacgccctcagcaataacttcggttttgggggcacgaacgcgacgctgctctttaagaaagtatag

SEQ ID NO: 19831 - protein, 410 aa, Geobacter sulfurreducens PCA
MRRVVVTGVGAVSPLGVGNAANWDALVSGTSGIGHITRFDASDLPVRIAGEVKGFDPEQYIDKKEVKKMDLFIQYAMAAAHYAMEDSGLQITEENAERTGVLVGAGLGGLPTIEKYHAAMLEGGHKKISPFFIPMLIINLAPGHISIKYGAKGPNLSSVSACATGTHSIGDAYHMIKRGDADAMIAGGTESTVTPLGIGGFAVMKALSTRNDDPTAASRPFEKNRDGFVLAEGAGIVVLEEYEAAKKRGAKIYAEIVGYGLTGDAYHLTAPAPEGEGAARCMKMALNNAGVRPEEVDYINAHGTSTPFNDYYETLAVKSVFGDYAKKVMVSSTKSMTGHLLGAAGGVEAVFTLMAMDKGVIPPTINYQEQDPECDLDYVPNAAREKSITYALSNNFGFGGTNATLLFKKV

SEQ ID NO: 19832 - DNA, 1251 bp, Mycobacterium avium subsp. paratuberculosis K-10
  CDS (1)..(1251): transl_table=11
gtgagtaagccttccactgctaacggcggttaccccagcgttgtggtaaccgccgtcacggcgacgacgtcgatcgcgccggacgtcgagagcacgtggaagggtctactcgccggcgaaagcggcatccacgtcctcgaagacgactacatcaccaagtgggacctgccggtccggatcggtggccacctcaaggagcccatcgacgagcggatgagcaggctcgacctgcgccgcatgtcctacgtccagcggctggccaagctgctcagcacccagctgtgggagaccgccggcaacccggagctcgaccccgaccggttctcggtcgtggtgggcaccggcctcggtggtgccgagcggatcgtggagagctacgacctgatgaacgagggcgggccccgcaaggtgtcgccgctggccgtgcagatgatcatgcccaacggcgccgccgccgtggtgggtctgcagctcggcgcccgcgccggggtgatcaccccggtgtcagcctgttcgtcgggctcggaggcgatcgcccacgcgtggcgccagatcgtcatgggcgacgccgatgtcgccgtgtgcggtggtgtcgagggccctatcgacgcgctgccgatcgcggccttctcgatgatgcgggccatgtcgacgcgcaacgacgagcccgagcgggcgtcgcggccgttcgacaaggaccgcgacgggttcgtgttcggcgaggccggcgcgctgatgctgatcgagaccgaggagcacgccaaggcccgcggtgccaagccgctggcccggttgatgggtgccggcatcacgtccgatgcgttccacatggtggccccggcgggcgacggtgtgcgggcgggccgggccatgacgcggtcgctggagttggcgggcctgtccccgaaggacgtcgaccacgtcaacgcgcacggcaccgcgacgccgatcggtgacaccgccgaggccaacgccatccgggtggccggatgtcaggaggcggcggtgtatgcgccgaagtccgcgctgggacactcaatcggcgcggtcggcgcgctggaatcggtgctcacggtgctgaccctgcgcgacggcgtcattccgcccaccttgaactatgaaaccccggaccccgaaatcgatctggacatcgtggcgggcgaaccccgctacggcgactaccaatacgcgatcaacaactcgttcggcttcggtggccacaacgtggcactggccttcgggcgctactga

SEQ ID NO: 19833 - protein, 416 aa, Mycobacterium avium subsp. paratuberculosis K-10
MSKPSTANGGYPSVVVTAVTATTSIAPDVESTWKGLLAGESGIHVLEDDYITKWDLPVRIGGHLKEPIDERMSRLDLRRMSYVQRLAKLLSTQLWETAGNPELDPDRFSVVVGTGLGGAERIVESYDLMNEGGPRKVSPLAVQMIMPNGAAAVVGLQLGARAGVITPVSACSSGSEAIAHAWRQIVMGDADVAVCGGVEGPIDALPIAAFSMMRAMSTRNDEPERASRPFDKDRDGFVFGEAGALMLIETEEHAKARGAKPLARLMGAGITSDAFHMVAPAGDGVRAGRAMTRSLELAGLSPKDVDHVNAHGTATPIGDTAEANAIRVAGCQEAAVYAPKSALGHSIGAVGALESVLTVLTLRDGVIPPTLNYETPDPEIDLDIVAGEPRYGDYQYAINNSFGFGGHNVALAFGRY

SEQ ID NO: 19834 - DNA, 1272 bp, Wolbachia endosymbiont of Drosophila melanogaster
  CDS (1)..(1272): transl_table=11
atgagcagaagagtagtagtcactggtgttggtttaatcactccactagcggcagatgttgacaacacttggtcaaggctaataaaaagtgagtctggcataaaagcaatcaatacggagagatttgactcttctgatcttgcttgcaaaattgcagggcaggtgccgttgcaatcagacaacattgagcaccatttcaatccactagattatatttctgagaaagactcaaaaaggacagatcgttttatccattacggtattgcagcagctattcaggcagtagatgattcattaattttggaaagccaaaatatcaatcgggaacgtgttggtgtgactattggctctggtataggtggtcttccgtcaattcaggaaaatgttattaccatgcaggaaaaagggcccagacgtgtcagtccattttttgtccctgcaagtctaataaatttgatatctggccatatttctattaaatacgaatttacaggtccaaacgattcagcagtaaccgcatgtgcaacaggtgcgcatgcaatcataaactcagcaagaactataaaacttggtgaagcggatgttatgattgcaggtggagcagaaagtgcactgtgtagagttggaattgcaggttttgcatctatgaaggcgttatcaactaaatttaacgataaaccggaagaagcttcaaggccatgggatgaagaacgcgatggttttgttatgggtgaaggagcaggtatattggtgctggaggaatacgaacatgcgaaaaaaaggggggcaaaaatacatgctgaactggttgggtacggactcacaggagatgcgcaccacattacagcaccacatccagaaggaagaggcgcatttaaggcaatgcagcttgctttaaagagcgcacaaattaatcccaatcaagtagggtatatcaatgcacatggaacttcaacgccacttggagataaaattgaagtaatagcaatgaaacagttattcggtgactacgtttataaaatacctgtttcttcaactaaatcttctataggacatttacttggtgctgcagggagcgttgaagcaatattcagtattcttgcgttaaataatggaattattccgccaaccttaaatttacacaagccttcagaaggatgtgatttaaattttgtaccgtttaaagctcaggagcataaaattcaatatgcactttctaattcgtttggttttggtggcactaatgcatcgctcatatttggacaagtttag

SEQ ID NO: 19835 - protein, 423 aa, Wolbachia endosymbiont of Drosophila melanogaster
MSRRVVVTGVGLITPLAADVDNTWSRLIKSESGIKAINTERFDSSDLACKIAGQVPLQSDNIEHHFNPLDYISEKDSKRTDRFIHYGIAAAIQAVDDSLILESQNINRERVGVTIGSGIGGLPSIQENVITMQEKGPRRVSPFFVPASLINLISGHISIKYEFTGPNDSAVTACATGAHAIINSARTIKLGEADVMIAGGAESALCRVGIAGFASMKALSTKFNDKPEEASRPWDEERDGFVMGEGAGILVLEEYEHAKKRGAKIHAELVGYGLTGDAHHITAPHPEGRGAFKAMQLALKSAQINPNQVGYINAHGTSTPLGDKIEVIAMKQLFGDYVYKIPVSSTKSSIGHLLGAAGSVEAIFSILALNNGIIPPTLNLHKPSEGCDLNFVPFKAQEHKIQYALSNSFGFGGTNASLIFGQV

SEQ ID NO: 19836 - DNA, 1272 bp, Bdellovibrio bacteriovorus HD100
  CDS (1)..(1272): transl_table=11
atgaactcccgatttgaacgtccatccaaaccacaaagaagagttgtcgtcaccggagtaggcgcagtcactccccttggtaataccattgaggacagctgggctgccgcaatccgtggtcaatctgggatcgccaagatcaccaaattcgacacgacaggcttcgatgtgacttttgccggcgaagtaaaaggtttcaacacagaccaatacgtcgagaaaaaagagcaaaagaaaatggacgagttcattcactactcgatcgcagcttccaaaatggccgtggaaatggccaagctggaactgaccgaagaagtgaagaatcaagcgggagtgattattggtgtcggtatcggtggtcttgcgaacatcgaagaaaccgccataaaaatgaaggaaagaggaccgggccgtatcagtccgttcttcatcccttctgtgatcacgaacctggccgcgggtcaggtgacgatctcattgggactgaaaggtcctaactattctgtgacttccgcgtgtgcttcaggtgttcactctatcggagatgcggttcgctatattcgcgacggcgtgactgatgtgatgcttgcaggtggcgcagaaagcacgatctgcggactggctgttggaggctttgcttccatgcgcgccctgtccacccgcaacgatgctcctgaaaaagccagccgtccttgggataaagaccgtgacggatttgttttggcagagggtgcggcggttctttgcatcgaatcccttgagcacgcggtcaaacgtggcgccaatattctttgcgaaatcacaggctacggagtttcctccgatgcttaccacatgacttccccggctccggaaggcgctggtggttatgcggcgatgtccatggctttgaaagactccggtctgaaagcggaagacatcaactatatcaacgctcacggcacaagtacgccggtgggtgacggccttgaaaccgcggcaatcaaacgcctgctgggtgatcatgcgaaaaaggtctgggtttccagcaccaagtccatgatgggtcacgcgttgggcgcagctggcgcaattgaatctgctttctgtgtgatggcaattcgcgaccaggtggctcctccaacgatcaacttggaaaatccaagtgaagactgtgatttggattacgttcctaatgaggcacgtaaaggtaaaatcaccaatgtcatcaacaacagctttggtttcggtggaaccaacgcctccatgatcttctctaaatacgaaggataa

SEQ ID NO: 19837 - protein, 423 aa, Bdellovibrio bacteriovorus HD100
MNSRFERPSKPQRRVVVTGVGAVTPLGNTIEDSWAAAIRGQSGIAKITKFDTTGFDVTFAGEVKGFNTDQYVEKKEQKKMDEFIHYSIAASKMAVEMAKLELTEEVKNQAGVIIGVGIGGLANIEETAIKMKERGPGRISPFFIPSVITNLAAGQVTISLGLKGPNYSVTSACASGVHSIGDAVRYIRDGVTDVMLAGGAESTICGLAVGGFASMRALSTRNDAPEKASRPWDKDRDGFVLAEGAAVLCIESLEHAVKRGANILCEITGYGVSSDAYHMTSPAPEGAGGYAAMSMALKDSGLKAEDINYINAHGTSTPVGDGLETAAIKRLLGDHAKKVWVSSTKSMMGHALGAAGAIESAFCVMAIRDQVAPPTINLENPSEDCDLDYVPNEARKGKITNVINNSFGFGGTNASMIFSKYEG

SEQ ID NO: 19838 - DNA, 1236 bp, Treponema denticola ATCC 35405
  CDS (1)..(1236): transl_table=11
atgagaagagttgtaattacaggcctcggtgccgtaacccccataggaaacaccctggatgaaacatgggaaggaatcaaagcaggtaaatgcggaatcggaaacattacccaatttgattgttccgattttaagattcagatagcggcagaagtaaaaaactttgacgcttcacaatttatggataaaaaagatgcccgtaaaatggcgcggttcactcaatttgccgtagccgcagcttcgcaggcaatgaaggatgccggcctttcaaaagaaaacatcgatgcaaaccgcacaggtataatactcggaaacggtataggcggttttgaaatctaccaagaagcctttaaaaaatactttcaagttgctccggatcgtattccgcctatgactgttcctcttcttattccgaatgaggcagccggaaacataagtatgcagttcggcataaagggaccgtcttggacattggccacggcctgtgcttccggtaccgatgctctcggaaacgctttagaccttgtccgctcaggaaggcttgatgtatgtgtatcgggcggtacggaagctacaattaccggtttcggcataagcggttttacgattttgcaaaccctcgcctcaggcgatcctgccaaggcttgctgtcccttcgataaaaagcgttcaggctttgtgatgggcgaaggctcaggcattctcatccttgaagaatatgaacatgcaaaaaaaaggggagctaaaatatatgcagaatttgcgggctatggagcctcctccgatgcctaccacttaaccagccccgacccctcaggtgacggaggagcattggctatcaccaacgccctcgccgatgcaggcgtaaaacctgaagaagttcaatactataatgctcacggaacatcgacgccgattaacgaccctgcagaaacggccatgattaaaaaagcttttggagaccatgcatataaaatgaaggtttcttcaaccaaatcgatgataggccattgcttaggtgccgcaggagctcttgaagctatcttctgtataaaggcaatggaagaaggattttatcccccgaccattaacctaaccgaacccgaccttgaagccggctgcgatttggactatgttccgaacaagggcgtcaaaggcgaaataaactgtgccgcctcaggctctctcggcttcggaggccataacggcgtcgccgtctttaaaaagataaagtaa

SEQ ID NO: 19839 - protein, 411 aa, Treponema denticola ATCC 35405
MRRVVITGLGAVTPIGNTLDETWEGIKAGKCGIGNITQFDCSDFKIQIAAEVKNFDASQFMDKKDARKMARFTQFAVAAASQAMKDAGLSKENIDANRTGIILGNGIGGFEIYQEAFKKYFQVAPDRIPPMTVPLLIPNEAAGNISMQFGIKGPSWTLATACASGTDALGNALDLVRSGRLDVCVSGGTEATITGFGISGFTILQTLASGDPAKACCPFDKKRSGFVMGEGSGILILEEYEHAKKRGAKIYAEFAGYGASSDAYHLTSPDPSGDGGALAITNALADAGVKPEEVQYYNAHGTSTPINDPAETAMIKKAFGDHAYKMKVSSTKSMIGHCLGAAGALEAIFCIKAMEEGFYPPTINLTEPDLEAGCDLDYVPNKGVKGEINCAASGSLGFGGHNGVAVFKKIK

SEQ ID NO: 19840 - DNA, 1239 bp, Bacillus cereus ATCC 10987
  CDS (1)..(1239): transl_table=11
atggaaaaaaagagggtcgtaattacaggactaggagctgttacaccggtcggtacagatgttgaaacagcgtgggaaaacattaaaaaaggtgtatctggaatcggacgacttacaagaattgatccggaactatttccagcaaaagtagcagcagaaattaacgactttgaagtcgagaaatatattgataaaaaagaagcgcgccgtatggatcgctttacacaatatgcagtagcagcagcgaaaatggcagttgcagatgcaaagcttgagattacagaggaaaacggacctcgaattggtgtatggattggttctggtattggcggtatggaaacatacgaagaacaatttaagatttttactgagaaaggtccgcgccgcgtgagcccattcttcgtaccgatgatgattccagatatggcagcaggccaagtatcaattgcaaccggagcaaaaggaattaacacttgttctgtaacggcttgtgcatctggtgcaaactcaattggtgatgcgtttaaagcgattcagcgcggtgatgctgatgcaatgattacaggcggagcagaggcgccgttaacaaatatggcattcgcaggatttagctcagcgaaagcattaacattcaatgaagatccagcaacagcttgccgtccattcgataaaaaccgtagcggtttcgtaatgggtgaaggttcaggtattttaattcttgaagaattagagcacgcattagctcgtggtgctcacatttatgcggaaatcgctggttacggtgcaactggtgatgcattccatattacaatgccggctcctggcggtgaaggcggcgtgcgcgcaatgcgtcaagctttagcagatgcaggtctacagccagaagatattgattacattaatgcgcatggtacaagtacggatgcgaatgaaaagtatgaaacgatggcaattaaagaaacgttcggtgagcatgcgtataaagtagcgatcagctcaacgaaatcaatgacaggtcacttattaggggcagctggtgctgttgaagcgattttctctattaaatcaattacagatggagtaattcctccaacaattaactatgagacaccagatccagaatgtgacttagattacgtaccgaatcaagcgagacatcaagaagtaaacgcagtgttaagtaattcattaggattcggtggtcataacgcagtattagtatttaaagcgtataaataa

SEQ ID NO: 19841 - protein, 412 aa, Bacillus cereus ATCC 10987
MEKKRVVITGLGAVTPVGTDVETAWENIKKGVSGIGRLTRIDPELFPAKVAAEINDFEVEKYIDKKEARRMDRFTQYAVAAAKMAVADAKLEITEENGPRIGVWIGSGIGGMETYEEQFKIFTEKGPRRVSPFFVPMMIPDMAAGQVSIATGAKGINTCSVTACASGANSIGDAFKAIQRGDADAMITGGAEAPLTNMAFAGFSSAKALTFNEDPATACRPFDKNRSGFVMGEGSGILILEELEHALARGAHIYAEIAGYGATGDAFHITMPAPGGEGGVRAMRQALADAGLQPEDIDYINAHGTSTDANEKYETMAIKETFGEHAYKVAISSTKSMTGHLLGAAGAVEAIFSIKSITDGVIPPTINYETPDPECDLDYVPNQARHQEVNAVLSNSLGFGGHNAVLVFKAYK

SEQ ID NO: 19842 - DNA, 1302 bp, Eremothecium gossypii
  CDS (1)..(1302)
atgcatccccgagtggtcgtgaccggcattgggtgctatactcctctggggccgtcgctagcccagtcttggaaggagctgttgcgagggacgagcggccttgtcaggctgcaagatctggcagagtacgagggcgattacaaaccactgtcgaggcttatatccggtgatcttcgagtcgggaaagttggatttgaggcgcgcgaccaggagctgctttcgagccaggagcaacggcggacctcgcgcgccgcgcagctggccatggtcaccgcagaagaagcgctccggcacgcaggtctccttagcggctcgcatctcgttgccagcgtggaccgcaaccgggcagggtgcatcattggcgcggggctaccctccatggaggacatatcgcaggcgacggcttctctgtcgtccgcacggcgaccgtccgtgtcgccgttcttcatcccaaagatgctcaacaacatggctgcgggaaacgtcgccattaagtttcaactccggggagccagcaattgtccctccacagcttgcgcgtcgggaaataatgcgatcggtgacgcatacaatttcatccgcctgggctactcagacgtaattgtggctggggccagcgagctgagtgtgcatcccttggcattggcggggtttgtgaaggccaagagtatctccgcgagcggcatttcgagaccgttcgacgcacggcgagacggctttgtgttgggcgagggctgcggcttactcgtgcttgagtcgcttgagcatgcacgtcaccgtggcgcagagataattgcggaagtggttgggtacggtgtgtgctcagatgcacaccacatcacgtcaccatcagagggcggggacggagcccgcagggctatgcacatggcattgcaggatgccggcatctgggacacgcgcgaccaggttggatatgtcaacgcccacgccacgagtacacctcttggcgaccgtgctgaggcgcgggccattcaggcggtgtttggtgctactggcacaggctctacgcttgtcagtagtaacaagggacatatgggccatctactaggtgctgcgggcgccgtggaagcagtcttcacagttcaatcgttgagggaaggcattgtaccccacacactaaatctgcaaacggttggagaggggctggcagacaaaaaagacggattcggtgggattacgttcgtgcaagataatcctgtccccgctcctctcacatacgcaatgaacaacagtttcggtttcggtgggattaactcctcgttgctgttcaagaaatggtga

SEQ ID NO: 19843 - protein, 433 aa, Eremothecium gossypii
MHPRVVVTGIGCYTPLGPSLAQSWKELLRGTSGLVRLQDLAEYEGDYKPLSRLISGDLRVGKVGFEARDQELLSSQEQRRTSRAAQLAMVTAEEALRHAGLLSGSHLVASVDRNRAGCIIGAGLPSMEDISQATASLSSARRPSVSPFFIPKMLNNMAAGNVAIKFQLRGASNCPSTACASGNNAIGDAYNFIRLGYSDVIVAGASELSVHPLALAGFVKAKSISASGISRPFDARRDGFVLGEGCGLLVLESLEHARHRGAEIIAEVVGYGVCSDAHHITSPSEGGDGARRAMHMALQDAGIWDTRDQVGYVNAHATSTPLGDRAEARAIQAVFGATGTGSTLVSSNKGHMGHLLGAAGAVEAVFTVQSLREGIVPHTLNLQTVGEGLADKKDGFGGITFVQDNPVPAPLTYAMNNSFGFGGINSSLLFKKW

SEQ ID NO: 19844 - DNA, 1335 bp, Anopheles gambiae str. PEST
  CDS (1)..(1335)
atgaaaagtctcccctacgtgctgcgaactattcaccattcacactcgaaacacaccagagacagtggacgacgccgggtggtggtaacggggctcggtgtagtatcacctgtcggctgcaatgtggaagcggcctggcaaacgatcctctccggtcagtcaaaagttggtcgactggtgggagaaacgtacgacaagcttccctgccgcgtagcggccacaatcgacacgaacgacatcgatctggaaaagtgtttctccaaaaccgagctcaaaacgatggcacgcgctaccgcctttgcgttgatcgctgccaaggaggctctctcgagggctagctggatgccgggcgtggaggatgaaaccgcctgccagcgcaccggtgttgccatcggtatgggcatggtagatctgatggacatttgcgagacgaacgaagcgctcaagaagggatacaaccgggtgagcccattttttgtgccccgcatcttgcccaacatgccggccgggcagctcagcatccggtacgggtttcgcggaccgaaccatgccgtttctaccgcctgtgctacgggtgcccatgccataggcgatgcgttccgcttcattcagcacggcgatgcggacgtgatggtgtgtggcggtgcggaagcttgcatcagtccgctcgggattgccggattctgtcggctgcgagcgctcagcacggcgttcaacgacgaaccgacggcatcgtcccgaccgttcgacgagcgtcgcgatggctttgtgatgggcgaggggtcggccattttcgtgctggaagagctgcagcatgccctgcggcgaggagcaccaatctacggcgagatactcgggtatggattgtctggcgatgcgtcccatctgacggcaccgcgggaggatgggacgggagcgctgttggcgatgcagcgagcccttgccgatggtggcgtaacggttgccgatattgggtacgttaatgcacacgccacatcgaccccgatcggtgatgcgatagaagcccgtgcgataaggacacttttcggagagcacacacggtcgctggcggtttcgtcgacaaagggagcccatggtcatttgctcggtgcggccggcaacttggaagcgctgttcgtcgtgatggcctgcaggcatggtctgcttccacccaccgtcaatctgcagaacgtaacggacgatatggccgggctgcattacgtggcgaacagctccgaaccatgggaggggaagcaccgtcggcgggtggctttgaaaaactcgttcggttttggtggcaccaacgcttgtctctgcattggtgaatacagctag

SEQ ID NO: 19845 - protein, 444 aa, Anopheles gambiae str. PEST
MKSLPYVLRTIHHSHSKHTRDSGRRRVVVTGLGVVSPVGCNVEAAWQTILSGQSKVGRLVGETYDKLPCRVAATIDTNDIDLEKCFSKTELKTMARATAFALIAAKEALSRASWMPGVEDETACQRTGVAIGMGMVDLMDICETNEALKKGYNRVSPFFVPRILPNMPAGQLSIRYGFRGPNHAVSTACATGAHAIGDAFRFIQHGDADVMVCGGAEACISPLGIAGFCRLRALSTAFNDEPTASSRPFDERRDGFVMGEGSAIFVLEELQHALRRGAPIYGEILGYGLSGDASHLTAPREDGTGALLAMQRALADGGVTVADIGYVNAHATSTPIGDAIEARAIRTLFGEHTRSLAVSSTKGAHGHLLGAAGNLEALFVVMACRHGLLPPTVNLQNVTDDMAGLHYVANSSEPWEGKHRRRVALKNSFGFGGTNACLCIGEYS

SEQ ID NO: 19846 - DNA, 1524 bp, Oryza sativa (japonica cultivar-group)
  CDS (1)..(1524)
atggcggccgtggcggtgcccccgctctccgcgtggctcgtcgccgcgcgctcctcgacgcaggcggaatgcggcggcgccgacgagcaccaccaccaccaccatcagcagcagcaccagtgctgcgtcggcggcgggtccagcacggtgatgttcggcccgcgccgccgccgcttcctcggcggcggcgcgcggcggcgcggcgcggcgcgctctggaatggccatggctgttgccctgcagcctgaaaggagaactgttgaaaagaaacctgatgttaaacaaagaagggtggttatcactggcatgggtgtagtaacaccgttgggccatgatcctgatgtgttttacaacaaccttctggatggtgttagtggaataagcgagatagaaaggttcgactgctccacgtttccgacgagaattgcaggagagataaaatccttttctactgatggttgggttgctcctaagctagctaggcgaatggacaagttcatgctatatttgataactgctggaaagaaggcgttggaacatggtggtctcactgaagaactcaggaatgaattggataaaaccagatgcggtgttctcattggttctgcaatgggtggcatgaaggtttttaatgatgcgattgaagcattgagggtctcctacaagaaaatgaacccattttgtgtcccttttgcaactacaaatatgggctctgcaatacttgcaatggatctgggctggatggggccgaactattctatttccaccgcgtgtgctaccagtaatttctgtatcctcaatgcagcaaaccatatcagaagaggggaagctgatgttatgctctgtggtggttctgatgcaccactcatcccaattggattaggaggttttgtggcttgcagagcactttcacagagaaacagtgacccaactaaagcttcccggccatgggatgtggaccgtgacggttttgttatgggggaaggggcaggtgttcttgtgttggaagaacttgaacacgccaagcaaagaggtgcaaaaatatatgctgaatttctaggtggaagcttcacgtgtgatgcataccacatgactgagccacatcctgaaggaagagggattattctttgtatagaaaaggcactggctgattcaggagtagcaagggaagaaatcaactatgtcaatgctcacgcaacgtctacacagtcaggtgatttgaaggagtatgaagctattgtccgctgctttggccagaaccctcagctaagggtgaactcaacaaaatcaatgactggacatctaataggtgcagctggtggaatagaagctgttgctgctattcaagctataagaactggctgggtccatccgaatctgaatttggagaacccagagaaaatagtggatgtgggcgtgctggtcgggtcgcagaaggagagatgcaaagtgaatgtggcactgtcaaactcatttggatttggtgggcacaactcatcaattctgtttgcacccttcaagtga

SEQ ID NO: 19847 - protein, 507 aa, Oryza sativa (japonica cultivar-group)
MAAVAVPPLSAWLVAARSSTQAECGGADEHHHHHHQQQHQCCVGGGSSTVMFGPRRRRFLGGGARRRGAARSGMAMAVALQPERRTVEKKPDVKQRRVVITGMGVVTPLGHDPDVFYNNLLDGVSGISEIERFDCSTFPTRIAGEIKSFSTDGWVAPKLARRMDKFMLYLITAGKKALEHGGLTEELRNELDKTRCGVLIGSAMGGMKVFNDAIEALRVSYKKMNPFCVPFATTNMGSAILAMDLGWMGPNYSISTACATSNFCILNAANHIRRGEADVMLCGGSDAPLIPIGLGGFVACRALSQRNSDPTKASRPWDVDRDGFVMGEGAGVLVLEELEHAKQRGAKIYAEFLGGSFTCDAYHMTEPHPEGRGIILCIEKALADSGVAREEINYVNAHATSTQSGDLKEYEAIVRCFGQNPQLRVNSTKSMTGHLIGAAGGIEAVAAIQAIRTGWVHPNLNLENPEKIVDVGVLVGSQKERCKVNVALSNSFGFGGHNSSILFAPFK

SEQ ID NO: 19848 - DNA, 1245 bp, Anopheles gambiae str. PEST
  CDS (1)..(1245)
atggaattaaagagagtagtagtaactggcttcgggtcccttacaccgataggaaataatgcaaatgagtactgggagagccttgtaaaaggcacaagtggagcagcgccgattactctttttgattccactaattttaaaactcaatttgtcgaggttaaaaacttcgatccgttaaaccacttcgataagaaagaggctaaaaaaatggaccgtaactcgcaattagggcaggttgttgcacgtgaggcgattgctcacagtcgtattattgaggacaatgtagacaaagaccgtgtaggtgttatctggggatccggaattggcggacttgaaactttcgaaactgaagttttgggatacgctgcttcaaatagtatcccaagattcaaccctttctttattcctaaaatgatcgccgacattacaccggggaatatttctatagaatttggattccatggtcctaactataccacagtttcagcttgtgcttcttctgccaatgcaattattgatgctaaaatgcttattcagttaggcaaagcagatgttattgtttgcggaggatctgaagcagctgtaacagctagtggtgtaggtggcttcaatgctatgcatgcactttcaacaagaaatgacgatcctaaaacagcttcccgtccattcgacaaagacagagatggttttgtactgggtgaaggagcaggatgtatcattcttgaagaatacgaacacgctgtaaaaagaggcgctacaatttatgccgaactactgggcggaggtcttagtgcagatgctcaccacatgacagctccacatccggaaggattaggtgcttatttagtaatgaaaagatgtctggatgatgccggagttactactgatgaagtagaccacatcaacatgcatggtacttctactccattaggagacattgcggaatctcaggcaattgctaaattattaggtgaacacgcatttgatattcagatcaattctactaagtctatgacggggcatttattaggtgcagccggagttatagaatctatagcagctttaggcactattatccacggaattgttcctccaacgatcaatcatttcacagatgatgagagactggacagcagacttaactttactttcaacacagcagtgaagaaggaagtgaatattgcaatgagcaacacttttggaattggagggcataatgcctgcgttttattcaaaaagatttaa

SEQ ID NO: 19849 - protein, 414 aa, Anopheles gambiae str. PEST
MELKRVVVTGFGSLTPIGNNANEYWESLVKGTSGAAPITLFDSTNFKTQFVEVKNFDPLNHFDKKEAKKMDRNSQLGQVVAREAIAHSRIIEDNVDKDRVGVIWGSGIGGLETFETEVLGYAASNSIPRFNPFFIPKMIADITPGNISIEFGFHGPNYTTVSACASSANAIIDAKMLIQLGKADVIVCGGSEAAVTASGVGGFNAMHALSTRNDDPKTASRPFDKDRDGFVLGEGAGCIILEEYEHAVKRGATIYAELLGGGLSADAHHMTAPHPEGLGAYLVMKRCLDDAGVTTDEVDHINMHGTSTPLGDIAESQAIAKLLGEHAFDIQINSTKSMTGHLLGAAGVIESIAALGTIIHGIVPPTINHFTDDERLDSRLNFTFNTAVKKEVNIAMSNTFGIGGHNACVLFKKI

SEQ ID NO: 19850 - DNA, 1227 bp, Thermus thermophilus HB27
  CDS (1)..(1227): transl_table=11
atgcgacgcgtggtggtcaccggcctaggcgccctcacgcccatcggcgtggggcaggaggccttccacaaggcccagctcgcgggcaaaagcggggtcaggcccatcacccgctttgacgcctcggccctccccgtgcgcatcgccgccgaggtggacgtggaccccggggcctacctggaccggaaggagctcaggcgcctggaccgcttcgtccagtacgccctcatcgccgctcagcttgccctggaggacgcggggctaaagcccgaagaccttgaccccgagcgggtgggcaccctggtgggcacggggatcgggggcatggagacctgggaggcccaaagccgggtcttcctggagcggggcccaaaccgcataagccccttcttcatccccatgatgatcgccaacatggcctcggcccacatcgccatgcgctacggcttcaccgggccttcctccacggtggtcaccgcctgcgccacgggggcggacgccctgggaagcgccctgcgcatgatccagctcggcgaggccgacctcgtcctggcgggggggacggaggccgccatcacccccatggccatcggggccttcgccgtgatgcgggccctttccacaaggaacgaggagcccgagaaggcgagccgccccttcaccctctcccgggacgggttcgtcatgggggagggggccggggtcttggtcctggaggcgtacgagcacgcgaagaagcggggcgcccgcatctacgccgagctcgtgggcttcggccggagcgccgacgcccaccacatcaccgagccccaccccgagggaaagggcgccgccttggccatggcccgggccctgaaggacgcgggcatcgcccccgagcaggtgggctacatcaacgcccacggcacctccacccccgcgggggaccgggcggaggtgctggccatcaagcgggtcttcggggaccacgccaagaggctcatggtctccagcaccaagagcatgatcggccacctcctgggagcggcgggggcggtggaggccatcgccacggtccaggccctctaccacggggtcatccctcccacgatcaacctcgaggaccccgaccccgagctggacctggacttcgtccccgagccccgggaggccaaggtggactacgccctctccaactccttcgccttcgggggccacaacgccgtcctggtcttcaagagggtctga

SEQ ID NO: 19851 - protein, 408 aa, Thermus thermophilus HB27
MRRVVVTGLGALTPIGVGQEAFHKAQLAGKSGVRPITRFDASALPVRIAAEVDVDPGAYLDRKELRRLDRFVQYALIAAQLALEDAGLKPEDLDPERVGTLVGTGIGGMETWEAQSRVFLERGPNRISPFFIPMMIANMASAHIAMRYGFTGPSSTVVTACATGADALGSALRMIQLGEADLVLAGGTEAAITPMAIGAFAVMRALSTRNEEPEKASRPFTLSRDGFVMGEGAGVLVLEAYEHAKKRGARIYAELVGFGRSADAHHITEPHPEGKGAALAMARALKDAGIAPEQVGYINAHGTSTPAGDRAEVLAIKRVFGDHAKRLMVSSTKSMIGHLLGAAGAVEAIATVQALYHGVIPPTINLEDPDPELDLDFVPEPREAKVDYALSNSFAFGGHNAVLVFKRV

SEQ ID NO: 19852 - DNA, 1257 bp, Parachlamydia sp. UWE25
  CDS (1)..(1257): transl_table=11
ttgaggaaaatgagcaaaaaacgaattgtcattacaggaatgggtattgtttcatgttttggaaacgatgttgatgctttttatcaaaatcttttagccggtcagagtggtattcaacctatcacagaattcccatgtgaagattatccaacgcgatttgctggaattatccccaattttgaagctggtgagtatttagacaaaaagcaggctcgtcgagtggataaatcgattgcttatacgatggtagcaggaaaaaaatcactagaatcagctaatttaaatgaagaaaacttaaaaagacttcaaaaagaacggtgcggtattttgattggttctggaatgggaggaatgacaatgtttgctgatggagtgcaaacattagttgaaaaaggacctcgaaaagtatctcctttttttgttccttttattttgacaaatatgtgtggggcgttgctgggaatagatattggttttatgggccctaactattctatttcaacagcttgtgctaccgcaaataattcgattatttctgctgctcaacacatcagaaatggagaggctgatttgatgctgtgtggaggtgtagaagcggctgtgatgccgatgggattagcaggtttttgcgcatgtaaagccctttctcaacgaaacgaaaatccagctaaagcttctcgcccttgggatcagggaagagatggtttcgtccttggtgaaggagctggtgttcttgtgatggaaagtttagatcacgctttagctcgagaagcacctattttggctgagtatttaggaggtggattgtcgtgtgatgcttatcatatgacagagccacgttcagacggagagggtgttgctttatgtattcgcagagctttacaggatgcaggaatccaacccgaagagattaattatattaatgctcatgccacttctactcctgcgggagatatggctgaggttaatgccctaaaaaaagtttttaaaaacccttcttcgatcaaaatgaacgcaacaaaatcgatgataggtcacttgttaggcgctgcaggtggggtggaagcaattgcgacaattaaagcgattcttgaacatcaaattcatccaaccattaatttagaaaacccagaacctaatttagaatttgatgtttcatccgaggcgcaacgatttatcgtgaaacgtgcgatttctaattcgtttggctttggaggtcataatgcttctgttatttttgctccttatgaaccctag

SEQ ID NO: 19853 - protein, 418 aa, Parachlamydia sp. UWE25
MRKMSKKRIVITGMGIVSCFGNDVDAFYQNLLAGQSGIQPITEFPCEDYPTRFAGIIPNFEAGEYLDKKQARRVDKSIAYTMVAGKKSLESANLNEENLKRLQKERCGILIGSGMGGMTMFADGVQTLVEKGPRKVSPFFVPFILTNMCGALLGIDIGFMGPNYSISTACATANNSIISAAQHIRNGEADLMLCGGVEAAVMPMGLAGFCACKALSQRNENPAKASRPWDQGRDGFVLGEGAGVLVMESLDHALAREAPILAEYLGGGLSCDAYHMTEPRSDGEGVALCIRRALQDAGIQPEEINYINAHATSTPAGDMAEVNALKKVFKNPSSIKMNATKSMIGHLLGAAGGVEAIATIKAILEHQIHPTINLENPEPNLEFDVSSEAQRFIVKRAISNSFGFGGHNASVIFAPYEP

SEQ ID NO: 19854 - DNA, 1248 bp, Desulfovibrio vulgaris subsp. vulgaris str. Hildenborough
  CDS (1)..(1248): transl_table=11
atgaccggaaagcgcgttgtggtgacgggccttgcagccctcaccccccttggaaatgacatcgaaaccagctgggataaccttgttgccggcaagtccggcatcgggcccatcacccgcttcgacgccacagaatacgcctcgcgtatcgcaggcgaagtgaaggatttcgatcctgagaagttcatgcccgccaagcaggcacgacgcatggaccgcttcgtccagttcgccgttgccaccggcaagatgctcgtagagcattccggcctcgtcatcgacgagagcaacgccgaccgcgtgggcgtgcttctgggcgtggggcttggtggtctcgagaccatcgaggtcttccacaccaaactcatggaggcaggccccaacaaggtctcgccgttcatgatccccatgctcatctccaacatggcaccggggcaggtttcgatattcacaggagccagaggccccaacgtggtcatgacgagcgcatgcgcgtctgccacccatgccatcggctacgccttcagcgagatcaagctgggacgtatcgacgcagccatcaccggcggcgtcgaatcgaccatcacccccatgggtgtctcgggcttcaccgccctgaaggcactctccaccgcgcacaacgactcgcccgagaaggcgtcacgccccttcgacaaggaacgtgacggcttcgtcctcggcgagggaagcggcatgctgatgctcgaatcgctcgattcggccctggcgcgcggtgcgaccatctacgccgaggtcgtcggcttcggtgcgtcgggtgacgcctaccacatgaccgccccccacgaatcaggggatggcatggcgctcgcgatgcgcaatgccgtgagggaagcgggcatacctgtggaagccgtcgaccacatcaacgcccacgccacctcgacccacctcaacgacctgtgcgaaacccgcgccatcaagcaggtcttcggtcagcacgcctacaacatcgccatcacggccaacaagtcgatgacgggccatctgctgggcgcagcaggcggtttggaaagcgtgttcaccgtgctcaccctgcacaggggcatcattcccggcaccatcaaccatgagacgccggaccccgagtgcgacctgaactacatgacggaaggttcgaaggagatgcaggcccactatgcgctgtgcaactcgttcggcttcggcggcaccaacgccagccttctgttcaaacggtacgaagactag

SEQ ID NO: 19855 - protein, 415 aa, Desulfovibrio vulgaris subsp. vulgaris str. Hildenborough
MTGKRVVVTGLAALTPLGNDIETSWDNLVAGKSGIGPITRFDATEYASRIAGEVKDFDPEKFMPAKQARRMDRFVQFAVATGKMLVEHSGLVIDESNADRVGVLLGVGLGGLETIEVFHTKLMEAGPNKVSPFMIPMLISNMAPGQVSIFTGARGPNVVMTSACASATHAIGYAFSEIKLGRIDAAITGGVESTITPMGVSGFTALKALSTAHNDSPEKASRPFDKERDGFVLGEGSGMLMLESLDSALARGATIYAEVVGFGASGDAYHMTAPHESGDGMALAMRNAVREAGIPVEAVDHINAHATSTHLNDLCETRAIKQVFGQHAYNIAITANKSMTGHLLGAAGGLESVFTVLTLHRGIIPGTINHETPDPECDLNYMTEGSKEMQAHYALCNSFGFGGTNASLLFKRYED

SEQ ID NO: 19856 - DNA, 1242 bp, Listeria monocytogenes str. 4b F2365
  CDS (1)..(1242): transl_table=11
atggataagagaagagtagttgttactggtattggagctgttacacctattggaaatgatgcggaaacttcttgggaaaacgcaaaaaaaggtgttaatggtgttgcaaaaatgacaagacttaatccggatgactttccggttaaaattgcagcagaattaaaagattttgatgtagaaaaatatctagagaaaaaagaagctcgtaaaatggaccgttttacgcattatgcaattgcaagtgctgaaatggccgtgcaagactctggtttagttattgatgattccaatgcaaaccgagttggtgtttggattggttcaggaattggtggaatggaaactttcgaaacacaatatgaaattttcttaaatcgcggtcatcgccgagttagcccgtttttcgtacctatgatgattccagatatgggttcaggccaggtttctattcgttttggtgctaaaggcattaattctacaacagttacagcttgtgcaactgcaacaaactcaatcggcgacgcgtttaaagttattgagcgtggagatgctgatgcaatgattactggtggagcagaagcaccgattactaaaatgtcacttgctggttttactgctaataaagctttgtcattaaatccagatccagaaactgcatgccgtccgtttgataaagatcgtgatggttttattattggtgaaggcgcaggtatcgttattttagaagaatacgaacatgcaaaagcacgtggggcaaaaatttacgctgaaatcgttggttacggtgcaacaggagatgcttaccacattactgctccagctccaaacggtgaaggtgctgcgcgcgcaatgaaaatggcgattgatgatgctggccttacccctgataaagtagattacattaatgcccacggaacaagtacaccgtacaatgatgaatacgaaacacaagctattaaaactgtctttggagatcatgcgaaaaaattagcgattagttctactaagtcaatgactggacatactctaggtgcgtctggcggaatagaagctattttcgccctattgactattcgtgataatattattgcaccaacgattcatttgaaaaaccaagatgaagtttgtgacttggattatgttccaaatgaagcacgtgaggcaaatgtaaatgtagtaatttctaactcttttggctttggtggtcacaatgcgactttagtatttaaaagaatagaagactaa

SEQ ID NO: 19857 - protein, 413 aa, Listeria monocytogenes str. 4b F2365
MDKRRVVVTGIGAVTPIGNDAETSWENAKKGVNGVAKMTRLNPDDFPVKIAAELKDFDVEKYLEKKEARKMDRFTHYAIASAEMAVQDSGLVIDDSNANRVGVWIGSGIGGMETFETQYEIFLNRGHRRVSPFFVPMMIPDMGSGQVSIRFGAKGINSTTVTACATATNSIGDAFKVIERGDADAMITGGAEAPITKMSLAGFTANKALSLNPDPETACRPFDKDRDGFIIGEGAGIVILEEYEHAKARGAKIYAEIVGYGATGDAYHITAPAPNGEGAARAMKMAIDDAGLTPDKVDYINAHGTSTPYNDEYETQAIKTVFGDHAKKLAISSTKSMTGHTLGASGGIEAIFALLTIRDNIIAPTIHLKNQDEVCDLDYVPNEAREANVNVVISNSFGFGGHNATLVFKRIED

SEQ ID NO: 19858 - DNA, 1239 bp, Bacillus anthracis str. Sterne
  CDS (1)..(1239): transl_table=11
atggaaaaaaagagggtcgtaattacaggactaggagctgttacaccggtcggtacagatgttgaaacagcgtgggaaaacattaaaaagggtgtatctggaatcggacgacttacaagaattgatccggaactatttccagcaaaagtagcagcagaaattaacgactttgaagtcgagaaatatattgataaaaaagaagcgcgccgtatggatcgctttacacaatatgcagtagcagcagcgaaaatggcagttgcagatgcaaagcttgagattacagaagaaaacggacctcgaattggtgtatggattggttctggtattggcggtatggaaacatacgaagaacaatttaaaatttttactgagaaaggcccgcgccgcgtgagcccattcttcgtaccgatgatgattccagatatggcagcaggccaagtatcaatcgcaacaggagcaaaaggaattaacacttgttctgtaacggcttgtgcatctggtgcaaactcaattggtgatgcatttaaagcgattcagcgtggggatgctgatgcaatgattacgggcggggcagaggcaccgttaacaagtatggcattcgcaggatttagctcagcgaaagcattaacattcaatgaagacccagcaacagcttgccgtccatttgataaaaaccgtagcggtttcgtaatgggtgaaggttcaggtattttaattcttgaagaattagagcacgcattagctcgtggtgctcatatttatgcggaaatcgctggttacggtgcaactggtgatgcattccatattacaatgcctgctcctggcggtgaaggcggcgtgcgcgcaatgcgtcaagctttagcggatgcaggtctacagccagaagatattgattacattaatgcgcatggtacaagtacggatgcgaatgaaaagtatgaaacgatggcaattaaagaaacgttcggtgagcacgcgtataaggtagcgatcagctcaacgaaatcaatgacaggtcacttattaggagcagcaggtgctgttgaagcgatcttctctattaaatcaattacagatggagtaattcctccaacaattaactatgaaacaccagatccagaatgtgacttagattacgtaccaaataacgcgagacatcaagaagtaaacgcagtgttaagtaattcattaggattcggtggtcataacgcagtattagtatttaaatcgtataaataa

SEQ ID NO: 19859 - protein, 412 aa, Bacillus anthracis str. Sterne
MEKKRVVITGLGAVTPVGTDVETAWENIKKGVSGIGRLTRIDPELFPAKVAAEINDFEVEKYIDKKEARRMDRFTQYAVAAAKMAVADAKLEITEENGPRIGVWIGSGIGGMETYEEQFKIFTEKGPRRVSPFFVPMMIPDMAAGQVSIATGAKGINTCSVTACASGANSIGDAFKAIQRGDADAMITGGAEAPLTSMAFAGFSSAKALTFNEDPATACRPFDKNRSGFVMGEGSGILILEELEHALARGAHIYAEIAGYGATGDAFHITMPAPGGEGGVRAMRQALADAGLQPEDIDYINAHGTSTDANEKYETMAIKETFGEHAYKVAISSTKSMTGHLLGAAGAVEAIFSIKSITDGVIPPTINYETPDPECDLDYVPNNARHQEVNAVLSNSLGFGGHNAVLVFKSYK

SEQ ID NO: 19860 - DNA, 1263 bp, Bartonella quintana str. Toulouse
  CDS (1)..(1263): transl_table=11
atgagacgtgttgttgttactggtttaggattggtttctccattagctgctaatgtcgaatatagttggaaacgccttcttgaaagggaaagtggtgttcgacgcattactgaattcgatgtatcggatttaccgtgccagattgctgcgcgtatccccttaggggatggaacaaatggtacatataatgctgatttgcatatggaacccaaggagcagcgtaaggttgatgcatttattgtttatgcaatggctgctgttgaccaagcacttgcagatgctgagtggtttcctaagagtgatgaagatcagatttccacaggtgtgttaattggttcgggtattggtggcattgaaggcattgttgaggcaggttatacgcttcgtgataaaggtccacgacgtgtttctcctttttttattccagggcgtttgattaatcttgcttctggctatgtgtctattaaatatgatttgcgcggccctaatcattcggttgtaacggcttgttcgacaggtgcgcatgccattggtgatgcagcacgtttgattgcgctcggtgatgcagatgtaatgctagcaggtggcactgaatctccgataaatcgaatatctcttgctggttttgctgcttgtagagctctttctacttgtcgtaatgatgatcctgaacgggcgtcacgcccttatgacgttgatcgtgatggttttgtgatgggtgagggagcggcgattgttgttttagaagagcttgaacatgcaaaaagacggggtgcacgtatttatgctgagctgataggttatggcttatcgggtgatgcttaccacattacagcaccttcagagagtggcgaaggtgcgcagcgtagtatgatggctgctctcaagcgtgcacaagtgaatgtgagtgaacttgattacattaatgcccacggtacatcgacgatggctgatgttatagagttggcagctgttgagcgtgttttgggccactatgcagcacaagtgtccatgtcatcaacaaagtcatctgtggggcatttgcttggtgccgcaggtgcagctgaggctattttttgtattttagccatacgagataatatagctccggcgacactcaatcttgataatccatcgattgaaacaaaaatcgatcttgtcccacacaaaccacgcgaacgaaagattgatacgattctttccaattcctttgggtttggtggaacaaatgcatctttagtgatgcgacgtttcaggggataa

SEQ ID NO: 19861 - protein, 420 aa, Bartonella quintana str. Toulouse
MRRVVVTGLGLVSPLAANVEYSWKRLLERESGVRRITEFDVSDLPCQIAARIPLGDGTNGTYNADLHMEPKEQRKVDAFIVYAMAAVDQALADAEWFPKSDEDQISTGVLIGSGIGGIEGIVEAGYTLRDKGPRRVSPFFIPGRLINLASGYVSIKYDLRGPNHSVVTACSTGAHAIGDAARLIALGDADVMLAGGTESPINRISLAGFAACRALSTCRNDDPERASRPYDVDRDGFVMGEGAAIVVLEELEHAKRRGARIYAELIGYGLSGDAYHITAPSESGEGAQRSMMAALKRAQVNVSELDYINAHGTSTMADVIELAAVERVLGHYAAQVSMSSTKSSVGHLLGAAGAAEAIFCILAIRDNIAPATLNLDNPSIETKIDLVPHKPRERKIDTILSNSFGFGGTNASLVMRRFRG

SEQ ID NO: 19862 - DNA, 1263 bp, Bartonella henselae str. Houston-1
  CDS (1)..(1263): transl_table=11
atgaggcgtgttgttattactggtttaggattggtatctccattagctggtgatgtcgagtatagttggaaacgacttcttgaaggaaaaagtggtgttcgacgcattactgaatttgatgtatccgacttatcgtgccagattgctgcgcgtatccccgtaggggatggtacaaatggtacatataatgctgatttgcatatggaatccaaggagcagcgtaaggttgatgcatttattgtttatgcaattgcagccgctgaccaagcacttgcagatgctgagtggtttcccaagagtgatgaagaccagatttgcacaggtgtgttaattggttcgggtattggtggcattgaagggattgttgaggctggttatacgcttcgtgataaaggtccacggcgtatttctcctttttttattccaggacgtttgattaatcttgcttctggttatgtatctattaaatatggtttgcgtggtcctaatcattcggttgtaacggcctgttcaacaggtgcacatgccattggtgatgcagcacgtttgattgcgttgggtgatgcagatgtgatgctagcaggtggcactgaatccccgataaatcgaatatctcttgctggtttttctgcttgtcgagctctttctacttgtcgtaatgatgatcctgaacgggcatcacgtccttatgatgttgatcgtgatggttttgtgatgggggaaggagcagcgattgttgttttagaagagcttgaacatgcaaaaaaacgaggtgctcgtatttatgctgagattattggctatggtctatctggtgacgcttaccacattacagcaccttcagagagtggtgaaggtgcgcagcgtagtatgatggctgctcttaagcgtgcacaagtgaatgtaagcgaacttgattacattaatgctcacggtacatcgacgatggctgatgttatagaattggctgctgttgagcgtgttttgggctattatgcaccacaagtatccatgtcatcaacaaagtcatctataggacatttacttggtgcagctggtgcagctgaggctattttttgtgttttagctatacgagataatatagctccagcaacacttaatcttgaaaatccatcaattgaaacgaaaattgaccttgttccacataaaccgcgcgagcgaaaaattgatacagttctatccaattcttttggatttggtggaacaaatgcgtctttagtgatgcggcgtttttcggaataa

SEQ ID NO: 19863 - protein, 420 aa, Bartonella henselae str. Houston-1
MRRVVITGLGLVSPLAGDVEYSWKRLLEGKSGVRRITEFDVSDLSCQIAARIPVGDGTNGTYNADLHMESKEQRKVDAFIVYAIAAADQALADAEWFPKSDEDQICTGVLIGSGIGGIEGIVEAGYTLRDKGPRRISPFFIPGRLINLASGYVSIKYGLRGPNHSVVTACSTGAHAIGDAARLIALGDADVMLAGGTESPINRISLAGFSACRALSTCRNDDPERASRPYDVDRDGFVMGEGAAIVVLEELEHAKKRGARIYAEIIGYGLSGDAYHITAPSESGEGAQRSMMAALKRAQVNVSELDYINAHGTSTMADVIELAAVERVLGYYAPQVSMSSTKSSIGHLLGAAGAAEAIFCVLAIRDNIAPATLNLENPSIETKIDLVPHKPRERKIDTVLSNSFGFGGTNASLVMRRFSE

SEQ ID NO: 19864 - DNA, 1245 bp, Staphylococcus aureus subsp. aureus MRSA252
  CDS (1)..(1245): transl_table=11
atgagtcaaaatataagagtagttattacaggtatgggagccctttctccaatcggtaatgatgtcaaaacaacatgggagaatgctctaaaaggcgtaaatggtatcgataaaattacacgtatcgatactgaaccttatagcgttcacttagcaggagaacttaaaaactttaatattgaagatcatatcgacaaaaaagaagcgcgtcgtatggatagatttactcaatatgcaattgtagcagctagagaggctgttaaagatgcgcaattagatatcaatgaaaatactgcagatcgaatcggtgtatggattggttctggtatcggtggaatggaaacatttgaaattgcacataaacaattaatggataaaggcccaagacgtgtgagtccatttttcgtaccaatgttaattcctgatatggcaactggacaagtatcaattgacttaggtgcaaaaggaccaaatggtgcaacagttacagcatgtgcaacaggtactaactctatcggtgaagcatttaaaattgtgcaacgcggtgatgcagatgcaatgattactggcggtacggaagctccaattactcatatggcaattgcaggtttcagtgcaagtcgagcgctttctacaaatgatgacattgaaacagcatgtcgtccattccaagaaggtagagacggttttgttatgggtgaaggtgctggtattttagtaatcgaatctttagaatcagcacaagctcgaggtgcaaatatttatgctgagatagttggctatggtactacaggtgatgcttatcatattacagcgccagctccagaaggtgaaggcggttctagagcaatgcaagcagctatggatgatgctggtattgaacctaaagatgtacaatacttaaatgcccatggtacaagtactcctgttggtgacttaaatgaagttaaagctattaaaaatacatttggtgaagcagctaaacacttaaaagttagctcaacaaaatcaatgactggtcacttacttggtgcaacaggtggaattgaagcaatcttctcagcgctttcaattaaagactctaaagtcgcacctacaattcatgcggtaacaccagacccagaatgtgatttggatattgttccaaatgaagcgcaagaccttgatattacttatgcaatgagtaatagcttaggattcggtggacataacgcagtattagtattcaagaaatttgaagcataa

SEQ ID NO: 19865 - protein, 414 aa, Staphylococcus aureus subsp. aureus MRSA252
MSQNIRVVITGMGALSPIGNDVKTTWENALKGVNGIDKITRIDTEPYSVHLAGELKNFNIEDHIDKKEARRMDRFTQYAIVAAREAVKDAQLDINENTADRIGVWIGSGIGGMETFEIAHKQLMDKGPRRVSPFFVPMLIPDMATGQVSIDLGAKGPNGATVTACATGTNSIGEAFKIVQRGDADAMITGGTEAPITHMAIAGFSASRALSTNDDIETACRPFQEGRDGFVMGEGAGILVIESLESAQARGANIYAEIVGYGTTGDAYHITAPAPEGEGGSRAMQAAMDDAGIEPKDVQYLNAHGTSTPVGDLNEVKAIKNTFGEAAKHLKVSSTKSMTGHLLGATGGIEAIFSALSIKDSKVAPTIHAVTPDPECDLDIVPNEAQDLDITYAMSNSLGFGGHNAVLVFKKFEA

SEQ ID NO: 19866 - DNA, 1245 bp, Staphylococcus aureus subsp. aureus MSSA476
  CDS (1)..(1245): transl_table=11
atgagtcaaaataaaagagtagttattacaggtatgggagccctttctccaatcggtaatgatgtcaaaacaacatgggagaatgctctaaaaggcgtaaatggtatcgataaaattacacgtatcgatactgaaccttatagcgttcacttagcaggagaacttaaaaactttaatattgaagatcatatcgacaaaaaagaagcgcgtcgtatggatagatttactcaatatgcaattgtagcagctagagaggctgttaaagatgcgcaattagatatcaatgaaaatactgcagatcgaatcggtgtatggattggttctggtatcggtggtatggaaacatttgaaattgcacataaacaattaatggataaaggcccaagacgtgtgagtccatttttcgtaccaatgttaattcctgatatggcaactgggcaagtatcaattgacttaggtgcaaaaggaccaaatggtgcaacagttacagcatgtgcaacaggtacaaattcaatcggagaagcatttaaaattgtgcaacgcggtgatgcagatgcaatgattactggtggtacagaagcaccaattactcatatggcaattgctggtttcagtgcaagtcgagcgctttctacaaatgatgacattgaaacagcatgtcgtccattccaagaaggtagagatggttttgttatgggtgaaggtgctggtattttagtaattgaatctttagaatcagcacaagctcgaggtgccaatatttatgctgagatagttggctatggtactacaggtgatgcttatcatattacagcgccagctccagaaggtgaaggcggttctagagcaatgcaagcagctatggatgatgctggtattgaacctaaagatgtacaatacttaaatgcccatggtacaagtactcctgttggtgacttaaatgaagttaaagctattaaaaatacatttggtgaagcagctaaacacttaaaagttagctcaacaaaatcaatgactggtcacttacttggtgcaacaggtggaattgaagcaatcttctcagcgctttcaattaaagactctaaagtcgcaccgacaattcatgcggtaacaccagatccagaatgtgatttggatattgttccaaatgaagcgcaagaccttgatattacttatgcaatgagtaatagcttaggattcggtggacataacgcagtattagtattcaagaaatttgaagcataa

SEQ ID NO: 19867 - protein, 414 aa, Staphylococcus aureus subsp. aureus MSSA476
MSQNKRVVITGMGALSPIGNDVKTTWENALKGVNGIDKITRIDTEPYSVHLAGELKNFNIEDHIDKKEARRMDRFTQYAIVAAREAVKDAQLDINENTADRIGVWIGSGIGGMETFEIAHKQLMDKGPRRVSPFFVPMLIPDMATGQVSIDLGAKGPNGATVTACATGTNSIGEAFKIVQRGDADAMITGGTEAPITHMAIAGFSASRALSTNDDIETACRPFQEGRDGFVMGEGAGILVIESLESAQARGANIYAEIVGYGTTGDAYHITAPAPEGEGGSRAMQAAMDDAGIEPKDVQYLNAHGTSTPVGDLNEVKAIKNTFGEAAKHLKVSSTKSMTGHLLGATGGIEAIFSALSIKDSKVAPTIHAVTPDPECDLDIVPNEAQDLDITYAMSNSLGFGGHNAVLVFKKFEA

SEQ ID NO: 19868 - DNA, 1242 bp, Erwinia carotovora subsp. atroseptica SCRI1043
  CDS (1)..(1242): transl_table=11
gtgtctaagcgtcgagtagttgtgaccggactgggcatgttatctcctgtcggcaatacagttgagtctacctggagtgctcttcttgccggtcagagtggtatcagcctgatcgaccatttcgatactagtgcctacgcaacgcgttttgctggcttagtaaagaattttaattctgaggaattcatttcgcgtaaagaagcacgcaaaatggatgcctttattcaatatggtgttgctgctggcgttcaggctatgcaggactccggtttggaagtaacggaagaaaacgctccgcgtatcggtgcggcgattggttccggcatcggcggtctgggtcttattgaagagaaccacactgcgctggtgaacggtggcacgcgtaaaatcagcccgttcttcgtaccgtcaaccatcgtcaatatggtggctgggcatcttactatcatgttcggactgcgtggccccagcatttctatcgctactgcctgtacgtctggcgtgcataatattggccatgccgcacgtatcattgcctacaacgatgcggatgtgatgttggccggtggtgcagaaaaagccagtacgccattaggcgtcggtggattcggtgccgctcgtgcattgtctacgcgcaatgacgatcctcaggcggcaagccgtccgtgggataaagatcgtgatggttttgtactgggcgacggcgctggcctcatggtgctggaagagtatgaacacgcgaaaaagcgcggtgcgaaaatctatgcagaaattgttggatttggcatgagcagcgatgcgtatcatatgacgtctccgccggaggacggttcaggcgccgcgctggcgatggagaacgcactgcgtgatgctggtgtatcaacgagccagatcggttatatcaacgcgcatggcacttctacgcctgcgggtgataaagctgaaacacaggccgtgaaatccgtgtttggtgcggacgccagtcgtgtactggttagctcgacaaaatccatgacgggtcacttgttgggtgcagcaggcgcggtggagtcaatcttcagtattcttgctctgcgcgatcaggctgttccgccaacgctcaacctggataatccagatgaaggctgcgatctggattttgtgccgcatgaggcgcgtcaggtcagcaatctggaatacgtactctgcaactctttcggtttcggtggaaccaacggttctctgatcttccgtaaagtttga

SEQ ID NO: 19869 - protein, 413 aa, Erwinia carotovora subsp. atroseptica SCRI1043
MSKRRVVVTGLGMLSPVGNTVESTWSALLAGQSGISLIDHFDTSAYATRFAGLVKNFNSEEFISRKEARKMDAFIQYGVAAGVQAMQDSGLEVTEENAPRIGAAIGSGIGGLGLIEENHTALVNGGTRKISPFFVPSTIVNMVAGHLTIMFGLRGPSISIATACTSGVHNIGHAARIIAYNDADVMLAGGAEKASTPLGVGGFGAARALSTRNDDPQAASRPWDKDRDGFVLGDGAGLMVLEEYEHAKKRGAKIYAEIVGFGMSSDAYHMTSPPEDGSGAALAMENALRDAGVSTSQIGYINAHGTSTPAGDKAETQAVKSVFGADASRVLVSSTKSMTGHLLGAAGAVESIFSILALRDQAVPPTLNLDNPDEGCDLDFVPHEARQVSNLEYVLCNSFGFGGTNGSLIFRKV

SEQ ID NO: 19870 - DNA, 1290 bp, Erwinia carotovora subsp. atroseptica SCRI1043
  CDS (1)..(1290): transl_table=11
atgacgctaacaagtcataagcgaatagtggtaaccggctgcggcattatcagtcctctggggtgcggtacagatatagtctggcgcaggctgctggaggggcgatcgggcataagaacgcttcctgctgatatcagcgacggcacgggtatttccgtagcagggcaggtccctgggctttcggatgaccctgaagcaggttatgaaccagagcgttttataccggccaaagagcgcaagaaaatggatcgcttcatagaatttgcccttatcgccgctcaggaggctgtgacgcaggcaggctggcacccagctaatgaacacgagcggcagcggacggcgacaattatcgcatcgggagtggggggatttggtgccattgctgaagcggttcgcactaccgatacgcgcggtccccgacggttgtcaccattcaccgcgccctcatttctggccaatatggcagcaggccaagtctcgatccagcagggtttcaggggaccattgggcgcgcccattacagcatgtgcagctggtgtgcaggcgattggtgatgcggcccgccttatcagaaacggagaagcggacattgccatttgtggtggcacagaagccgctattgatcgtgtcacgctaggctgctttgctgctgcacgtgcgctttctaccggatttgcagataagccagaagaagcatcgcggccttttgatcgtgatcgagacgggtttgttatggcggaaggtgctggattattagtgattgaatcccttgagcatgcattggctcgtggtgctacgccactggcagaattagtgggatatggcaccagtgccgatgcatggcatctgaccgctgggccagaagacggtagcggtgcccgacgggcgatggaattggctttaggccaggctgggatcaatgcggatgagatacaacacatcaatgcccatgcgacatcgactcaggtaggtgacagaggggaactggcggcgattcggtcagtgtttggtagtgaatcaggcgtggcagtcagttcgaccaaatcagctaccggccatcttctgggcgcggcaggtggcattgaagcgatatttactgtgcttgccctgcgtgaccaggttattccgcccacgctaaacctgcgtaacccggacgaggcaggacgcggcttggatcttgtcgcgttaaaggcacgttacgctacgataacgtatgccttatccaacggtttcggtttcggcggcgttaatgcaagtgtgctttttcgccgatgggagacgacgccatga

SEQ ID NO: 19871 - protein, 429 aa, Erwinia carotovora subsp. atroseptica SCRI1043
MTLTSHKRIVVTGCGIISPLGCGTDIVWRRLLEGRSGIRTLPADISDGTGISVAGQVPGLSDDPEAGYEPERFIPAKERKKMDRFIEFALIAAQEAVTQAGWHPANEHERQRTATIIASGVGGFGAIAEAVRTTDTRGPRRLSPFTAPSFLANMAAGQVSIQQGFRGPLGAPITACAAGVQAIGDAARLIRNGEADIAICGGTEAAIDRVTLGCFAAARALSTGFADKPEEASRPFDRDRDGFVMAEGAGLLVIESLEHALARGATPLAELVGYGTSADAWHLTAGPEDGSGARRAMELALGQAGINADEIQHINAHATSTQVGDRGELAAIRSVFGSESGVAVSSTKSATGHLLGAAGGIEAIFTVLALRDQVIPPTLNLRNPDEAGRGLDLVALKARYATITYALSNGFGFGGVNASVLFRRWETTP

SEQ ID NO: 19872 - DNA, 1272 bp, Propionibacterium acnes KPA171202
  CDS (1)..(1272): transl_table=11
atgagcgacgtcgtcatcactggtttcgggaccaccacaccgttgggacccgacgcccctagcacctggcaggggctgctggaagggcgaaacggggtacacaccctcgacttcgactggattgacgacgttcccgtcaaattcgccgcaccggcggtcgatgatccggccaaccacctgccccgtccacaggctcgccgtctagaccgctcaagccagctggcccttgtcgctgccaaggaggcctgggccgacgccggcctggagcttcccgaagccgacgacaactccggttccaacggcatcgaccccgaacgcttggtggtgtgctgcgctaccggtattggtggcctgcactctttgctcggccagtgggacattcagaaagacaagggcttcaaacgggttagtccctttaccgtcccgatgctaatggccaatgcaccggcggccaatattggcttgatggtgcatgccaaggccggcgtccatacccccgtttcggcttgcgcttcatcttccgaagcaatctcgctcggcctggatcagcttcatctggggcgagccgatattgccgtcgtcggcggcgccgaggccatcatccatccgttgccggtggccgctttcgcccaaatgaaagccttgtcgactcgcaacgacgatcctgagcacgcttcacgtccatgggacgttgatcgtgacggcttcgtcatcggcgagggagcggcgatcatggtcattgagacactcgagcatgctcaagcccgcggggcaaagatctacggcactcttgccggatccggtatttcggctgattcgcacgatatcgttcagccagatcccactggttccggccaggcatccgcgatgcacaaggctcttgcatccgccgggctatccccctccgacgtcaaccacgtcaacgcccacgccacctcgaccccactcggtgacactgcggaggcccactccatcgccgcggtcctagagaaagccactgaccaggtgcttgtcaacggcaccaagtcgatgacgggacacctgttaggtggagctggggctttggaatccttcgcagcggtgatggccctactgaagcgtcaggtgcctggcaccatcaacgtcgaacacctcgaagagggcttggaaatcaacgtcgtcaccgagacgaccgacctacccgacggtgatctggctgctcttaataactctttcgggttcggagggcacaacgtcaccttggcgttcactaacaccaacgccactcgctga

SEQ ID NO: 19873 - protein, 423 aa, Propionibacterium acnes KPA171202
MSDVVITGFGTTTPLGPDAPSTWQGLLEGRNGVHTLDFDWIDDVPVKFAAPAVDDPANHLPRPQARRLDRSSQLALVAAKEAWADAGLELPEADDNSGSNGIDPERLVVCCATGIGGLHSLLGQWDIQKDKGFKRVSPFTVPMLMANAPAANIGLMVHAKAGVHTPVSACASSSEAISLGLDQLHLGRADIAVVGGAEAIIHPLPVAAFAQMKALSTRNDDPEHASRPWDVDRDGFVIGEGAAIMVIETLEHAQARGAKIYGTLAGSGISADSHDIVQPDPTGSGQASAMHKALASAGLSPSDVNHVNAHATSTPLGDTAEAHSIAAVLEKATDQVLVNGTKSMTGHLLGGAGALESFAAVMALLKRQVPGTINVEHLEEGLEINVVTETTDLPDGDLAALNNSFGFGGHNVTLAFTNTNATR

SEQ ID NO: 19874 - DNA, 1233 bp, Streptococcus pyogenes MGAS10394
  CDS (1)..(1233): transl_table=11
atgacatttaaaagagtagtggtaacaggttatggtctaacatctccaatcgggcatgatcctgaaacgttttggaacaatctgaaagctggccaaattggtattggtcctattactaaatttgacacgactgattatgcagtcaagaatgctgctgaaattcaggattttccatttgacaaatactttgtgaaaaaagatttgaaccgtttcgatagatattctctttatgctctttatgcagcgaaagaggctattaatcatgctgatttaaatattgagatgattgattccgatcgatttggcgttattgttgcttcaggtattggtggaattgcggagattgaagagcaggtgattcgcttacatgaaaaagggccaaaacgtgtgaagccaatgacgttgccaaaagcgctaccaaatatggctgcaggaaatgtcgccatgtctttaaaagctcaaggagtatgtaaatcaattaatactgcctgcgcttcttcaaatgatgcgattggggatgcctttcgtgccattaaatttgggactcaagatgtgatgatagttggtgggtcagaggcggccataaccaagtttgccattgctggcttccaaagtttaacagctctctcaacaactgaagatccaagcagaagctctattccatttgataaagaccgaaatggttttatcatgggagaaggatcaggaatgcttgttttagaaagcctagaacatgcgcaagaacgcggggcgacaatcttagcagaaattgtgggttatggaaatacctgcgatgcctaccatatgacatctccaaatcctgagggattaggagctcgtaaagccatccacttagccttacaagaagctggtattgaagccagtgctattaattatgtcaatgcgcacggaacttcaaccccagctaatgaaaaaggagaaagtcaagcaattgtagccgttcttggtaaggatgttccggtgtcttcaacaaaatcgtttacgggtcaccttcttggagcagcaggcgctattgaagctattgccactatcgaggctatgcgtcataactatgttccgatgacggctgggacacaagctttatcagaggatatcgaagcaaatgtcatctttggagaaggaaaagaaacagctatcaactatgccatttcaaatacttttggatttggtggtcataatgctgtattagctttcaaatgttgggaggagtag

SEQ ID NO: 19875 - protein, 410 aa, Streptococcus pyogenes MGAS10394
MTFKRVVVTGYGLTSPIGHDPETFWNNLKAGQIGIGPITKFDTTDYAVKNAAEIQDFPFDKYFVKKDLNRFDRYSLYALYAAKEAINHADLNIEMIDSDRFGVIVASGIGGIAEIEEQVIRLHEKGPKRVKPMTLPKALPNMAAGNVAMSLKAQGVCKSINTACASSNDAIGDAFRAIKFGTQDVMIVGGSEAAITKFAIAGFQSLTALSTTEDPSRSSIPFDKDRNGFIMGEGSGMLVLESLEHAQERGATILAEIVGYGNTCDAYHMTSPNPEGLGARKAIHLALQEAGIEASAINYVNAHGTSTPANEKGESQAIVAVLGKDVPVSSTKSFTGHLLGAAGAIEAIATIEAMRHNYVPMTAGTQALSEDIEANVIFGEGKETAINYAISNTFGFGGHNAVLAFKCWEE

SEQ ID NO: 19876 - DNA, 1263 bp, Leifsonia xyli subsp. xyli str. CTCB07
  CDS (1)..(1263): transl_table=11
atgttcctactacacggagttgccgttatgaccaagaagatcgtgatcaccgggctcggagcgtcctcgccgctcggtggcaccgctccggaaagctgggccgcgctgctggccggcgagtccggagcccgttcgctcacccacgactgggtcaccgagctggaactgccgatcaccttcgccgccgaagccaaggtacggccgtccgccgtgctcgagcgcccggtcgcgaagcggctggacccttccagccagtttgcgctggtctccgcgatggaggcctgggccgatgcgggctccccccgggtggccccggaacgcctcggcgtcgactacgccacgggcatcggcggcgtgtggaccctgctggacgcctgggacacgctgcgcgagcgcgggccacgccgtgttctgccgatgaccgtcccgatgctcatgccgaatgcggccgcagccgccgtctccatgcacttcgaggcgcgcgcgttcgcccgcaccgtcgcttccgcctgcgcgtcgagcaccgagtcgctcgtcaacgcttacgagcacttgcaggccgggctggccgacatcgtgatcaccggcggcagcgagtcggccatccacccgatcacgctcgcgtcgttcgcctccatgcaggccctctcgcgccgcaacgacgaccccgccaccgcttcccggccctatagtatcgaccgggacggcttcgtgatgggcgagggcgcggcgagcctcgtgctcgagaccgagaagcatgcgttcgcccgcggcgcccgtatctacgcggaagtcgtcggcggcggtgtaacggcggattcgtaccacatcaccgcgaacgaccccgagggccgcggcgccagccgggctgtgcggatggcgctggagcaggcgggcgcctcgcccgatgaggtgacgcacatcaatgcgcacgcgacgagcacgccggtcggcgacccgtcggagtatgtggctctgcgcgaggtcttcggcgaccgcgtccacagtgtcccggtctccgccaccaaagcgtcaacgggccatttgctcggcggaaccggtgcgctggaagctgtgttcaccgtcctcgcgctgcgcgatcgcatcgccccgccgacgatcaacatcacggagatggacccggccatcccgttgcaggtctcgggcgagtcccagccgctcggcaacggtccgcagctcgccatcagcaactcgttcggcttcggcggccacaacgccgtcgtcgccatccgctcggtctga

SEQ ID NO: 19877 - protein, 420 aa, Leifsonia xyli subsp. xyli str. CTCB07
MFLLHGVAVMTKKIVITGLGASSPLGGTAPESWAALLAGESGARSLTHDWVTELELPITFAAEAKVRPSAVLERPVAKRLDPSSQFALVSAMEAWADAGSPRVAPERLGVDYATGIGGVWTLLDAWDTLRERGPRRVLPMTVPMLMPNAAAAAVSMHFEARAFARTVASACASSTESLVNAYEHLQAGLADIVITGGSESAIHPITLASFASMQALSRRNDDPATASRPYSIDRDGFVMGEGAASLVLETEKHAFARGARIYAEVVGGGVTADSYHITANDPEGRGASRAVRMALEQAGASPDEVTHINAHATSTPVGDPSEYVALREVFGDRVHSVPVSATKASTGHLLGGTGALEAVFTVLALRDRIAPPTINITEMDPAIPLQVSGESQPLGNGPQLAISNSFGFGGHNAVVAIRSV

SEQ ID NO: 19878 - DNA, 1245 bp, Desulfotalea psychrophila LSv54
  CDS (1)..(1245): transl_table=11
gtgaagcgtagagttgttgtcaccggtgtgggtcttgttacgcctcttggtacgggggttgagaaaacctgggaaaatttgtgtgcaggaaagagtggtattgatactattacgcgttttgatacgagtgactttgccgttaaaattgctgctgaagtaaaagatttccaggcagaagatttttttgataaaaaatcagccaaacatatggatctttttgctcaatatggtgtggcagctgctgttatggccctgaaagacagtggctttgagataactgaggaaaattgtgagcgggtaggtgttattaccggttgtggtatgggaagtttgcctatgattgaaaaatatcatcaggtgtttatggagaagggaccgcgtaaaatttctccattttttatccccatggccatccctaatatgccttcaggccatatatctatgcgaattggggctaaagggccaaatcttgctctgaccacagcctgtgcggctggaactcatgccgtgggtgaagcctttaatgcggtgagctcaggtaagtgccttgctattgttgctggtggaactgaatccgttatctgtcctacagggattggggggtttaccgcccttaaggctctgtcgaccagaaatgatgatcctgctgcttcctcccgtccctttgacaaggaccgtgatggttttgttatggcagagggtgcaggaatgcttatcctcgaagattatgaacacgccattgccagaggtgctcggatttatgctgagatggcgggttatggtttgagcagtgatgcatatcatataacagcccctccggaagatggagagggtggcgctcgggcaatgaagatggccattgaagatgcaggttttcagccagaggatattgattatatcaatgcccatggtacatcgactcccctgaatgatcgttgtgaaactcgggcaataaagagtgtttttggagaacatgcgtataagcttgccattagttcgacaaaatcaatgcttggccatatgcttggggcaacaggtggtgttgaagctgtcttgacagctctgagccttgataagcaatttgttttgccaacgattaatttgcaggagccaagtcctgagtgtgacttggattatactcctaatgttggtcgttcgatgaagatgcgtgccgcaatctccaactcttttggttttggtggtaccaatgctgttgtggcaatgaagcagtatattggtgagtag

SEQ ID NO: 19879 - protein, 414 aa, Desulfotalea psychrophila LSv54
MKRRVVVTGVGLVTPLGTGVEKTWENLCAGKSGIDTITRFDTSDFAVKIAAEVKDFQAEDFFDKKSAKHMDLFAQYGVAAAVMALKDSGFEITEENCERVGVITGCGMGSLPMIEKYHQVFMEKGPRKISPFFIPMAIPNMPSGHISMRIGAKGPNLALTTACAAGTHAVGEAFNAVSSGKCLAIVAGGTESVICPTGIGGFTALKALSTRNDDPAASSRPFDKDRDGFVMAEGAGMLILEDYEHAIARGARIYAEMAGYGLSSDAYHITAPPEDGEGGARAMKMAIEDAGFQPEDIDYINAHGTSTPLNDRCETRAIKSVFGEHAYKLAISSTKSMLGHMLGATGGVEAVLTALSLDKQFVLPTINLQEPSPECDLDYTPNVGRSMKMRAAISNSFGFGGTNAVVAMKQYIGE

SEQ ID NO: 19880 - DNA, 1281 bp, Rickettsia typhi str. Wilmington
  CDS (1)..(1281): transl_table=11
atgtcaaatcaaaacataaataaaagagtagttattactgggcttggacttgttactcctgttgggcttaatgttaactcatcttggaaaaatattgtagatggagtaagtggtataaaaactattacagaatttgacacttctaaacttgcgtgtaaaattgctggagttatagatatttctgagcacgatggatttaaactagaaaattttacacaagcagatgatattaatagactaagtaaaatggataaatttatccattatgggatagcagctgcaaccgaagcagttgaagatagcggatggttacctgaagatgaaaaatctcgtgatagaacaggcctgatattaggttcaggaatcggtgggcttaaaatgattgaagatacctctattaaactttataaagaaaataacggcaaagttagtcctttctttattccagcatcattaattaaccttttatcaggtcttgtttctataaaatacggttttagtggcccgaatcaagcagcagtaacagcgtgctctacaggtgcacatgctataggtgatgcgatgcgtatgataaagcatggttatgccgatgttatgatcgcaggtggtgcagaagctccagttacacctgtcggagttgcaggtttcgttgctgctagagcattatgtactaaatataacgataatcctgaaaaagcctcaagaccttgggataaaggtcgaagtggttttgtgatgggtgaaggagcaggcattgtagtcttagaagaatatgaacatgcagtaaatcgtggagctaaaatttattgtgaagttatagggtacggctctacaggtgatgcataccatatgaccgctccacatcctcaaggtagaggagcttatagagcaatgagtgaagcgttacaagatgctggtatcaatcctagtatgattgattatattaatgcacacggtacttctactactcttggagacatgatcgaattagaagctacacaaaaattatttttagaatcgaatcccaaaattctaatgtcttctactaaatcatcaataggacatttgcttggtgcagcaggaagtgttgaatttatattttcagttcttacaattcgagatcagattgcaccaccaaccttaaacttagaaaaccctatggatgatgttaaaatagatttagtaaaattaaaagctagagaaactgtggtagattacgtattatctaattcttttggcttcggtggtaccaatgctagcttagtcattaagaggatttaa

SEQ ID NO: 19881 - protein, 426 aa, Rickettsia typhi str. Wilmington
MSNQNINKRVVITGLGLVTPVGLNVNSSWKNIVDGVSGIKTITEFDTSKLACKIAGVIDISEHDGFKLENFTQADDINRLSKMDKFIHYGIAAATEAVEDSGWLPEDEKSRDRTGLILGSGIGGLKMIEDTSIKLYKENNGKVSPFFIPASLINLLSGLVSIKYGFSGPNQAAVTACSTGAHAIGDAMRMIKHGYADVMIAGGAEAPVTPVGVAGFVAARALCTKYNDNPEKASRPWDKGRSGFVMGEGAGIVVLEEYEHAVNRGAKIYCEVIGYGSTGDAYHMTAPHPQGRGAYRAMSEALQDAGINPSMIDYINAHGTSTTLGDMIELEATQKLFLESNPKILMSSTKSSIGHLLGAAGSVEFIFSVLTIRDQIAPPTLNLENPMDDVKIDLVKLKARETVVDYVLSNSFGFGGTNASLVIKRI

SEQ ID NO: 19882 - DNA, 1275 bp, Yersinia pseudotuberculosis IP 32953
  CDS (1)..(1275): transl_table=11
atgagtacacgccatgtagtaattacaggtatgggtgtcgtttccccattaggctgcggtatcgaaacggtctggcaacggctcttggcagggcaatcaggcatccgtgttctatcggatgaaattgtcggtgacttgcccgctaaaattggtgggcaagtgcctacgttagcagaagacgctaaagctggtttcgatccagataaagcggttaccccaaaagatcaaaagaaaatggatcgctttattgagtttgcgatggcggcggccgatgaggcaattagccaggcaggctggcatgcggataacacagagaaacaagagcgtaccgcgacaatcataggcgcgggtattggtggttttccggccattgcccatgcagtgcggacttccgacagccgtgggccaaaacgcctctcaccgtttactgtcccttcattcttagtgaatttggccgctggccatgtttctatcaaacatcattttaaaggcccgattggcgcaccagtcactgcctgtgctgccggtgtacaggcaatcggtgacgccgtgcggatgatccgcaacaatgaagcagatgttgccctgtgcggtggcgcagaagccgtgatcgataccgtgagtctggccggttttgctgccgctcgtgcgttatcaacccactttaatagcacaccagaaaaagcctcccgccccttcgacactgcccgtgacggttttgtgatgggagaaggtgctggtttactgattattgaggagttggagcatgctttagccagaggcgcgaagccactagcagaaatagtcggctatggtaccagtgccgatgcttaccatatgacctctggcgctgaggatggcgacggggcctatcgcgccatgaaaatcgctttgcgtcaggccggtattacgcccgagcaagttcagcatctgaatgcccacgcgacctcaacaccggtaggtgatctcggtgaaattaatgccattaaacatttgtttggcgagagtaatgcgttagcgattacctcaacaaaatccgccacagggcacctgttgggcgctgctggtgggctggaaaccattttcactgtactggcattgcgtgatcaaatcgtgcccgcaacgttgaatctggaaaatccagatcctgcagccaagggactcaacattattgcaggtaacgcacaacctcatgacatgacgtatgccctttccaatggttttggctttggtggggtgaacgcaagtatcttactgaaacgctgggtggactaa

SEQ ID NO: 19883 - protein, 424 aa, Yersinia pseudotuberculosis IP 32953
MSTRHVVITGMGVVSPLGCGIETVWQRLLAGQSGIRVLSDEIVGDLPAKIGGQVPTLAEDAKAGFDPDKAVTPKDQKKMDRFIEFAMAAADEAISQAGWHADNTEKQERTATIIGAGIGGFPAIAHAVRTSDSRGPKRLSPFTVPSFLVNLAAGHVSIKHHFKGPIGAPVTACAAGVQAIGDAVRMIRNNEADVALCGGAEAVIDTVSLAGFAAARALSTHFNSTPEKASRPFDTARDGFVMGEGAGLLIIEELEHALARGAKPLAEIVGYGTSADAYHMTSGAEDGDGAYRAMKIALRQAGITPEQVQHLNAHATSTPVGDLGEINAIKHLFGESNALAITSTKSATGHLLGAAGGLETIFTVLALRDQIVPATLNLENPDPAAKGLNIIAGNAQPHDMTYALSNGFGFGGVNASILLKRWVD

SEQ ID NO: 19884 - DNA, 1242 bp, Yersinia pseudotuberculosis IP 32953
  CDS (1)..(1242): transl_table=11
gtgtctaagcgtcgagttgttgtgactggactgggcatgttgtctcctgtcggtaatacagtcgaatccacatggaaagctgttcttgccgggcagagtggcatcagcctgatcgaccatttcgatactagtgcctacgcaacgcgatttgctggcttagtaaaagattttaattgtgaagattacatttcgcgtaaagatgcacgcaaaatggatgctttcattcagtacggtgttgctgctggcatgcaagctatgcaagacgccgggcttgacattacagaagccaacgcttcccgtattggtgccgctatcggttctggtattggcgggctgggtctgattgaagaaaaccacaccgcattggtgaacggtgggccacgtaaaattagcccattctttgtgccttcaaccattgtgaacatgattgctggtcatctgactatcatgtatggcctgcgtggaccaagcatatctattgctaccgcttgtacttctggcgtacataatatcggtcacgcggcacgtatcattgcttataatgatgctgatgtcatggtggctgggggggctgaaaaagccagtacaccactaggtgtcggcggttttggtgcagcccgcgcattgtctacccgtaacgataacccacaagcagcaagtcgcccgtgggataaagaccgtgatggtttcgttctgggtgatggtgccggcatgatggtgttggaagagtacgaacacgcgaagaagcgtggtgcaaaaatctatgctgaagttgttggttttggtatgagcagcgatgcctaccatatgacctctccgccggaagacggttcaggagccgctttggccatggtgaatgcattacgtgatgctggcatcacaacctcgcaaattggttatattaatgcccacggcacatcaactcctgctggcgataaagccgaaacgcaggccgttaagtctgtatttggtgaagatgcctataaagttatggtcagttccaccaaatccatgactgggcacttattgggtgcagctggtgccgtagagtctatctttaccgtgttggcgctgcgtgatcaggctattcctgcaacgatcaacttggataacccagatgaaggttgcgatttggattatgttccgcatgatgcgcgtcaagtaaaagatatggaatacaccctgtgtaattcctttggtttcggcggcactaacggctctttggtattccgtaaggtataa

SEQ ID NO: 19885 - protein, 413 aa, Yersinia pseudotuberculosis IP 32953
MSKRRVVVTGLGMLSPVGNTVESTWKAVLAGQSGISLIDHFDTSAYATRFAGLVKDFNCEDYISRKDARKMDAFIQYGVAAGMQAMQDAGLDITEANASRIGAAIGSGIGGLGLIEENHTALVNGGPRKISPFFVPSTIVNMIAGHLTIMYGLRGPSISIATACTSGVHNIGHAARIIAYNDADVMVAGGAEKASTPLGVGGFGAARALSTRNDNPQAASRPWDKDRDGFVLGDGAGMMVLEEYEHAKKRGAKIYAEVVGFGMSSDAYHMTSPPEDGSGAALAMVNALRDAGITTSQIGYINAHGTSTPAGDKAETQAVKSVFGEDAYKVMVSSTKSMTGHLLGAAGAVESIFTVLALRDQAIPATINLDNPDEGCDLDYVPHDARQVKDMEYTLCNSFGFGGTNGSLVFRKV

SEQ ID NO: 19886 - DNA, 1242 bp, Symbiobacterium thermophilum IAM 14863
  CDS (1)..(1242): transl_table=11
atggagcgacgggtagtggtcaccggcatggggctgatctcgcccctgggcaacagcgtccgggccaactgggaggcggcggtggcgggccgctcaggcatcggcccgatcacccgcttcgacgcctcccgcctgccgacccggttcgccggcgaggtgcgcgacttcgaccccgcgacggtgatggaccccaaggaggtccggcggtacgatcccttcatccactacgccctggccgcggccgcggaggcggtggaggacgcgggcctcaccttcgagggcgagctggccgagcgcaccggcgtcgtgttcggcagcggcatgggcggtctggagggcatcgtggagaacgccctgatcctgcaggagcggggcccccggcggatctcgccgttcttcgtcccgcgctgcatcatcaacagcgccgccggcctgatctcgatgaagtacggcgtgcatgggcccaactacgggacggtgtccgcctgtgcctcggcgggccacgccatcgccgacgcgatgcacatcatccgtcgcggcgacgccgacgtcatgatcaccggcggcagcgaggcgaccatcacggagctggcgtttgccggcttcagctccgccaaggcgctctccacccggaacgacgacccccagggcgcctcccgcccgtttgacgcggaccgggacggctttgtcatgagcgagggcgcgggctgcctggtgctggaggagctggagcacgccaggcggcggggcgcccggatctacgccgaactggccggcgccggcatgtcgggggatgcgtaccacatcaccgcgccgcacccggagggccggggcgcggtcctggcgatgaagggcgccctgcgcagcgcccggctgaacccggaggacgtgggctacatcaacgcgcacgccacctccaccgacctgggcgacgtgcaggagagcctggcgatcgagcaggtcttcggcgatcacgcccggaagctggccgtctccggcaccaagtcgatgcacggccacctcctgggggcggcgggggccatcgaggcgatcctgaccgtgctctcgctgtaccaccaggtgctgctgccgaccatcaacctgcacaggcccgacccggagtgccgcttggactacgtgccccacacggcccgggaggtccgcggtgtggaggctgccctctgtaacaacttcggcttcggcggcaccaacgtgtcgctcgcgttccgccgctttgtctag

SEQ ID NO: 19887 - protein, 413 aa, Symbiobacterium thermophilum IAM 14863
MERRVVVTGMGLISPLGNSVRANWEAAVAGRSGIGPITRFDASRLPTRFAGEVRDFDPATVMDPKEVRRYDPFIHYALAAAAEAVEDAGLTFEGELAERTGVVFGSGMGGLEGIVENALILQERGPRRISPFFVPRCIINSAAGLISMKYGVHGPNYGTVSACASAGHAIADAMHIIRRGDADVMITGGSEATITELAFAGFSSAKALSTRNDDPQGASRPFDADRDGFVMSEGAGCLVLEELEHARRRGARIYAELAGAGMSGDAYHITAPHPEGRGAVLAMKGALRSARLNPEDVGYINAHATSTDLGDVQESLAIEQVFGDHARKLAVSGTKSMHGHLLGAAGAIEAILTVLSLYHQVLLPTINLHRPDPECRLDYVPHTAREVRGVEAALCNNFGFGGTNVSLAFRRFV

SEQ ID NO: 19888 - DNA, 1239 bp, Bacillus licheniformis ATCC 14580
  CDS (1)..(1239): transl_table=11
atgaatagtaaaagagtagtcattaccggattaggagctttatcacctcttggtaatgacgtcaaaacaagctggaacaacgcgatcaacggggtttccggagtcggcccgataacaagggtgaacgcggacgagtatcctgctaaagtagccgcagaactgaaagattttaagatagaagattatatggataaaaaagaagcgagaaaaatggaccgcttcacacaatatgccgttgtgtcggcgaaaatggccgtggaagacgcgggcctcgacattaacgaaagcaacgcagaccggatcggcgtctgggtcggttccggaatcggcggccttgaaacgcttgaacagcagttcgaaacatttttaacaaaaggaccgcggcgcgtcagcccgttctttgtaccgatgatgattcctgatatggcgaccggccagatttcgatctctctcggtgcaaaaggggtcaactcttgtacggtgacggcttgcgcgacgggtacaaactcaatcggcgacgctttcaaggtcattcagcgcggcgatgccgatgtcatgatctccggaggaacggaagccccgcttacaagaatgtcatttgccggcttttcagccaataaagcgctatccactaatccggatccgaaaacggcaagccgtccgtttgacaaaaaccgcgacggcttcgtcatgggagaaggagctggaatcgtcgttcttgaggagcttgagcacgccttaaaccgcggagcgacaatctacgcggaagtggtcggctacggatcaacgggagacgcctatcatattacggcacctgcgccaaatggagaaggcggcgtcagagccatgaaagaagcgatcaaagatgcgggtctgtcccctgtggacattgattatatcaatgctcatggaacaagcacgccgtacaatgataaatttgaaacgatcgccattaaagaagtgttcggagagcatgcctacaagcttgccgtcagctcgacaaaatcgatgacagggcacttgctcggggctgccggaggcatcgaagcgattttctccgtccttgccattaaggaaggcatcattcctccgacaatcaatatcgaaacgcctgatgaagattgcgatctggactatgtaccggatcaagcccgccgccaggacgtgaatgttgtgctcagcaactcgcttggtttcggcggacacaacgcaacgctgatcttcaaaaaatatgaataa

SEQ ID NO: 19889 - protein, 412 aa, Bacillus licheniformis ATCC 14580
MNSKRVVITGLGALSPLGNDVKTSWNNAINGVSGVGPITRVNADEYPAKVAAELKDFKIEDYMDKKEARKMDRFTQYAVVSAKMAVEDAGLDINESNADRIGVWVGSGIGGLETLEQQFETFLTKGPRRVSPFFVPMMIPDMATGQISISLGAKGVNSCTVTACATGTNSIGDAFKVIQRGDADVMISGGTEAPLTRMSFAGFSANKALSTNPDPKTASRPFDKNRDGFVMGEGAGIVVLEELEHALNRGATIYAEVVGYGSTGDAYHITAPAPNGEGGVRAMKEAIKDAGLSPVDIDYINAHGTSTPYNDKFETIAIKEVFGEHAYKLAVSSTKSMTGHLLGAAGGIEAIFSVLAIKEGIIPPTINIETPDEDCDLDYVPDQARRQDVNVVLSNSLGFGGHNATLIFKKYE

SEQ ID NO: 19890 - DNA, 1221 bp, Mannheimia succiniciproducens MBEL55E
  CDS (1)..(1221): transl_table=11
atgaaaagagcagtgattacaggttttggtgtaatttcaagcatcggtaataataaagaagaagttttagcttctttaaaagcaggtaaatcaggaattgaaatcgtaccgagttttgtagaaatgggtatgcgtagccatgtcgccggaacagttaagttaaatcctgccgaattaattgatcgtaaaatttatcgttttatgggtgatgccgccgcttatgcctacctgtcaatgaaagaagctattgaagatgcaggtcttagcgaagatcaggtttctaatgagcgtacgggtcttgttatcggtgccggtatcggttcggcgcattatcaggtgaaagcggccgatgcggcacgcggttcccgtggtgttaaagcaattggtccttatgcggtaactaaaaccatgtcttcaagtgtttccgcttgtttggcaactccgttcaaaattaaaggcgttaactattctatcagttccgcttgtgcaacttcggcacattgtatcggtaatgcctttgagttaattcaattaggtaaacaagatattgttttcgcaggcggtgcggaagaattatcctgggaaggagcggcacaattcgatgcaatgggtgccgtttcaaccaaatataatgaaaccccggaaaaagcgtctcgcgcttatgatgcggatcgtgacggtttcgttattgccggcggcggtgcggttgttgttgttgaagaattagaacacgctcttgcccgcggtgcaaaaatttatgcggaaatcgtaggctacggcgcgacttcagacggttacgacatggtagcgccaagcggcgaaggtgcggaacgttgcatgaaacaagcgatggcgaatattgatacgccgatcgactatatcaacgttcacggtacttcaacaccggttggtgacgtgaaagaattaggcgcaatcagaaatgtatttggtgaagctaaaccggcaatttcttcaacaaaatccatgacaggtcactcgttaggtgcggctggtgcgcacgaagcgatttatacgttattaatgttacacaacgactttatcgccccaagcattaacatcgaaacattagacgagcaggccgaaggtttaaatatcgttaccgaaacaaaagaaaatgcaggtttacaaaccgtgatgtcaaacagctttggtttcggcggtacgaacgctacattagtgttcaaacgttacgctaaataa

SEQ ID NO: 19891 - protein, 406 aa, Mannheimia succiniciproducens MBEL55E
MKRAVITGFGVISSIGNNKEEVLASLKAGKSGIEIVPSFVEMGMRSHVAGTVKLNPAELIDRKIYRFMGDAAAYAYLSMKEAIEDAGLSEDQVSNERTGLVIGAGIGSAHYQVKAADAARGSRGVKAIGPYAVTKTMSSSVSACLATPFKIKGVNYSISSACATSAHCIGNAFELIQLGKQDIVFAGGAEELSWEGAAQFDAMGAVSTKYNETPEKASRAYDADRDGFVIAGGGAVVVVEELEHALARGAKIYAEIVGYGATSDGYDMVAPSGEGAERCMKQAMANIDTPIDYINVHGTSTPVGDVKELGAIRNVFGEAKPAISSTKSMTGHSLGAAGAHEAIYTLLMLHNDFIAPSINIETLDEQAEGLNIVTETKENAGLQTVMSNSFGFGGTNATLVFKRYAK

SEQ ID NO: 19892 - DNA, 1230 bp, Legionella pneumophila subsp. pneumophila str. Philadelphia 1
  CDS (1)..(1230): transl_table=11
atgaaaaaaagggttgttattactggtatggaaataacgtcatccataggatcgggaattgataaattttggcttgctgcatctcaaggtcaatgcggaattaaacgcatccaatcttatgatccatccccctattcgacccaaatagcaggtgagattacagacttatctctcgaccatctccccgaattcaacaaaagcaaacgttatcctcgcgctgctcagtatgcattattttgcgcacatcatgccatcgagaaagcagggcttgagcaagctgagctcaatgcagcaggcacctttataggcacaagcattggcggtcaacctgaactggaagcaggttacaggttattctttacagacagctggaagaaaatcccccctcttagcgtgattagggggatgcccaattcaatcgccaatcatatcgcaattgcttttggcataggtggaccaaactcaaccatttccaatgcctgtgtttcatccggggaagcgataggcatggcttaccaacaaattgcccatggcaatttgaccacagctctttgcggaggaacagaatctttagtctgggaatcggttatggctgcctggtgtaagcttagagtaatgtcaactaacaatgaaaatccctcacaagccagcagaccgtttgatctcaatcgggatggaatggttatggcggatggggctgggatattaattcttgaagagctacaacaagcaaaagcaaggggagcacaaattctcggagaaatcattggctatggcgcaagttgtgatgcattccatgtcacagcgccaaactcacaaggacaagcaagagctattgttgctgctttaaatgatgccaaattatcaattaacgatgtccattacatcaacgcacatgggacaggaacccagctcaatgacagcacagaaacagaaacgattaaaatggttttcggtaaaagagcctatgacatcccgattactgctcaaaaagccatgacaggacatgcgattggggcagcaggagcaatggaaatcattgcaacaacactaagcttgcaaaaaaacacgctgttaccaactattaacctgcataccccagacccagcctgtgatctggattatgtgcctaatgctgcgcgagaaaaaaccattgatattgctttatccaaccatttcgctttcggtggagcaaatgccgctttagttctgcgcaaatacattagttaa

SEQ ID NO: 19893 - protein, 409 aa, Legionella pneumophila subsp. pneumophila str. Philadelphia 1
MKKRVVITGMEITSSIGSGIDKFWLAASQGQCGIKRIQSYDPSPYSTQIAGEITDLSLDHLPEFNKSKRYPRAAQYALFCAHHAIEKAGLEQAELNAAGTFIGTSIGGQPELEAGYRLFFTDSWKKIPPLSVIRGMPNSIANHIAIAFGIGGPNSTISNACVSSGEAIGMAYQQIAHGNLTTALCGGTESLVWESVMAAWCKLRVMSTNNENPSQASRPFDLNRDGMVMADGAGILILEELQQAKARGAQILGEIIGYGASCDAFHVTAPNSQGQARAIVAALNDAKLSINDVHYINAHGTGTQLNDSTETETIKMVFGKRAYDIPITAQKAMTGHAIGAAGAMEIIATTLSLQKNTLLPTINLHTPDPACDLDYVPNAAREKTIDIALSNHFAFGGANAALVLRKYIS

SEQ ID NO: 19894 - DNA, 1293 bp, Legionella pneumophila subsp. pneumophila str. Philadelphia 1
  CDS (1)..(1293): transl_table=11
atgaaacgacgagttgctattacaggtctaggggttgtttcgcctctaggaaatgatgtatccaccacttggatgaatttgatcgctggtcattctggcatagatagtatcaagcagtttgacgccagtgcttttcctaccactattgcggctgaagtaaagaacttttcacctgatacgtctatttcgggaaagcatactcgatttatcatgtcttttactcattttgctttggaagctgcacgccaggcatttgaagatgcttctatatttcctaccaagcaaacatctgatcggtggggaatagtaacaggcagtgggatgatgacggccgagtttgagtatttaacgcggtttcaacaagcttgtgccgcaggcggtgaaattgattggggaaagctgcaatctaatagcagggatttctataatttggttgattttggtaaaaccacttcaaactctggtctttccttattaatacaacaatatgggattactggttatgcctcttctgtccatacggcctgcgcttcaggaggccaagccttgggattggcaatgcaggtgatccgtcgtggcgaggcagattttatgttggcaggtggatttgattccatgattaatcctttgggtttgtcgagcttttgtcttttgggtgccttatcaacgtataatgagactccgcaaacggcaagtcgcccctttgatgcgacacgcaatggttttgtcctgggtgaaggggctgcctttttgatccttgaagaatggagtaaggcaaaagcccgtggggcaaaaatctatgctgaactggccggtgaggggaattctttgagctcctaccgaataactgattcacatcccaacggtgatggtgctattcaagcgattaaacgtgcgttggaggatgcgggtgttcaaccacgggatgtcgattatattaatgcgcatggtacatccactaaaatgaatgatttaagtgaaaccaatgcaatcaaagttgtctttggggacaggatcgccaatttaccagtgagctctaccaaaagtcaaacggggcatttaatcgcagctgcgggagcgcttgaagcggtattgtcagttaaatccatagaacaggcgcaagtccccaaaacagcgaatttaaaaacacctgatccggagtgtgatttggattatgttgttgatggtccacgtgaaaaatctttaggggtagtattatctaattcgtttggttttggaggttctaatagctgcttgttatttaaacatccagaattcgaggagacaaaataa

SEQ ID NO: 19895 - protein, 430 aa, Legionella pneumophila subsp. pneumophila str. Philadelphia 1
MKRRVAITGLGVVSPLGNDVSTTWMNLIAGHSGIDSIKQFDASAFPTTIAAEVKNFSPDTSISGKHTRFIMSFTHFALEAARQAFEDASIFPTKQTSDRWGIVTGSGMMTAEFEYLTRFQQACAAGGEIDWGKLQSNSRDFYNLVDFGKTTSNSGLSLLIQQYGITGYASSVHTACASGGQALGLAMQVIRRGEADFMLAGGFDSMINPLGLSSFCLLGALSTYNETPQTASRPFDATRNGFVLGEGAAFLILEEWSKAKARGAKIYAELAGEGNSLSSYRITDSHPNGDGAIQAIKRALEDAGVQPRDVDYINAHGTSTKMNDLSETNAIKVVFGDRIANLPVSSTKSQTGHLIAAAGALEAVLSVKSIEQAQVPKTANLKTPDPECDLDYVVDGPREKSLGVVLSNSFGFGGSNSCLLFKHPEFEETK

SEQ ID NO: 19896 - DNA, 1239 bp, Legionella pneumophila subsp. pneumophila str. Philadelphia 1
  CDS (1)..(1239): transl_table=11
ttgaatagtcggcgtgtggttattaccggcatgggtatgcttactcctgtcggacttaatgtagaagaaacttggcgaagtattttagctggggttagtggggtaggtttggtggaagattttgatactactgaatacccaactaagatttgggctaaggtcaagaattttaatgttgagaatcacatgccaattaaagacgcccgcaaaatggacgtctttacacaatatggtatggctgctgctgatgaagcgatgcttgactcgggtttaaaaattgatgaagtcttatctcgtcgaatcggtgtcgcagtgggcgcaggtattggtggtattcaaacaatcacaaataaccaggataaactggttgccggtggaccacgtaaggtttcgccattttttattccggcaggtattatcaatatggttgctggacagatttctattaaacataatttaaaaggacctaatatttcggttgtgactgcatgtactaccggaacacataatatcgggctagccgggcgtataattgcttatggcgatgccgatgtcatgatttgtggtggagcggaaatgaccacaacgccactttgtcttgctgggttttcagcagtaagatctttatccaaacggaatgatgagcctgagaaagcctcaaggccttgggataaagacagagacggttttgttatgggtgagggtgctggtgttttggttttagaagaatatgaacacgctaaagctcgtggagccaaaatttatgctgaattggttggttttggtatgtcaggagatgcttatcatattaccgcacccgatgaagatgccgatggagcttcacgagctatggaggcagccatccaggatgctggtatcgatcccagacaagttgattatattaatgctcacggtacgtcgacttatttaaacgatttaaatgaaacaaaagccattaagcgtgttttccagaaccatgcttatgatctggcggttagctcaaccaaatccatgacaggccatttgctcggagctgcaggtgcagtagaggcaattataagtattttagccataagagatcaggtggctccacctacaataaatttggataatcctgatgaaggttgtgatttgaattatgtagcacatgtaccacaaagcagaacaattaattatgttctaagtaattcacttggttttggtgggacaaacggtagcttactgttcaagcgaatctaa

SEQ ID NO: 19897 - protein, 412 aa, Legionella pneumophila subsp. pneumophila str. Philadelphia 1
MNSRRVVITGMGMLTPVGLNVEETWRSILAGVSGVGLVEDFDTTEYPTKIWAKVKNFNVENHMPIKDARKMDVFTQYGMAAADEAMLDSGLKIDEVLSRRIGVAVGAGIGGIQTITNNQDKLVAGGPRKVSPFFIPAGIINMVAGQISIKHNLKGPNISVVTACTTGTHNIGLAGRIIAYGDADVMICGGAEMTTTPLCLAGFSAVRSLSKRNDEPEKASRPWDKDRDGFVMGEGAGVLVLEEYEHAKARGAKIYAELVGFGMSGDAYHITAPDEDADGASRAMEAAIQDAGIDPRQVDYINAHGTSTYLNDLNETKAIKRVFQNHAYDLAVSSTKSMTGHLLGAAGAVEAIISILAIRDQVAPPTINLDNPDEGCDLNYVAHVPQSRTINYVLSNSLGFGGTNGSLLFKRI

SEQ ID NO: 19898 - DNA, 1263 bp, Bacteroides fragilis YCH46
  CDS (1)..(1263): transl_table=11
atggaattaaagagagttgtagtaacaggtctgggcgccattactcctgttggcaataatgtcccggaattctgggagaacctcgtgaacggggttagtggagcaggacctattactcatttcgatgcatcgcaattcaagactcaatttgcatgtgaagttaaaggcttcgatgcaactcaatatatcgaccgcaaagaggctcgtaaaatggacctgtacacacagtatgccgttgccgttgccaaagaagcagttgcagactcgggtcttgatatcgaaaatgaggatttaaacagaatcggcgttatttttggtgccggtatcggtggtatacgtacatttgaggaggaaacgagtaattacgcccttcacaaagaaaacggtcctaagtacaatccgttcttcatccctaagatgatttcagatattgctgccggacagatttctattatgtatggcttccacggcccgaactacgcaacttgttctgcatgtgcaacttctactaacgccatcgccgatgcattcaacctgatccgtctgggtaaggcaaacgtgattgtatccggtggttcggaagccgctatcgcagctgccggtgtaggaggtttcaatgctatgcatgcattgtcaactcgtaacgacgaaccacaatctgcatctcgtccgttcagtgcaagccgtgacggctttgtaatgggtgaaggtggtggatgtttgattcttgaagaactggaacatgcaaaagcccgtggcgcaaaaatctatgcagaagttgccggcgtaggtatgtctgctgatgctcaccacctgacagcatctcatccggaaggactcggtgcaaaattggtgatgaagaatgccttggaagacgcagagatgagtcctgaagaagtggattacatcaatgttcatggaacatctactccggtcggagatatatcggaagccaaagcaatcaaagaagtatttggtgaacatgcttttgagttgaatatcagttcaaccaaatcaatgacaggtcacttgttgggcgctgccggtgcggtagaatcaattgcaagtattctggctattaagaacggcatcgttcctccgactatcaatcatgccaaaggtgacaatgacgagaacattgactataatcttaatttcacgttcaacaaagcacagaaacgcgaaattaatgttgccctttcgaatacattcggattcggcggtcacaatgcttgtgtaatcttcaagaaatacgctgaataa

SEQ ID NO: 19899 - protein, 420 aa, Bacteroides fragilis YCH46
MELKRVVVTGLGAITPVGNNVPEFWENLVNGVSGAGPITHFDASQFKTQFACEVKGFDATQYIDRKEARKMDLYTQYAVAVAKEAVADSGLDIENEDLNRIGVIFGAGIGGIRTFEEETSNYALHKENGPKYNPFFIPKMISDIAAGQISIMYGFHGPNYATCSACATSTNAIADAFNLIRLGKANVIVSGGSEAAIAAAGVGGFNAMHALSTRNDEPQSASRPFSASRDGFVMGEGGGCLILEELEHAKARGAKIYAEVAGVGMSADAHHLTASHPEGLGAKLVMKNALEDAEMSPEEVDYINVHGTSTPVGDISEAKAIKEVFGEHAFELNISSTKSMTGHLLGAAGAVESIASILAIKNGIVPPTINHAKGDNDENIDYNLNFTFNKAQKREINVALSNTFGFGGHNACVIFKKYAE

SEQ ID NO: 19900 - DNA, 1239 bp, Burkholderia mallei ATCC 23344
  CDS (1)..(1239): transl_table=11
gtgagccgccgtcgtgttgttgttacaggccttgggctgatttcgcctgttggcaataatgttgccgacggctgggccaatctcgtggccggcaagtccggcatcgtcaatatcacgaagttcgacgcgacgaacttctcgacccgcttcgcgggcgaggtgaagggcttcaacgtcgaggagtacatcccggcgaaggaagcgcgccacatggatacgttcatccattacggcatcgcggccggcatgcaggcgatgcaggacagcggcttccaggtcaccgacgaaaacgcggagcgcgtcggcgtcgtggtcggctcgggcatcggcgggctgccgatgatcgaagtcacgcagaccgagctgctcaaccgcggcccgcgccggatctcgccgttcttcgtgccggcgtcgatcatcaacatgatctccggccacctgtcgatcaagttcggcatcaagggcccgaatctcgcgatcgtcaccgcgtgcacgaccggcctgcactgcatcggcgaggcggcgcgtctgatcgaatacggcgacgccgacgtgatgatcgcgggcggcgcggaagcgaccgtgtcgccgctcggcatcggcggcttcgcggcggcgcgcgcgctgtcgcagcgcaacgacgatccggcgacggcgagccgtccgtgggacaaggatcgcgacggcttcgtgctcggcgagggcgcgggcgtgatggtgctcgaggagtacgagcacgcgaaggcgcgcggcgcgaagatctacgcggaagtcgcgggctacgggatgagcggcgacgcgtaccacatgacggcgccgctcgagaacggcgacggcgcacgccgctgcatgctggccgcgctgcgcaacgcgggcgtgaacgccgatcaggtgaattacctgaacgcgcacggcacgtcgacgccgctcggcgatctggcggagaccgtcgcgatcaagcgcgcgttcggcgatcactcgaaggacatcgtcgtcaactcgaccaagtcgatgacggggcacttgctcggcggcgccggcgggctcgaatcggtgttcacggtccttgccgtccacaaccaggtgtcgccgccgacgatcaacatcttcaaccaggaccccgagtgcgatctcgactattgcgcgaacgaagcgcgcgagatgaagatcgacgtcgcgttgaagaactccttcggcttcggcgggactaacggcacgctggtcttcaagcgcgcctga

SEQ ID NO: 19901 - protein, 412 aa, Burkholderia mallei ATCC 23344
MSRRRVVVTGLGLISPVGNNVADGWANLVAGKSGIVNITKFDATNFSTRFAGEVKGFNVEEYIPAKEARHMDTFIHYGIAAGMQAMQDSGFQVTDENAERVGVVVGSGIGGLPMIEVTQTELLNRGPRRISPFFVPASIINMISGHLSIKFGIKGPNLAIVTACTTGLHCIGEAARLIEYGDADVMIAGGAEATVSPLGIGGFAAARALSQRNDDPATASRPWDKDRDGFVLGEGAGVMVLEEYEHAKARGAKIYAEVAGYGMSGDAYHMTAPLENGDGARRCMLAALRNAGVNADQVNYLNAHGTSTPLGDLAETVAIKRAFGDHSKDIVVNSTKSMTGHLLGGAGGLESVFTVLAVHNQVSPPTINIFNQDPECDLDYCANEAREMKIDVALKNSFGFGGTNGTLVFKRA

SEQ ID NO: 19902 - DNA, 1206 bp, Methylococcus capsulatus str. Bath
  CDS (1)..(1206): transl_table=11
atggtctgtccggtgggcctcaatgtccccgagagctgggacagcatcctgaacggccgcagcggaatcggcccgatcgagcatttcgatgtatccgacttcgctacccgcttcggtggcagcgtgcgtaacttcgatgtcacccggtatctgcccgaaaaagaagccaagaagatggatactttcatccactacggcatggcagcgggtagtcaggcgttcgaagattcggggctggaggtcaccgagtccaatgcggaccgcgttggcgtctgcgtcggctccggcatcggcgggatcaccggtatcgagcatggttacggcgtgttcctcaaaagtggaccccgcaaaatttctcctttctttgtgccggccaacatcatcaacatgatttccggcaacctctccatcaagtacggcctgaaaggcccgaattacgcgatcgtcactgcctgtgccacggcgactcacagcatcggcagcgcggcccgaatcatccagtatggcgatgccgacgtcatgttggccggtggtgccgaaatggcaagctcaccgacggccttgggtggattcatctcggcccgcgccttgtcgcgccgcaatgacgacccggtgcgggcgagccgtccttgggacaaggaccgcgacggctttgtactgggtgatggtgccggcgtggtggtgctggaggagctggagcatgccaagaagcgcggtgcccgcatctacgcggagctgatcggcttcggcatgtcaggagatgcccatcacatgacccagccgcccgaggacggcgatggtgcggcgcgttgtatgatgcacgcgatgcgggatgctggagtgaatccggaagacatcgattacgtcaatgcccacggcacttcgacgccggccggcgatctggcggagacccgcgccatgaagacggtgctcgggccgcatgcgtactcgacggctatcagctcgaccaagtccatgaccggccatctgcttggtgcggcgggtggaatcgaggcgatcttctctgtccttgcgattcgggaccgcgtggtaccgccgaccatcaatctggatacgcccgatccggaatgcgatctggattatgtgcctcataccgcccgggaaaaagatctcgaagtggtcatgtccaactcgttcggctttggcggtaccaacgccactttgattttcaagaaattcagatag

SEQ ID NO: 19903 - protein, 401 aa, Methylococcus capsulatus str. Bath
MVCPVGLNVPESWDSILNGRSGIGPIEHFDVSDFATRFGGSVRNFDVTRYLPEKEAKKMDTFIHYGMAAGSQAFEDSGLEVTESNADRVGVCVGSGIGGITGIEHGYGVFLKSGPRKISPFFVPANIINMISGNLSIKYGLKGPNYAIVTACATATHSIGSAARIIQYGDADVMLAGGAEMASSPTALGGFISARALSRRNDDPVRASRPWDKDRDGFVLGDGAGVVVLEELEHAKKRGARIYAELIGFGMSGDAHHMTQPPEDGDGAARCMMHAMRDAGVNPEDIDYVNAHGTSTPAGDLAETRAMKTVLGPHAYSTAISSTKSMTGHLLGAAGGIEAIFSVLAIRDRVVPPTINLDTPDPECDLDYVPHTAREKDLEVVMSNSFGFGGTNATLIFKKFR

SEQ ID NO: 19904 - DNA, 1251 bp, Nocardia farcinica IFM 10152
  CDS (1)..(1251): transl_table=11
gtgaccactccttccaccttgaacgggaatttccccaacgtcgtcgtgacgagcatggcggctaccacgtcgatcgcgggcgacgtcgatgcgacgtggaagggactcctcaacggcgagagcggcatcgacgttctcgaggattccttcatcgaggagtacgacctccctgttcgcatcggcggacacctgaaggtcaaccccgacaccctgctgagcagggtcgagatccgtcgcatggcgtacgtcgagcgactcgcgaccgttctgggtcgcgaggtgtggaagaacgccggcagcccggaggtcgaccccgaccgcctggctgtggcgatcggcaccggtctcggcggcggtgacgcgctgatcgactcggtcgacaagctgaagaacggtggctatcgcaagatctcgccgctggctgttcagatggtcatgccgaacggtccgtccgcctgtgtcggactcgagctgaaggccagggcgggagtggtcactccggtctcggcgtgctcgtcgggttcggaagccatcgccaacgcgtggcggatgatcgtgatgggtgacgccgatgtggtcgtcaccggcggtgtcgaaggctacatcgactccgtgccgatcgccgcgttctcgatgatgcgcgcgatgagcacccgcaacgacgatcccaagggcgcttcgcggcccttcgacaaggatcgcgacggtttcgtcttcggcgaggccggcgccctgatggtgctcgagaccgaggagcacgccaaggctcgtggcgccaccatccatgcccgcctgctgggtgcgggcatcacctccgatggttaccacctggtcgcccccgatccggagggcaccggcgcggcccgcgcgatgacccgcgcgatgcagtccgccggcctgaccaagcaggacatcacccacatcaacgcgcacgccaccgccacccccatcggtgacacggcggaggccaacgcgatcaacaaggccgtgggcaaccacccctcggtctacgcgcccaagtcggcgctcggccactcgatcggcgccgtgggcgcgctcgagtcggtgctcaccgtgctgagcatccgcgacggcatcgtgccgccgacgttgaacctggacaaccaggacccggagatcgatctcgatgtggtgaagggcgaggcccgccgccaggaaatcgaatacgcgatcaacaactcgttcggtttcggcgggcacaatgtcgccctcgccttcggtcgcgcatag

SEQ ID NO: 19905 - protein, 416 aa, Nocardia farcinica IFM 10152
MTTPSTLNGNFPNVVVTSMAATTSIAGDVDATWKGLLNGESGIDVLEDSFIEEYDLPVRIGGHLKVNPDTLLSRVEIRRMAYVERLATVLGREVWKNAGSPEVDPDRLAVAIGTGLGGGDALIDSVDKLKNGGYRKISPLAVQMVMPNGPSACVGLELKARAGVVTPVSACSSGSEAIANAWRMIVMGDADVVVTGGVEGYIDSVPIAAFSMMRAMSTRNDDPKGASRPFDKDRDGFVFGEAGALMVLETEEHAKARGATIHARLLGAGITSDGYHLVAPDPEGTGAARAMTRAMQSAGLTKQDITHINAHATATPIGDTAEANAINKAVGNHPSVYAPKSALGHSIGAVGALESVLTVLSIRDGIVPPTLNLDNQDPEIDLDVVKGEARRQEIEYAINNSFGFGGHNVALAFGRA

SEQ ID NO: 19906 - DNA, 1230 bp, Legionella pneumophila str. Paris
  CDS (1)..(1230): transl_table=11
atgaaaaaaagggttgttattactggcatggaaataacgtcatccataggatcgggaattgataaattttggcttgctgcatctcaaggtcaatgtggaattaaacgcatccaatcttatgatccatccccctattcaacccaaatagcaggtgagattacagacttatctcttgaccatctccccgaattcaacaaaagcaaacgttatcctcgtgctgctcagtacgcattattttgcgcacatcatgccattgagaaagcagggcttgagaaagctgagctcaatgcagcaggtacctttataggcacaagcattggcggccaacctgaactggaagcaggttacaagttattctttacagacagctggaagaaaatcccccctcttagcgtgattaggggaatgcccaattcaatagccaatcatatcgcaattgcttttggcataggtggaccaaactcaaccatttccaatgcctgtgtttcatccggggaagcgataggcatggcttaccaacaaattgcccatggcaatttgaccacagctctttgcggaggaacagaatctttagtctgggaatcggttatggctgcctggtgtaagcttagagtaatgtcaactaacaatgaaaatccctcacaagccagcagaccgtttgatctcaatcgggatggaatggttatggcggatggggctgggatattaattcttgaagagctacaacaagcaaaagcaaggggagcacaaattctcggagagatcattggctatggcgcaagttgtgatgcattccatgtcacagcaccaaactcacaaggacaagcaagagctattgttgctgctttaaatgatgccaagttatcaattaacgatgtccattacatcaacgcacatgggacaggaacccagctcaatgacagcacagaaacagaaacgattaaaatggttttcggtaaaagagcctatgacatcccgattactgctcaaaaagccatgacaggacatgcgattggggcagcaggggcaatggaaatcattgcaacaacactaagcttgcaaaaaaatacgctgttaccaacgattaacctgcatactccagacccagcctgtgatctggattatgtgcctaatgctgcgcgagaaaaaaccattgatattgctttatccaaccatttcgctttcggtggagcaaatgccgctttagttctgcgcaaatacattagttaa

SEQ ID NO: 19907 - protein, 409 aa, Legionella pneumophila str. Paris
MKKRVVITGMEITSSIGSGIDKFWLAASQGQCGIKRIQSYDPSPYSTQIAGEITDLSLDHLPEFNKSKRYPRAAQYALFCAHHAIEKAGLEKAELNAAGTFIGTSIGGQPELEAGYKLFFTDSWKKIPPLSVIRGMPNSIANHIAIAFGIGGPNSTISNACVSSGEAIGMAYQQIAHGNLTTALCGGTESLVWESVMAAWCKLRVMSTNNENPSQASRPFDLNRDGMVMADGAGILILEELQQAKARGAQILGEIIGYGASCDAFHVTAPNSQGQARAIVAALNDAKLSINDVHYINAHGTGTQLNDSTETETIKMVFGKRAYDIPITAQKAMTGHAIGAAGAMEIIATTLSLQKNTLLPTINLHTPDPACDLDYVPNAAREKTIDIALSNHFAFGGANAALVLRKYIS

SEQ ID NO: 19908 - DNA, 1293 bp, Legionella pneumophila str. Paris
  CDS (1)..(1293): transl_table=11
atgaaacgacgagttgctattacaggtctaggggttgtttcgcctctaggaaatgatgtatccaccacttggaacaatttgatcgctggccattctggcatagatagtatcaagcagtttgatgccagtgcttttcctaccactattgctgctgaagtaaagaatttttcacctgatacgtctatttcgggaaagcatactcgatttatcatgtcttttactcattttgcattggaagctgcacgccaggcttttgaggatgcttctatcttccctaccaagcaaacatccgatcggtggggaatcgtaacaggcagtgggatgatgacggccgagtttgagtatttaacgcggtttcaacaaacttgtgctgcaggcggtgaaattgattggggaaagctgcaatctaatagcagggatttctataatttggttgattttggtaaaaccacttcaaactctggtctttccttattaatacaacaatatgggattactggttatgcctcttctgtccatacggcctgcgcttcaggaggccaagccttgggattggcaatgcaggtgattcgtcgtggcgaggcagattttatgctggcaggtggatttgattccatgattaatcctttgggtttgtcgagcttttgtcttttgggtgccttatcaacttataatgagactccgcaaacggcaagtcgcccctttgatgcgacacgcaatggttttgtcctgggtgaaggggctgcctttttgatccttgaagaatggagtaaagcaaaagcccgtggggcaaaaatctatgctgaactggccggagaggggaattctttgagctcctaccgaataactgattcacatcccaacggtgatggtgctattcaagcgattaaacgtgcgttggaggatgccggtgttcaaccacgagatgtcgattatattaatgcgcatggcacatccactaaaatgaacgatttaagtgaaaccaatgcaatcaaagttgtctttggggataggatcgctaatttacctgttagctctaccaaaagccaaacggggcatttaatcgcagctgcaggagcacttgaagcggtattgtcagttaaatccatagaacaggcgcaagttcccaaaacagcgaatttaaaaacgcctgatccggagtgcgatttggattatgttgttgatggcccacgtgaaaaatctttaggggtagtattatctaattcgtttggttttggagggtctaatagctgcttattatttaaacatccagaattcgaggaggcaaaataa

SEQ ID NO: 19909 - protein, 430 aa, Legionella pneumophila str. Paris
MKRRVAITGLGVVSPLGNDVSTTWNNLIAGHSGIDSIKQFDASAFPTTIAAEVKNFSPDTSISGKHTRFIMSFTHFALEAARQAFEDASIFPTKQTSDRWGIVTGSGMMTAEFEYLTRFQQTCAAGGEIDWGKLQSNSRDFYNLVDFGKTTSNSGLSLLIQQYGITGYASSVHTACASGGQALGLAMQVIRRGEADFMLAGGFDSMINPLGLSSFCLLGALSTYNETPQTASRPFDATRNGFVLGEGAAFLILEEWSKAKARGAKIYAELAGEGNSLSSYRITDSHPNGDGAIQAIKRALEDAGVQPRDVDYINAHGTSTKMNDLSETNAIKVVFGDRIANLPVSSTKSQTGHLIAAAGALEAVLSVKSIEQAQVPKTANLKTPDPECDLDYVVDGPREKSLGVVLSNSFGFGGSNSCLLFKHPEFEEAK

SEQ ID NO: 19910 - DNA, 1239 bp, Legionella pneumophila str. Paris
  CDS (1)..(1239): transl_table=11
ttgaatagtcggcgtgtggttattaccggcatgggtatgcttactcctgtcggacttaatgtagaagaaacttggcgaagtattttagctggggttagtggggtaggtttggtagaagattttgacactactgaatacccaactaagatttgggctaaggtcaagaattttaatgttgagaatcacatgccaattaaagacgcccgcaaaatggacgtctttacacaatacggtatggctgctgccgatgaagcgatgcttgactcgggtttaaaaattgatgaaaccttatctcgtcgaatcggtgtcgcagtgggggcaggtattggtggtattcaaacaatcacaaataaccaggataaactggttgccggtggaccacgtaaggtttcgccattttttattccggcaggtattatcaatatggttgctggacagatttctattaaacataatttaaaaggacctaatatttcggttgtgactgcatgtactaccggaacacataatatcgggctagcagggcgcataattgcttatggcgatgccgatgttatgatttgtggtggagcggaaatgaccacaacgccactttgtcttgctgggttttcagcagtaagatctttgtccaagcggaatgatgagcctgagaaagcctcaaggccttgggataaagacagagacggttttgttatgggtgagggtgctggtattttggttttagaagaatatgaacacgctaaagctcgtggagccaaaatttatgctgaattggttggttttggtatgtcaggagatgcttatcatattactgcacccgatgaagatgccgatggagcttcacgagctatggaggcagccatccaggatgctggtatcgatcccagacaagttgattatattaatgctcacgggacgtcgacttatttaaacgatttaaatgaaacaaaagccattaagcgtgttttccagaatcatgcttatgatctggcggttagctcaaccaaatccatgacaggacatttgctcggagctgcaggtgcagtagaggcaattataagtattttagccataagagatcaggtggctccacctacaataaatttggataatcctgatgaaggttgtgatttgaattatgtagcacatgtaccacaaagcagaacaattaattatgttctaagtaattcacttggttttggtgggacaaacggtagcttactgttcaagcgaatctaa

SEQ ID NO: 19911 - protein, 412 aa, Legionella pneumophila str. Paris
MNSRRVVITGMGMLTPVGLNVEETWRSILAGVSGVGLVEDFDTTEYPTKIWAKVKNFNVENHMPIKDARKMDVFTQYGMAAADEAMLDSGLKIDETLSRRIGVAVGAGIGGIQTITNNQDKLVAGGPRKVSPFFIPAGIINMVAGQISIKHNLKGPNISVVTACTTGTHNIGLAGRIIAYGDADVMICGGAEMTTTPLCLAGFSAVRSLSKRNDEPEKASRPWDKDRDGFVMGEGAGILVLEEYEHAKARGAKIYAELVGFGMSGDAYHITAPDEDADGASRAMEAAIQDAGIDPRQVDYINAHGTSTYLNDLNETKAIKRVFQNHAYDLAVSSTKSMTGHLLGAAGAVEAIISILAIRDQVAPPTINLDNPDEGCDLNYVAHVPQSRTINYVLSNSLGFGGTNGSLLFKRI

SEQ ID NO: 19912 - DNA, 1239 bp, Legionella pneumophila str. Lens
  CDS (1)..(1239): transl_table=11
ttgaatagtcggcgtgtggttattaccggcatgggtatgcttactcctgtcggacttaatgtagaagaaacttggcgaagtattttagctggagttagtggggtaggtttggtggaagattttgacactactgaatacccaactaagatttgggctaaggtcaagaattttaatgttgagaatcacatgccaattaaagacgcccgcaaaatggacgtctttacacaatacggtatggctgctgctgatgaagcgatgcttgactcgggtttaaaaattgatgaagccttatctcgtcgaatcggtgtcgcagtgggggcaggtattggtggtattcaaacaatcacaaataaccaggataaactggttgccggtggaccacgtaaggtttcgccattttttattccggcaggtattatcaatatggttgctggacagatttctattaaacataatttaaaaggacctaatatttcggttgtgactgcatgtactaccggaacacataatatcgggctagccgggcgtataattgcttatggcgatgccgatgtcatgatttgtggtggggcggaaatgaccacaacgccactttgtcttgctgggttttcagcagtaagatctttatccaaacggaatgatgagcctgagaaagcctcaaggccttgggataaagacagagacggttttgttatgggtgagggtgctggtattttggttttagaagaatatgaacacgctaaagctcgtggagccaaaatttatgctgaattggttggttttggtatgtcaggagatgcttatcatattactgcacccgatgaagatgccgatggagcttcacgagctatggaggcagccatccaggatgctggtatcgatcccagacaagttgattatattaatgctcacggtacgtcgacttatttaaacgatttaaatgaaacaaaagccattaagcgtgttttcgagaaccatgcttatgatctggcggttagctcaaccaaatccatgacaggccatttgctcggagctgcaggtgcagtagaggcaattataagtattttagccatcagagatcaggtggctccacctacaataaatttggataatcctgatgaaggttgtgacttgaattatgtagcacatgtaccacaaagcagaacaattaattatgttctaagtaattcacttggttttggtgggacaaacggtagcttactgttcaagcgaatctaa

SEQ ID NO: 19913 - protein, 412 aa, Legionella pneumophila str. Lens
MNSRRVVITGMGMLTPVGLNVEETWRSILAGVSGVGLVEDFDTTEYPTKIWAKVKNFNVENHMPIKDARKMDVFTQYGMAAADEAMLDSGLKIDEALSRRIGVAVGAGIGGIQTITNNQDKLVAGGPRKVSPFFIPAGIINMVAGQISIKHNLKGPNISVVTACTTGTHNIGLAGRIIAYGDADVMICGGAEMTTTPLCLAGFSAVRSLSKRNDEPEKASRPWDKDRDGFVMGEGAGILVLEEYEHAKARGAKIYAELVGFGMSGDAYHITAPDEDADGASRAMEAAIQDAGIDPRQVDYINAHGTSTYLNDLNETKAIKRVFENHAYDLAVSSTKSMTGHLLGAAGAVEAIISILAIRDQVAPPTINLDNPDEGCDLNYVAHVPQSRTINYVLSNSLGFGGTNGSLLFKRI

SEQ ID NO: 19914 - DNA, 1242 bp, Photobacterium profundum SS9
  CDS (1)..(1242): transl_table=11
gtgtcaaaacgtcgtgtagttgttactggcatgggtatgctaactcctgttggcaattcggttgaatcttcttggaaggctttactatctggtactagtggtattagtactattgagcattttgatgctagcttatttgctactcagtttgctggtatgattaaagacttcaatcctgaagaatacatgaccaaaaaagatgcccgtaaaatggatttatttatccaatacggcattgcagctggcgtgcaagcatttaaagattcaggtattgaagtaacagaagagaacgcacaccgtattggtgttgctatcggttctggtattggtggtcttgggcttatcgaagctggtcatcaagcccttatggagaaaggaccgcgcaaaattagcccgttctttgttccatcaacaattgtaaatatgattgctggtcacatgtctatcatgcatggcctacgcggtcctaacatcgctatttctacggcttgtactactggccttcataatattggccatgcagcacgtatgattgcatatggtgatgctgacgcaatgctagctggcggtgctgaaaaagcatctactgagctaggcatgggtggctttgcggctgctaaagcgttatcaactcgcaatgatgatccacaagcggcttctcgcccttgggacaaagaccgtgacggttttgttctgggtgatggcgcaggcgtgattgttgtcgaagaatacgaacacgctaaagcgcgtggcgcaacaatctacgctgaacttgttggttttggtatgagtggtgatgcttatcacatgacttcaccaagtcctgatggttcgggtggcgctttggcaatggaagcaacactgcgtgatgcgggtatcaatgctgataaaattggctatattaacgctcacggtacatcaacacctgcaggtgacgcagctgaaacgcgtggtatcaagcgcgctatgggtactgcagctgatgatgtattagtatcatcaacaaaatcgatgactggtcacctgttaggtgcggcgggttctgttgaagccattatttctattatgtctcttgttgatcaggctgtaccgccaacgattaacttagataaccctgatgaaggctgtgaccttgattatgtagccggtgaagctcgccaagttaagaaccttgagtactctctgtgtaactcatttggttttggcggtacaaacggctcgctactattcaagaaaatttaa

SEQ ID NO: 19915 - protein, 413 aa, Photobacterium profundum SS9
MSKRRVVVTGMGMLTPVGNSVESSWKALLSGTSGISTIEHFDASLFATQFAGMIKDFNPEEYMTKKDARKMDLFIQYGIAAGVQAFKDSGIEVTEENAHRIGVAIGSGIGGLGLIEAGHQALMEKGPRKISPFFVPSTIVNMIAGHMSIMHGLRGPNIAISTACTTGLHNIGHAARMIAYGDADAMLAGGAEKASTELGMGGFAAAKALSTRNDDPQAASRPWDKDRDGFVLGDGAGVIVVEEYEHAKARGATIYAELVGFGMSGDAYHMTSPSPDGSGGALAMEATLRDAGINADKIGYINAHGTSTPAGDAAETRGIKRAMGTAADDVLVSSTKSMTGHLLGAAGSVEAIISIMSLVDQAVPPTINLDNPDEGCDLDYVAGEARQVKNLEYSLCNSFGFGGTNGSLLFKKI

SEQ ID NO: 19916 - DNA, 1233 bp, Streptococcus thermophilus LMG 18311
  CDS (1)..(1233): transl_table=11
atgtctacaaatcgtgttgttgttacaggttacggtgtaacctcgccaatcggtaatacaccagaagaattttggaacagtcttcatgacggtaagattggtattaagccaatcaccaagtttgatgcttctgatatcccagtctttaacgctggtgaaatccaagatttcccattcgacaagtattttgtgaaaaaagatactaaccgtatggacacttattcactttatgcgatttatgctgctatggaagcacttgaaaattcaggacttaatatggaagaagtaaatcgtgatcgcgttggtgttatcgtgtcatctggtatcggtggtttacaagaacttgaagatcaaattatccgcatgtatgaacgtggtatgaaacgtatcaagccaatgtttattcctaaagctctctcaaacatgggtgcagggaacattgctcttaagattggtgctcaaggagtatgtaaatcagtgacaactgcctgtgcctctgccaatgatgctatcggtgaagccttccgcgaaattaaatttggatttcacgatgttgtcttggctggtggtgcggaagcttcaatcactaaaattggtattggaggttttaacgctcttacagccctttcaacaacagaagatccagaacgttcttcaattccatttgataaagaccgtaatggttttgttatgggtgaaggtgctggggttcttgttattgaaagcttggagcatgcgcaaaaacgtggtgccaacatcttggctgagattgttggttacggatcaaactgtgatgcctatcatatgacaacgccaactccagacggttcaggagctgctaaagcaattaaattggctatcaatgaagctggtatcaagcctgaagatgttgactatgtcaatgctcacggtacttcaacaccagccaacgaaaaaggtgaaagtgctgctattgtgtctgtacttggtaaagatgttccagtttcatctactaaatcatttacaggtcacctgcttggtgctgctggtgctgttgaagctattgcaacaattgaagctattcgtcacagctttgtaccaaaaactgctggtacaaaagaattgtctgactacattgaagctaatgttgtttacggtgaaggtaaagaagctgatattgagtatgcaatctcaaatacctttggttttggtggacacaacgctgttcttgcctttaaacgttgggagggctaa

SEQ ID NO: 19917 - protein, 410 aa, Streptococcus thermophilus LMG 18311
MSTNRVVVTGYGVTSPIGNTPEEFWNSLHDGKIGIKPITKFDASDIPVFNAGEIQDFPFDKYFVKKDTNRMDTYSLYAIYAAMEALENSGLNMEEVNRDRVGVIVSSGIGGLQELEDQIIRMYERGMKRIKPMFIPKALSNMGAGNIALKIGAQGVCKSVTTACASANDAIGEAFREIKFGFHDVVLAGGAEASITKIGIGGFNALTALSTTEDPERSSIPFDKDRNGFVMGEGAGVLVIESLEHAQKRGANILAEIVGYGSNCDAYHMTTPTPDGSGAAKAIKLAINEAGIKPEDVDYVNAHGTSTPANEKGESAAIVSVLGKDVPVSSTKSFTGHLLGAAGAVEAIATIEAIRHSFVPKTAGTKELSDYIEANVVYGEGKEADIEYAISNTFGFGGHNAVLAFKRWEG

SEQ ID NO: 19918 - DNA, 1227 bp, Thermus thermophilus HB8
  CDS (1)..(1227): transl_table=11
atgcgacgcgtggtggtcaccggcctaggcgccctcacgcccatcggcgtggggcaggaggccttccacaaggcccagctcgcgggcaaaagcggggtcaggcccatcacccgctttgacgcctcggccctccccgtgcgcatcgccgccgaggtggacgtggaccccggggcctacctggaccggaaggagctcaggcgcctggaccgcttcgtccagtacgccctcatcgccgctcagcttgccctggaggacgcggggctaaagcccgaagaccttgaccccgagcgggtgggcaccctggtgggcacggggatcgggggcatggagacctgggaggcccaaagccgggtctttctggagcggggcccaaaccgcataagccccttcttcatccccatgatgatcgccaacatggcctcggcccacatcgccatgcgctacggcttcaccgggccttcctccacggtggtcaccgcctgcgccacgggggcggacgccctgggaagcgccctgcgcatgatccagctcggcgaggccgacctcgtcctggcgggggggacggaggccgccatcacccccatggccatcggggccttcgctgtgatgcgagccctttccacaaggaacgaggagcccgagaaggcgagccgccccttcaccctctcccgggacgggttcgtcatgggggagggggccggggtcttggtcctggaggcgtacgagcacgcgaagaagcggggcgcccgcatctacgccgagctcgtgggcttcggccggagcgccgacgcccaccacatcaccgagccccaccccgagggaaagggcgccgccttggccatggcccgggccctgaaggacgcgggcatcgcccccgagcaggtgggctacatcaacgcccacggcacctccacccccgtgggggaccgggcggaggtgctggccatcaagcgggtcttcggggaccacgccaagaggctcatggtctccagcaccaagagcatgatcggccacctcctgggagcggcgggggcggtggaggccatcgccacggtccaggccctctaccacggggtcatccctcccacgatcaacctcgaggaccccgaccccgagctggacctggacttcgttcccgagccccgggaggccaaggtggactacgccctctccaactccttcgccttcgggggccacaacgccgtcctggctttcaagagggtctga

SEQ ID NO: 19919 - protein, 408 aa, Thermus thermophilus HB8
MRRVVVTGLGALTPIGVGQEAFHKAQLAGKSGVRPITRFDASALPVRIAAEVDVDPGAYLDRKELRRLDRFVQYALIAAQLALEDAGLKPEDLDPERVGTLVGTGIGGMETWEAQSRVFLERGPNRISPFFIPMMIANMASAHIAMRYGFTGPSSTVVTACATGADALGSALRMIQLGEADLVLAGGTEAAITPMAIGAFAVMRALSTRNEEPEKASRPFTLSRDGFVMGEGAGVLVLEAYEHAKKRGARIYAELVGFGRSADAHHITEPHPEGKGAALAMARALKDAGIAPEQVGYINAHGTSTPVGDRAEVLAIKRVFGDHAKRLMVSSTKSMIGHLLGAAGAVEAIATVQALYHGVIPPTINLEDPDPELDLDFVPEPREAKVDYALSNSFAFGGHNAVLAFKRV

SEQ ID NO: 19920 - DNA, 1239 bp, Geobacillus kaustophilus HTA426
  CDS (1)..(1239): transl_table=11
atggaaaaaagacgagtcgtcgtgacaggcataggcgccgtcaccccgcttgggaatgacgcagaaacgacgtggaaaaacattatcgccggccagtccggcatcgacattgtcactcgcgtcaatccggacgactttccggcgaaagtggcggcggaagtgaaagacttcgatccgtcgctgtttatcgaccgccgcgaggcgcggaagatggaccgatttacccaattcgccgtcgctgcggcgctcatggcggtcaaagatgccaatctcgacattaatgaaagcaacgctgaacgggtcggtgtttggattggttctggcatcggcggcatggagacgtttgaacagcagtttgagattttccagcagcgcggttatcgccgagtgagcccgtttttcgtgccaatgatgatcccggatatggccgctgggcaagtatcgatcatcctcggagcgaaagggatcaattcgtgcacggtgaccgcttgcgcgaccggggcgaactcgatcggtgatgcgtttaaagtcattcagcgcggcgacgccgatgtcatgatcaccggcgggacggaagcgccgattacgaaaatgtcgttcgccggtttttgcgccaatacggctctttcaaccaatccagatccaaaaacggcgagccgcccatttgacaaaaaacgcgacggtttcgtcatgggtgagggagcaggcatcgttgttcttgaggaattggagcacgcgttgcgccgcggcgcgaagatttacgcagaaattgtcggttacggtgcgaccgccgatgcgtaccatatcaccgcgccggctccgggcggcgaaggcggcgtgcgggcgatgcgccaagcgcttcatgacgctggcctgaagccggaggagatcgattacatcaacgcccacggcacgagcaccgagtacaatgataagtatgagacggcggcgatcaaagaagtattcggcgatcatgcctataagctcgccgtcagctcgacgaagtcgatgactgggcatttgctcggggcgaccggcgcggtggaagcgattttctccgtgctggcgatccgcgacggcatcattccgccgacgatcaactacgaaacaccggatccggaatgcgacctcgactatgtgccgaatgaagcgcgcaagcaagacgtgcgtgcggtcttaagcaactcatttggatttggcggccataatgcgacattgatttttaaaaaatatgtgtaa

SEQ ID NO: 19921 - protein, 412 aa, Geobacillus kaustophilus HTA426
MEKRRVVVTGIGAVTPLGNDAETTWKNIIAGQSGIDIVTRVNPDDFPAKVAAEVKDFDPSLFIDRREARKMDRFTQFAVAAALMAVKDANLDINESNAERVGVWIGSGIGGMETFEQQFEIFQQRGYRRVSPFFVPMMIPDMAAGQVSIILGAKGINSCTVTACATGANSIGDAFKVIQRGDADVMITGGTEAPITKMSFAGFCANTALSTNPDPKTASRPFDKKRDGFVMGEGAGIVVLEELEHALRRGAKIYAEIVGYGATADAYHITAPAPGGEGGVRAMRQALHDAGLKPEEIDYINAHGTSTEYNDKYETAAIKEVFGDHAYKLAVSSTKSMTGHLLGATGAVEAIFSVLAIRDGIIPPTINYETPDPECDLDYVPNEARKQDVRAVLSNSFGFGGHNATLIFKKYV

SEQ ID NO: 19922 - DNA, 1242 bp, Salmonella enterica subsp. enterica serovar Paratyphi A str. ATCC
  CDS (1)..(1242): transl_table=11
gtgtctaagcgtcgtgtagttgtgaccggactgggcatgttgtctcctgtcggcaataccgtagagtctacctggaaagctctccttgccggtcagagtggcatcagcctgatcgaccatttcgatactagcgcctatgcaacgaaatttgctggcttagtaaaggattttaactgtgatgacattatctcgcgcaaagaacagcgcaagatggatgccttcattcaatatggaattgtcgctggcgtacaggccatgcaggattctggccttgaagtgacggaagagaacgcaagccgtattggcgccgctatcggctccggtatcggtggtctcggtctgatcgaagaaaaccacagttcgctggtaaaaggcggaccgcgtaagattagcccgttctttgtcccgtcgacgattgttaacatggtagcaggccatctgactatcatgtatggcctgcgtgggccaagcatctctattgcgactgcctgtacttcaggcgtgcataacatcggccatgccgcgcgtatcatcgcctatggcgatgcggacgcgatggtggcaggtggcgcagaaaaagccagtacgccgctgggcgtaggtggttttggcgcagcgcgcgcgctgtcgacccgcaacgataacccacaggcggcgagccgtccgtgggataaagaacgcgatggttttgtactgggcgacggtgccggtatgttggtgcttgaagagtacgaacatgcaaaagcgcgtggtgcgaaaatctatgccgaaatcgtcggctttggtatgagcagcgatgcttaccatatgacgtcgccgccggaaaatggcgcaggcgctgcgctggcgatggttaacgcgttgcgtgatgccgcgattgagcctgctcagattggctacgtcaacgcgcacggcacgtcgacgcctgccggcgacaaagctgagacgcaggcggttaagtcagtctttggcgatgcagcaagccgagtgatggtgagctcgaccaaatcgatgaccggccatctgttgggcgccgcaggcgcagtagagtctattttctctattctggcgctacgcgatcaggccattccgccaaccattaatctggataacccggatgaaggttgcgatctggacttcgtgccgcatgaagcgcgccaggtcagcgatctggagtatgctctgtgtaactcctttggctttggcggaactaacggttccttgatttttaaaaagatctaa

SEQ ID NO: 19923 - protein, 413 aa, Salmonella enterica subsp. enterica serovar Paratyphi A str. ATCC
MSKRRVVVTGLGMLSPVGNTVESTWKALLAGQSGISLIDHFDTSAYATKFAGLVKDFNCDDIISRKEQRKMDAFIQYGIVAGVQAMQDSGLEVTEENASRIGAAIGSGIGGLGLIEENHSSLVKGGPRKISPFFVPSTIVNMVAGHLTIMYGLRGPSISIATACTSGVHNIGHAARIIAYGDADAMVAGGAEKASTPLGVGGFGAARALSTRNDNPQAASRPWDKERDGFVLGDGAGMLVLEEYEHAKARGAKIYAEIVGFGMSSDAYHMTSPPENGAGAALAMVNALRDAAIEPAQIGYVNAHGTSTPAGDKAETQAVKSVFGDAASRVMVSSTKSMTGHLLGAAGAVESIFSILALRDQAIPPTINLDNPDEGCDLDFVPHEARQVSDLEYALCNSFGFGGTNGSLIFKKI

SEQ ID NO: 19924 - DNA, 1284 bp, Anaplasma marginale str. St. Maries
  CDS (1)..(1284): transl_table=11
ttgtttcggttttgtatggctgatagggctagggttgtcgtaactggtatgggcctggtaacaccgctggggtttcagatccccgatgtgtgggaccgtttagtcaatgggaagtcgggaataagtgccattagcgggtttgacactcatgaccttgagtgcagagtcgggggccaggtgatttccgaaggccagtcaggggagaacgtgtttgaccccactcagtgggtcgaagaaaaagacgtaaaaaaggctgaccgcttcatcattttcggggtggccgcagcagatatggcgttgtccgacgccggcttgctgggcacggagtttgaccctgaccggatcggagtactggtagggtccggcgtaggcggcttaccgtgcatagaaagaaatgttatagccgtgcacgagcgcgggcctaggcgcgtgagcccgtttttcataccaggaagtctggtcaacttactccctggacacatttccatacgacacgggctgacggggtactgcaacgcatcagtgagtgcctgcgcgacgggggccgccgccattgccgacgcggcgcgagtcatagcatcaggagaggcggacgttatgctcgctggtggagcggagggtgcgttgtgtagggcggcagtggctgggttctgcatcataaaggccctatcgacaaaattcaatgatacaccagagctcgcttctcgtccttgggatagggacagggacggctttgtgatcggagagggtgccggcattctggtactggaaagctatgagcacgcaaagatgaggggtgcgaatatatacgcggagctcgtcggttacgggataacttcagatgcctatcacgtgacagccccacaccctgaaggtcgggggggagcggacgcaatgaaacgcgcgctgcaaatgtctgggattgctccagaaagtgtggggtatataaacgcgcatggaacctcaacgccggtgggagacagtgttgagatttccgcaataaaatcggtgtttggtgaccacgcataccgtatgcccatatcctccacaaaatcctctatcggccacctgttgggggcagccgggggtgtggaagccattttttccatactatctatccgcaatggggtcgtgcctccaacgttaaacttgcaaaattcttcggaagacagtaatttgaacttggtgcctttgaacgcgcaggaacataaggtgtcaagtgcgatgtcaaattccttcgggtttgggggagtgaatgcatcgctggtgttcggggccgtgtag

SEQ ID NO: 19925 - protein, 427 aa, Anaplasma marginale str. St. Maries
MFRFCMADRARVVVTGMGLVTPLGFQIPDVWDRLVNGKSGISAISGFDTHDLECRVGGQVISEGQSGENVFDPTQWVEEKDVKKADRFIIFGVAAADMALSDAGLLGTEFDPDRIGVLVGSGVGGLPCIERNVIAVHERGPRRVSPFFIPGSLVNLLPGHISIRHGLTGYCNASVSACATGAAAIADAARVIASGEADVMLAGGAEGALCRAAVAGFCIIKALSTKFNDTPELASRPWDRDRDGFVIGEGAGILVLESYEHAKMRGANIYAELVGYGITSDAYHVTAPHPEGRGGADAMKRALQMSGIAPESVGYINAHGTSTPVGDSVEISAIKSVFGDHAYRMPISSTKSSIGHLLGAAGGVEAIFSILSIRNGVVPPTLNLQNSSEDSNLNLVPLNAQEHKVSSAMSNSFGFGGVNASLVFGAV

SEQ ID NO: 19926 - DNA, 1239 bp, Azoarcus sp. EbN1
  CDS (1)..(1239): transl_table=11
ttgacccgtcgcagagtcgtcattaccggtctcggaatcatctcgccggtcggtaataccgttccggaggcctgggacaacattgtcaacggccgctccggcatcggcgaaatcacgcgtttcgatgcttccagcttcccggtcaggatcgccggcgaagtgaggggtttcgacattggcgcctacctgtctccgaaggaggcgcgtcgtatggatgttttcatccactacggcctggccgcaggcatccaggcgttcagggatgccgggctggacgttaccgcctccaatgcggaacgcataggggtcaacctcgggtcgggaatcggcggcttgccgatgatcgaagcgacccacgacgatttcctcaagggcggggcacgcaagatttcccctttcttcattcccggcacgatcatcaacatgatcgccggcaacctgtcgatcatgctcggactgaagggtccgtgcctggcgatggttaccgcatgcaccacggcgacgcactgcatcggcgaggcagcgcggctcatccagtacggggatgtcgatgtgatggtggccggcggcgcggaatccaccgtcactccgctcgccgttggcggcttcgcctccgcgaaggcgttgtcgacgcgcaacgatgatccgcttactgccagccgtccatgggacaaggggcgcgacggtttcgtgctcggcgaaggggccggcgtgctggtcctcgaagagtacgagcacgcgaaggcgcggggcgcccggatctacgccgaaatatccggctacggcatgagcgccgatgcctatcacatgactgcaccggccgaggacggtgacggcgccgcgcgctgcatggcgaacgcgatgcgcgatgcgcgcatgacggtcgaggagatcgactacgtcaacgcccacggcacttcgacgccccttggagacttggccgaaacgaccgcggtaaagcgctgtttcggcgatcgggcaagatcgatcgtggtgaactccaccaagtcgatgaccggccatctgctcggcgccgcgggaggtgtcgaagcggtgttcaccgcgctggccctgcacaaccagatcgctccgccgacgatcaacattttcgagcaggacgagcggtgcgaccttgattacgtcgcgaacaaggcgcgtccgatggagatccgggcagcgctttcgaattcgttcggcttcggtggcacgaacggcacgctggcgtttcgtcgcatctga

SEQ ID NO: 19927 - protein, 412 aa, Azoarcus sp. EbN1
MTRRRVVITGLGIISPVGNTVPEAWDNIVNGRSGIGEITRFDASSFPVRIAGEVRGFDIGAYLSPKEARRMDVFIHYGLAAGIQAFRDAGLDVTASNAERIGVNLGSGIGGLPMIEATHDDFLKGGARKISPFFIPGTIINMIAGNLSIMLGLKGPCLAMVTACTTATHCIGEAARLIQYGDVDVMVAGGAESTVTPLAVGGFASAKALSTRNDDPLTASRPWDKGRDGFVLGEGAGVLVLEEYEHAKARGARIYAEISGYGMSADAYHMTAPAEDGDGAARCMANAMRDARMTVEEIDYVNAHGTSTPLGDLAETTAVKRCFGDRARSIVVNSTKSMTGHLLGAAGGVEAVFTALALHNQIAPPTINIFEQDERCDLDYVANKARPMEIRAALSNSFGFGGTNGTLAFRRI

SEQ ID NO: 19928 - DNA, 1299 bp, Zymomonas mobilis subsp. mobilis ZM4
  CDS (1)..(1299): transl_table=11
atgctgaaggcattctgtcaaggggagaaaagtaatatgcgtcgtgtagtcgctaccggcttgggaatggtgacttcgctgggtggcgatgtcgaaacaacatggtcgaatattctggcctcaaagtccggtgctgggcgtatcacgcgtttcgatccggaaggttttgcttgtacggttgcttgtgaagtcaaaccggccgaccatgaatatggctttgatccgtccaaacgcgttgacagcaagacgataagacaggtcgaacccttcattatctatggcattgatgccgctggacaggctttggaagatgccggtctcatggatatgagcgaagaagaaaaactcagaacgggtctttctatcggcgctggtatcggtggtttaccccgtatcgaaaaagaatccatcatctgccatgaaaaagggccccgccgcgtttcgcctcatttcgtgcatgccagtcttatcaatctgacggctggacaggtttctatccgctatggcctgaaagggcctaaccacgctgtcgtcacggcttgctcttccggttgtcattccattggcgatgccagctggatgattcgcatgggctatgccgatgtgatggttgcagggggttctgaatcggctatttgccctctcggtatcgccggattctcacaggcacatgctctttcgacaggtcataacgacacgcccgaaaaagcttcccgtccatatgacaaaggccgcgacggttttgtcatgggtgatggtgccggtattattattctcgaagaatatgaacatgccaaggcacgtggagccaaaatttacggcgaaattatcggctatggtatgacgggtgatgcgtatcatgtgaccgctccccagccagatggtgatggtgcctatcgctccatgaaaatggcgcttgagcaggccaatcttaccaccgctgatattgattatatcaatgcacatggcacctcgacgcccatgggcgatgaaatcgaagccaacgccgttcgccggttgtttggggatgacattaaaaatatgtcaatgagttcaacgaagtctgccatcggccatttattgggcggtgcaggggctgttgaaacgattttctgcctgttggcgatgcgtgatcagattgcgcctccgaccatcaacctcgaaaatccgagcgatggcttagctggctttgatctggtgcccaatgttccgaaaaaacgctcaatcaaggccgttttgaataacagctttggttttggtggaaccaatgccagcttgatcttcaaagctgtagactaa

SEQ ID NO: 19929 - protein, 432 aa, Zymomonas mobilis subsp. mobilis ZM4
MLKAFCQGEKSNMRRVVATGLGMVTSLGGDVETTWSNILASKSGAGRITRFDPEGFACTVACEVKPADHEYGFDPSKRVDSKTIRQVEPFIIYGIDAAGQALEDAGLMDMSEEEKLRTGLSIGAGIGGLPRIEKESIICHEKGPRRVSPHFVHASLINLTAGQVSIRYGLKGPNHAVVTACSSGCHSIGDASWMIRMGYADVMVAGGSESAICPLGIAGFSQAHALSTGHNDTPEKASRPYDKGRDGFVMGDGAGIIILEEYEHAKARGAKIYGEIIGYGMTGDAYHVTAPQPDGDGAYRSMKMALEQANLTTADIDYINAHGTSTPMGDEIEANAVRRLFGDDIKNMSMSSTKSAIGHLLGGAGAVETIFCLLAMRDQIAPPTINLENPSDGLAGFDLVPNVPKKRSIKAVLNNSFGFGGTNASLIFKAVD

SEQ ID NO: 19930 - DNA, 1209 bp, Silicibacter pomeroyi DSS-3
  CDS (1)..(1209): transl_table=11
atgaaacgggtcgttatcaccggggccggcaccatcaacgcgctggggcactcggtacccgagacgctgaccgcgatgcgcgaggggaaatgcggcatcggcgaactggagtttcgcgatgtcgatcggctggccatccgcatcggtggccaggtccgcggattcgaggccgaaggccggttcaaccgccagcagatgtctctctatgaccggttcacccaattcaccctgaccgccgccaaagaggcgatcgaccaggccgggttggccttccacggtgaactggcggcgaaatcgggggtggtgctgggcacggccggcggcggcgtcagcacctgggacgagaattaccgctccgtctatgaagagggcaagaaccgggtccatccctttgtcgtgcccaagctgatgaacaacgcggccgccagccatgtgtcgatggaacataacctcaaggggccgtcctttaccgtctcgaccgcctgcgcctcgtcgaatcacgcgatggcacaggccttttccatggtgcgcagcggcatggcgccggtgatgatcaccggcggctcggaatcgatgctgtgttttggcggggtcaaggcctgggaagggctgcgggtgatgtccaaggacgcttgccgcccgttcagcgccaaccgcaacggcatggtccagggcgagggcgccggtatcttcgtgttcgaagaatacgaacatgccaaggcgcgcggcgccgagatcctgtgcgaagtggcgggttttgccatgtcctcggatgcggccgatatcgtgatgccctcgaaacagggggcggcgcgggcgatggcgggggcattggccgatgcgcgcatcaacccgggcgaggtcggctatatcaacgcccatggcaccggaacggcggccaatgacaagaccgaatgcgccgcggtggccgatgtgttcggccgtcatgccgacagcctgatgatttcctcgaccaaatcgatgcatggccacctgatcggcggtaccggcgcggtggagttgctggcctgtatcatggcgctgcgcgactgggtgatcgcgcccacgatcggttatgaagagcctgaccccgaatgcgcactggacgtggtccccaacgaggcgcgcgaggccaaggtggatgtggcgctcagcaacgcctttgcctttggcgggttgaacgcggttctggccctgcgcaaggtttga

SEQ ID NO: 19931 - protein, 402 aa, Silicibacter pomeroyi DSS-3
MKRVVITGAGTINALGHSVPETLTAMREGKCGIGELEFRDVDRLAIRIGGQVRGFEAEGRFNRQQMSLYDRFTQFTLTAAKEAIDQAGLAFHGELAAKSGVVLGTAGGGVSTWDENYRSVYEEGKNRVHPFVVPKLMNNAAASHVSMEHNLKGPSFTVSTACASSNHAMAQAFSMVRSGMAPVMITGGSESMLCFGGVKAWEGLRVMSKDACRPFSANRNGMVQGEGAGIFVFEEYEHAKARGAEILCEVAGFAMSSDAADIVMPSKQGAARAMAGALADARINPGEVGYINAHGTGTAANDKTECAAVADVFGRHADSLMISSTKSMHGHLIGGTGAVELLACIMALRDWVIAPTIGYEEPDPECALDVVPNEAREAKVDVALSNAFAFGGLNAVLALRKV

SEQ ID NO: 19932 - DNA, 1266 bp, Silicibacter pomeroyi DSS-3
  CDS (1)..(1266): transl_table=11
atgcgcagagtcgttgtaaccggactgggactgatcacacctttggccagcggggtcgaggaaacctggtcccgtctgctggagggacaatcgggcgcgggtccgattacgcggtttgatgcggtggcgtcgggtgttaccacgacctatgcctgcgaagtgccgcgcggcgatggcagcgatggcaccttcaatcccgatgactggatggcgccgaaagagcagcgcaagatcgaggatttcatcctctattccatcgcggccgccgagatggcctgcaaggatgccaactggctgcccgaggacgaagaggaccgcttgcgcaccggcgtgctgatcggctcgggtatcggcgggctgggctcgattgccgagaccgccaacctgatcaaggagaagggcccccgccgggtgtcgcccttctttatccccggcgcgctgatcaacctggcctcgggccaggtgtcgatccgtcacgggttcaaggggccgaaccactcggtggtgaccgcctgttcgaccggcgcgcatgcgattggcgatgccagccggatcatccgggccggtgacgcggatgtgatgatcgccggtggtggcgaggcctgtatctgcgaaatcggcattgccgggttcaacgcctgcaaggcgctgtcgaccaaatatgccgacaaccccaaggccgccagccgaccctatgacgccgaccgcgacgggttcgtgatgggtgagggcgccggcatcgtggtgctggaggactatgaacacgccaaggcgcgcggtgccaagatttatgccgaagtcttgggctatggcatgtcgggcgatgcctatcacatcactgcgccctccgagaccggcgacggggccgaacgctcgatgcgcgccgctctgcgcagcgccgggctggagccgtcggatctggattacatcaacgcccatggcacctcgaccatggccgacacgatcgagctgggcgcggtggagcggctgttgggcaaccatgcggccaatgtcaccatgtcctcgaccaaatcggccaccgggcacctgttgggcgctgccggcgcgatcgaggcgatcttttcgatcctggcgatccgcgatcaggtggccccgccaaccatcaacctggacaacccggcagttgagaccccggtcgatctggcgcccaatgccaagcgtgcgcgcaagatcgacgtggctctgtcgaactccttcggttttggcggcaccaatgcgagcgtgatcttcggaaaggccgactga

SEQ ID NO: 19933 - protein, 421 aa, Silicibacter pomeroyi DSS-3
MRRVVVTGLGLITPLASGVEETWSRLLEGQSGAGPITRFDAVASGVTTTYACEVPRGDGSDGTFNPDDWMAPKEQRKIEDFILYSIAAAEMACKDANWLPEDEEDRLRTGVLIGSGIGGLGSIAETANLIKEKGPRRVSPFFIPGALINLASGQVSIRHGFKGPNHSVVTACSTGAHAIGDASRIIRAGDADVMIAGGGEACICEIGIAGFNACKALSTKYADNPKAASRPYDADRDGFVMGEGAGIVVLEDYEHAKARGAKIYAEVLGYGMSGDAYHITAPSETGDGAERSMRAALRSAGLEPSDLDYINAHGTSTMADTIELGAVERLLGNHAANVTMSSTKSATGHLLGAAGAIEAIFSILAIRDQVAPPTINLDNPAVETPVDLAPNAKRARKIDVALSNSFGFGGTNASVIFGKAD

SEQ ID NO: 19934 - DNA, 1260 bp, Francisella tularensis subsp. tularensis SCHU S4
  CDS (1)..(1260): transl_table=11
atgaaatctaatcgtagagtagttgttactggcttaggcatggtaacacctttaggaaatgatgtccctacgacttgggctaatatcttagctggcaaaagtggagtagaaactataactggttttgacacacctgctcctgatattagcgagtttaaagttagatttgcagcaagaattaaaaattttgatgtagatgcacttgtaggtaaaaaagacgcaaagagagtagatcctttctgctactatggtattgccgctgctaatgaagctcttaaagatgctggaattgataaagtatctgaagaagattcatataagtttggcgtatgtgttagttctggtatcggtggtatcgagactttagaaactactaaagctgtaatagatacaaaaggaccttctaaaatttcacctttttgtataccatcctcaatcgtgaatatgctctctggaatcatttctataaatcatggcttacgtgggcctaatattccaatcgttactgcttgtactacaggtactcataatattggtatggctgctagattaatagctagtggtgatgctaatactatgcttgctggtggctctgaaaaagcaagtaacgctattggtatgggtggatttgctgctgctagagcattatcaacgcgcaatgatgatccacaaggtgcatcacgcccttgggacaaagacagagatggctttgtacttggcgatggtgctggtgttgttgtcttagaagaatatgaaagagctaaagctcgtggcgctaagatttatgctgaggttgtgggttttggtatgtctgctgatggttatcatatgactatgccttatgctccaggtcaagaaagatgtattcagaatgctttagctgatgctggacttgaaaataatcctgatgctatagactacgttaatgctcacagtacttcaactccactaggagatgttcaggagtcacaagttgttgaaaaagtaattggacaatatagaaaagatctagttatgagctcaacaaaatcaatgacaggacatttacttggtgcagctggtgctattgaatcaatatttagtgtattagcaataagagaccaagtagctccaccaacaataaacctacataatttagatgatggctgtaacttagattatgctgcaaatgctgctaagaaaatgaaaattgattatgtgctaaataactcttttggttttggtggcactaatggttctgtaattttcaaaaaaatctaa

SEQ ID NO: 19935 - protein, 419 aa, Francisella tularensis subsp. tularensis SCHU S4
MKSNRRVVVTGLGMVTPLGNDVPTTWANILAGKSGVETITGFDTPAPDISEFKVRFAARIKNFDVDALVGKKDAKRVDPFCYYGIAAANEALKDAGIDKVSEEDSYKFGVCVSSGIGGIETLETTKAVIDTKGPSKISPFCIPSSIVNMLSGIISINHGLRGPNIPIVTACTTGTHNIGMAARLIASGDANTMLAGGSEKASNAIGMGGFAAARALSTRNDDPQGASRPWDKDRDGFVLGDGAGVVVLEEYERAKARGAKIYAEVVGFGMSADGYHMTMPYAPGQERCIQNALADAGLENNPDAIDYVNAHSTSTPLGDVQESQVVEKVIGQYRKDLVMSSTKSMTGHLLGAAGAIESIFSVLAIRDQVAPPTINLHNLDDGCNLDYAANAAKKMKIDYVLNNSFGFGGTNGSVIFKKI

SEQ ID NO: 19936 - DNA, 1254 bp, Synechococcus elongatus PCC 6301
  CDS (1)..(1254): transl_table=11
atgactgaaaccggacgccagcgtgttgttattactggtttgggagccattactcccatcggtaatgatccaacggaatattggcagggactccttgccggtcgcaacggcatcgatctgattcggggctttgatgcgtctcgtcacgcctgcaaaattgccggggaggtcaaggactttgaccccacccagtacatggaccgcaaggatgctaagcggatggatcggtttgcacaactggcggttgctgccagtcgccaagcagtcgccgatgccaagctggacatcactgaactgaatgcggatgcgatcggggtgctgatcggctcaggcattggtggtttgagggtgatggaggaccagcagacggttttgctggaaaaaggccccgatcgctgcagccccttcatggtgccgatgatgatcgccaacatggcggcaggactgacggccatccagttgggtgccaaaggcccttgcaatgtcacggtgactgcttgcgctgcgggttctaatgcggtgggtgaagccttccggctgattcagcacggctatgcccaagccatgatctgtggcggaactgaatcctgtgtgaccccactggctatggccggttttgcggcctgtaaggcactgtcgctgcgcaacgatgacccggcccatgcttgccgtccctttgaccaaggccgtgatggttttgtgatgggcgaaggcgcagggattttggtcttggaatccttggagcatgcccaagcgaggggcgctcacatctatggcgaaatcgtcggctatggcatgacctgtgatgcctatcacatcacctcgccggtcccaggtggtttgggtgcggcccgggcgatcgagttggcgctccgcgatgccaatctgcagcccagccaagtcagctacatcaatgctcacggcaccagcacaccggccaacgacagcaccgaaacggcagctattaagaaagccctaggtgagcacgcctacaaaaccgtgatcagctcgactaagtcgatgaccggtcacctgttagggggctccggcggaattgaggcggtagcggcaaccctcgcgatcgctgaggacatggtgccgccgacgattaacctggaagatcccgatcccgattgcgacttggactatgtccccaatcaggcgcgatcgctaccggtggaagtggctttgtccaattccttcggctttggtgggcacaacgtcacgctggccttccggaaattccatccctag

SEQ ID NO: 19937 - protein, 417 aa, Synechococcus elongatus PCC 6301
MTETGRQRVVITGLGAITPIGNDPTEYWQGLLAGRNGIDLIRGFDASRHACKIAGEVKDFDPTQYMDRKDAKRMDRFAQLAVAASRQAVADAKLDITELNADAIGVLIGSGIGGLRVMEDQQTVLLEKGPDRCSPFMVPMMIANMAAGLTAIQLGAKGPCNVTVTACAAGSNAVGEAFRLIQHGYAQAMICGGTESCVTPLAMAGFAACKALSLRNDDPAHACRPFDQGRDGFVMGEGAGILVLESLEHAQARGAHIYGEIVGYGMTCDAYHITSPVPGGLGAARAIELALRDANLQPSQVSYINAHGTSTPANDSTETAAIKKALGEHAYKTVISSTKSMTGHLLGGSGGIEAVAATLAIAEDMVPPTINLEDPDPDCDLDYVPNQARSLPVEVALSNSFGFGGHNVTLAFRKFHP

SEQ ID NO: 19938 - DNA, 1242 bp, Bacillus clausii KSM-K16
  CDS (1)..(1242): transl_table=11
gtggaaaaacgacgtgtagttgtaacaggccttggggcggttacgccgctcgggctcgatgcaaaaacatcttgggagcaggcaaaagcaggaaagtcggggattggctatttgacccgcatagatgctgctgcttttccgatgaaagtggcggcagaaattgctgattttgacccaactgctgcgattgatcgtaaagaagttcggaaaatggatcgctttacccagtttgcggttgtttcagcccaagaagcattagcggatgcagggctagaaattacacctgaaaatgctgatcgcgttggcgtttggattggctctgggattggcgggatggaaacgtatgaaaatcaattccgcatctttttagaaaagggtcaacgccgcgttagcccatttttcgtgccgatgatgattccagatatggcgagcgggcaagtatcgatctttacaggagcaaaaggcccgaattcgtgctctgtaacggcgtgcgcatcagggacaaattcaatcggggacgcctttaaagtgatacagcgagggaatgcggacgttatgattacaggcggaagtgaagcgcctattaccaatatggctgtggctggtttctcatcagctaaagccattacaacaagcgatgacccggcaacggcttcgaggccattcgatgccaaccgcagcggctttgtcatgggtgaaggagcaggcatattaattttggaaagcttagagtctgcaaaagcccgaggtgcccacatttatgcggaaattgtcggctatggctcaacaggggacgccttccacgtcaccagccctgctcccgaaggtgaaggaggagcgcgcagcatgcaggcagcgattgacgacgccggtctagctcctgaagaggttagctacattaatgcccatggaacaagcacagagctcaatgatccttatgaaacaaaggcgataaaaaccgtgtttggcgagcatgcttataaactggcaataagttcaacaaaatcaatgacaggacacttgcttggagcggctggagcagtggaagccatcttctcagtgaaggcaattgatgaagacatcatcccgccaacgattaacttggaaacgccagaccctgagtgtgacttagattatgtgccgaacgaagcgagacaagcacctgtccatgttgctttaagcaactcactcggctttggcggccacaacgcctcactcgtatttaaaaaatgggttgaataa

SEQ ID NO: 19939 - protein, 413 aa, Bacillus clausii KSM-K16
MEKRRVVVTGLGAVTPLGLDAKTSWEQAKAGKSGIGYLTRIDAAAFPMKVAAEIADFDPTAAIDRKEVRKMDRFTQFAVVSAQEALADAGLEITPENADRVGVWIGSGIGGMETYENQFRIFLEKGQRRVSPFFVPMMIPDMASGQVSIFTGAKGPNSCSVTACASGTNSIGDAFKVIQRGNADVMITGGSEAPITNMAVAGFSSAKAITTSDDPATASRPFDANRSGFVMGEGAGILILESLESAKARGAHIYAEIVGYGSTGDAFHVTSPAPEGEGGARSMQAAIDDAGLAPEEVSYINAHGTSTELNDPYETKAIKTVFGEHAYKLAISSTKSMTGHLLGAAGAVEAIFSVKAIDEDIIPPTINLETPDPECDLDYVPNEARQAPVHVALSNSLGFGGHNASLVFKKWVE

SEQ ID NO: 19940 - DNA, 1215 bp, Campylobacter jejuni RM1221
  CDS (1)..(1215): transl_table=11
ttgaaaagagttgtagttacaggtattggtatgatcaatgcccttggtttagataaagaaagttcatttaaagcaatttgcaatggagaaagcggagtaaataaaattactctttttgatgctacggactttcctgttcaaattgcagctgaagttaaaaattttgatccattagaggttgttgatggcaaagaagtaaaaaaaattgaccgtttcatacaacttggaattaaagcagcaagagaagcaatgcaggatgctggatttagtgaagaattagataaagaagaatttggcattgtttcggcttctggtattggaggtttgcctaacatagaaaaaaattccattatttgttccgagcgaggtccgcgtaaaatttccccttttttcataccttcagcacttgtaaatatgttaggaggtttgatttctatagagcatgggcttaaagggccaaatatttcttgtgttacagcttgtgcagcaggaactcatgctataggagaagcttataaaagtatagctttgggaaatgctaaaaagatgttagtcataggtgcagaagctgcgatttgtcctgtaggtataggtggttttgcttcaatgaaagctttatcaactagaaatgaagatccagagcatgcttcaagaccatttgacaaagaaagagatggttttgtcatgggagaaggtgctggagctttagtttttgaggaatatgaagaggctaaaaaacgcggtgctacgatttatgctgaattaattggatttggagaaagtgcagatgcgcatcatattacttcaccaactttagatgggcctttaagagctatgaaaaaagctttaaatatggcagggaatccaaaggtagattatatcaatgcacatggaacttcaacccctgtaaatgacaaaaatgaaacagcagcaattaaagagctttttggcaataatatcccgcttataagttccaccaaaggacaaacaggtcattgcttgggtgctgcaggtgcaattgaagcagttgttagtgttatggctttaagagatggggtagttccacctacaatcaatcagcttgtaaaagatgatgaatgtgatcttgattatattccaaatatatcaagaaaagtagatttaaaagtggtgatgagtaattcttttggttttggtggcacaaatggctgtgttgtatttaaaaaagtagattaa

SEQ ID NO: 19941 - protein, 404 aa, Campylobacter jejuni RM1221
MKRVVVTGIGMINALGLDKESSFKAICNGESGVNKITLFDATDFPVQIAAEVKNFDPLEVVDGKEVKKIDRFIQLGIKAAREAMQDAGFSEELDKEEFGIVSASGIGGLPNIEKNSIICSERGPRKISPFFIPSALVNMLGGLISIEHGLKGPNISCVTACAAGTHAIGEAYKSIALGNAKKMLVIGAEAAICPVGIGGFASMKALSTRNEDPEHASRPFDKERDGFVMGEGAGALVFEEYEEAKKRGATIYAELIGFGESADAHHITSPTLDGPLRAMKKALNMAGNPKVDYINAHGTSTPVNDKNETAAIKELFGNNIPLISSTKGQTGHCLGAAGAIEAVVSVMALRDGVVPPTINQLVKDDECDLDYIPNISRKVDLKVVMSNSFGFGGTNGCVVFKKVD

SEQ ID NO: 19942 - DNA, 1272 bp, Ehrlichia ruminantium str. Welgevonden
  CDS (1)..(1272): transl_table=11
atgacaggaaaaagggtcgttattactgggttagggttagtaactccactaggaaatgatataaaaacagtatgggatcttttatgtaaaggaacttcaggaataaagaaaattaataggtttgatgcgtctgaccttgattgtaagatcggtggtcaaataataatgaagtcagattccgaaatacacacatttgatcctgcaaactggatagaagaaaaagaacttaaaaaaatggacatttttattcattttggtatagcagctgccattcaagcagttaatgactcaaacctgttagcttatagtaatcttgattataatagagtaggagtaatagttggatctggcataggtggattagcgtttatagagaaaacatctatttgtttacaagatcgtggaccaaaaagaattagcccattttttattcctgcaagtttgattaatttattacctggacacatatctataaaatatgggtttgcaggggttaatgatggaggagtaactgcatgtgcaacaagtgcacaaaccataggtaatgcagcaagaataatcaaatctggagaagcagatgttataatagcaggtggagctgaaagtgcaatatgtcgtatgggtgttgcagggtttgctgcattaaaggctttatcaacaaagttcaatgatactccagaattagcatcacgcccttgggataaacaacgtgacggttttgttatgggagaaggttcaggaataattgtacttgaagactacgaacatgctaaaaagcgtaatgcaaaaatatacgcagagttaatagggtatggtatgacggcagatgcatatcatataacagcacctcatccagaagggaaaggtggaaaaaaatctatggaattagcattaagtagtgctcaattaagtccagattctataaactacataaatgcacatggtacttctactccaattggagacagtactgaaattcacgcaataaaagaagtattcaaagatagtacatataagattccaatatcttcaacaaaatcttccataggacatttacttggagctgctggaagtgttgaggctatattttgtatacttgctattaatacaggaattgttccacctactctcaatttatatgattcatctgaggatccaaaactaaatcttgttccattaactgcacaagagcatacaataaattatgcgttatccaactcttttggttttggtggaacaaatgtatcactagtatttagtaagctatattaa

SEQ ID NO: 19943 - protein, 423 aa, Ehrlichia ruminantium str. Welgevonden
MTGKRVVITGLGLVTPLGNDIKTVWDLLCKGTSGIKKINRFDASDLDCKIGGQIIMKSDSEIHTFDPANWIEEKELKKMDIFIHFGIAAAIQAVNDSNLLAYSNLDYNRVGVIVGSGIGGLAFIEKTSICLQDRGPKRISPFFIPASLINLLPGHISIKYGFAGVNDGGVTACATSAQTIGNAARIIKSGEADVIIAGGAESAICRMGVAGFAALKALSTKFNDTPELASRPWDKQRDGFVMGEGSGIIVLEDYEHAKKRNAKIYAELIGYGMTADAYHITAPHPEGKGGKKSMELALSSAQLSPDSINYINAHGTSTPIGDSTEIHAIKEVFKDSTYKIPISSTKSSIGHLLGAAGSVEAIFCILAINTGIVPPTLNLYDSSEDPKLNLVPLTAQEHTINYALSNSFGFGGTNVSLVFSKLY

SEQ ID NO: 19944 - DNA, 1269 bp, Dehalococcoides ethenogenes 195
  CDS (1)..(1269): transl_table=11
atgactgataaccagccccaaaacagggttgtcataaccggcatcggcattgtcagccctcttggacttgatactcaaaccacctgggaaggcctgataaacggccgttcaggtatagaccatatcagcctctttgacgcatcaaatctggctgtccgctttggcggagaggtcaaagattttgacccggcgaactatatatcccgcaaggatatccgccgcatggaccgttttgcccagctggcggtagccgccggcaaacaggcactggaaaattcgggactgggggcagatgaaagcgtccggcaggatatcggggtaattgtaggcagcggcataggcgggctttcggttctctttgaacaaatcaaagttttcctggaacaagggccggacagagtcagcccttttttagtacccatgatgattgcagacatggccggagcccaggtttctatccagctgggtcttaaagggcctaatttctgtactacttcggcctgttcttctggttcagacgccataggcacagcatttgaaaaaatacgttttggttcggccaagattatcctggcgggcggtgccgaatctattatgaacccggttggttttgccggtttttcagccttaaaagccctatccacccgcaatgaagacccccagacggcttcgcgcccgtttgatgccaaccgggacggctttgttattgcggagggtgcggcgattttggttttggaagaaatggagtctgccaaagccaggggagcaaatatcattgccgagataatcggttacggcggctcttcagacgcttttcacataacccagccggtggaatccggtgtagaagccgcccgggctataaatattgccctgaataccgccggcatcaaaccggaagcggtagactatataaatgcccacggcacatctacccccctgaatgacaagatggaaaccaatgctattaaagtggccttcggggaacacgcccggaaactggccatcagctccaccaaatccatgctggggcatctgataggcggggccggggctattgaagcctctatctgcgccctgactattaaaaacggcattataccgcctaccataaactacaccactcctgaccctgactgtgatttagattacacccccaacaccgcccgcagagccaaggtaagggtggcgcttaataattcattcggtttcggcgggcataattcggtgcttatcctcagggaaatgggtgatgaaaatattggctaa

SEQ ID NO: 19945 - protein, 422 aa, Dehalococcoides ethenogenes 195
MTDNQPQNRVVITGIGIVSPLGLDTQTTWEGLINGRSGIDHISLFDASNLAVRFGGEVKDFDPANYISRKDIRRMDRFAQLAVAAGKQALENSGLGADESVRQDIGVIVGSGIGGLSVLFEQIKVFLEQGPDRVSPFLVPMMIADMAGAQVSIQLGLKGPNFCTTSACSSGSDAIGTAFEKIRFGSAKIILAGGAESIMNPVGFAGFSALKALSTRNEDPQTASRPFDANRDGFVIAEGAAILVLEEMESAKARGANIIAEIIGYGGSSDAFHITQPVESGVEAARAINIALNTAGIKPEAVDYINAHGTSTPLNDKMETNAIKVAFGEHARKLAISSTKSMLGHLIGGAGAIEASICALTIKNGIIPPTINYTTPDPDCDLDYTPNTARRAKVRVALNNSFGFGGHNSVLILREMGDENIG

SEQ ID NO: 19946 - DNA, 1245 bp, Staphylococcus epidermidis RP62A
  CDS (1)..(1245): transl_table=11
atgaataaaaataatagagttgttataacgggtatcggagccttatctccaattggtaacgatgctaaaacaacatgggacaatgcactaaaaggtgttaacggtatagataaaatcacaagaatagatactgatgattataatgtacatcttgctggtgaattgaaagattttaatatagaagaccacattgatagaaaagaagctcgccgtatggatcggtttacacaatacgcggtggttgctgcaagagaagcggttaaagatgcacaattaaatattaatgaaaaaaatgccgaccgtattggtgtatggattggttctggtatcggtggtatggaaactttcgaagttgcacatacaacacttgtagaaagaggaccacgtcgagtaagtccatttttcgttccaatgttaattcctgatatggctactggtcaagtttctattgatttaggtgccaaagggcccaatggttctacagtaacagcttgtgctacggggactaactcaataggtgaggcatttaaaattattcaacgtggtgatgcagatgcaatggtgactggtggaacagaggcacctattacacatatggcaatcgcagggtttagtgcaagtcgtgcattatctacaaacaatgaccctgaaacagcttgtcgaccattccaagaaggccgtgatggctttgttatgggtgaaggggcaggtattgttgtacttgaatcattagattcagctaaagagagaggcgctgaaatttacgctgaagttgtaggttatggttcctctggcgatgcacatcatattacagcacctgcgcctgaaggtgaaggtggctcacgagctatgcaagctgctttagatgatgctggaatcaaagctcaagatgtacagtatttaaatgcacatggcacaagtacacctgttggagatttatatgaggttcaagcgattaaaaatacattcggtgatgctgcgaagtcattaaaagtaagttcaactaaatcaatgactggacatttattaggtgctacaggtggaattgaagctattttttctgcgctatcaattcgtgattcaaaggtagcccctacaatacatgcaatcacaccagacgaagaatgtgatttggacattgttccgaatgtagcccaagacttagacattacctatgcaatgagtaatagtttaggatttggtggacataatgcagtgttagtatttaaaaaatttgaagactaa

SEQ ID NO: 19947 - protein, 414 aa, Staphylococcus epidermidis RP62A
MNKNNRVVITGIGALSPIGNDAKTTWDNALKGVNGIDKITRIDTDDYNVHLAGELKDFNIEDHIDRKEARRMDRFTQYAVVAAREAVKDAQLNINEKNADRIGVWIGSGIGGMETFEVAHTTLVERGPRRVSPFFVPMLIPDMATGQVSIDLGAKGPNGSTVTACATGTNSIGEAFKIIQRGDADAMVTGGTEAPITHMAIAGFSASRALSTNNDPETACRPFQEGRDGFVMGEGAGIVVLESLDSAKERGAEIYAEVVGYGSSGDAHHITAPAPEGEGGSRAMQAALDDAGIKAQDVQYLNAHGTSTPVGDLYEVQAIKNTFGDAAKSLKVSSTKSMTGHLLGATGGIEAIFSALSIRDSKVAPTIHAITPDEECDLDIVPNVAQDLDITYAMSNSLGFGGHNAVLVFKKFED

SEQ ID NO: 19948 - DNA, 1287 bp, Gluconobacter oxydans 621H
  CDS (1)..(1287): transl_table=11
atgagcgggactgcaactaacgggcggcgtgtcgtcgtaaccggtatcggtgttgtcagcccactggctgtgggcgcggaactgacatggaagcggctgatcgaaggacagtccggcattggccggatcacgcatttcgatccctccgaacttcctgcccaggtcgccggacaggttccggacggcccgacggcggaaggcggtctcacgttgtccgactgggtgccagtcaaggaccagaagaagatggaccgtttcatccatctgggccttgccgcagccatccaggctgtcgaggattcaggctggaagcctgaggacgaggacggtcgctgcgccacgggcgtgatgatcggctcgggtatcggcggtctccagacgatttatgacggctccctgacggtttcgagcggcaaggcccgccgtctgtcgccgttcttcattccctcggccctgatcaatctgatttccggtcacctctcgatccgctacgggttcaagggaccgaaccatgctgtcgtgacggcctgcgcgaccggcgttcatgccatcggtgatgcctcgcgcctcatccagtatggcgatgccgacgtgatggtggctggcggtgcggaagccgcgatctgctcgctcggtattgccggcttctgctcggcccgtgcgctctccaccggctccaacgatgatccgaccaaggcctcgcgcccgtgggacaaggaccgtgacggcttcatcatgggggagggtgccggtgtggtcgtgcttgaggaactcgagcatgccaagcgtcgtggtgcgaagatctatggtgagatcggcggctacggcatgtccggtgatgcgtatcacatcacggctcctgccgaaggtcacaacggtgcattccgtgccatgaaggccgcgctgcgcaacagcggcggcctgaccacggccgacatcgactatgtcaacgcccacggcacctccaccatggcggatgatcttgagcttgatgcggtcgagcgcttcttcggcgatgacgccaagcgtctggccatgtcctccacgaagtcggccattggccatcttctgggtgcggccggtgcggtcgaggctatcttctgccttcaggccatccgtgacggcatcgttccgcccacgctgaacctggacaacccggcgcgtgaaagcgtcatcgaccgcgtggcgcatgtggcccaggagcgcaagatcgacgttgccctgtccaacagcttcggctttggcggcacgaatgcgagcatcatcctcaagcgcttcaaggactga

SEQ ID NO: 19949 - protein, 428 aa, Gluconobacter oxydans 621H
MSGTATNGRRVVVTGIGVVSPLAVGAELTWKRLIEGQSGIGRITHFDPSELPAQVAGQVPDGPTAEGGLTLSDWVPVKDQKKMDRFIHLGLAAAIQAVEDSGWKPEDEDGRCATGVMIGSGIGGLQTIYDGSLTVSSGKARRLSPFFIPSALINLISGHLSIRYGFKGPNHAVVTACATGVHAIGDASRLIQYGDADVMVAGGAEAAICSLGIAGFCSARALSTGSNDDPTKASRPWDKDRDGFIMGEGAGVVVLEELEHAKRRGAKIYGEIGGYGMSGDAYHITAPAEGHNGAFRAMKAALRNSGGLTTADIDYVNAHGTSTMADDLELDAVERFFGDDAKRLAMSSTKSAIGHLLGAAGAVEAIFCLQAIRDGIVPPTLNLDNPARESVIDRVAHVAQERKIDVALSNSFGFGGTNASIILKRFKD

SEQ ID NO: 19950 - DNA, 1272 bp, Ehrlichia ruminantium str. Gardel
  CDS (1)..(1272): transl_table=11
atggcaggaaaaagggtcgttattactgggttagggttagtaactccactaggaaatgatataaaaacagtatgggatcttttatgtaaaggaacttcaggaataaagaaaattaataggtttgatgcgtctgaccttgattgtaagatcggtggtcaaataataatgaagtcagattccgaaatacacacatttgatcctgcaaactggatagaagaaaaagaacttaaaaaaatggacattttcattcattttggtatagcagctgccattcaagcagttaatgactcaaacctgttagcttatagtaatcttgattataatagagtaggagtaatagttggatctggcataggtggattagcgtttatagagaaaacatctatttgtttacaggatcgtggaccaaagagaattagcccattttttattcctgcaagtttgattaatttattacctggacacatatctataaaatatgggttcgcaggggttaacgatggaggagtaactgcatgtgcaacaagtgcacaaaccataggtaatgcagcaagaataatcaaatctggagaagcagatgttataatagcaggtggagctgaaagtgcaatatgtcgtatgggtgttgcaggatttgctgcattaaaggctttatcaacaaagttcaatgatactccagaattagcatcacgcccttgggataaacaacgtgacggttttgttatgggagaaggttcaggaataattgtacttgaagattacgaacatgctaaaaagcgtaatgcaaaaatatacgcagagttaatagggtatggtatgacggcagatgcatatcatataacagcacctcatccagaagggaaaggtggaaaaaaatctatggaattagcattaagtagtgctcaattaagtccagattctataaactacataaatgcacatggtacttctactccaattggagacagtactgaaattcacgcaataaaagaagtattcaaagatagtacatataagattccaatatcttcaacaaaatcttccataggacatttacttggagctgctggaagtgttgaggctatattttgtatacttgctattaatacaggaattgttccacctactctcaatttatatgattcatctgaggatccaaaactaaatcttgttccattaactgcacaagagcatacaataaattatgcgttatccaactcttttggttttggtggaacaaatgtatcactagtatttagtaagctatattaa

SEQ ID NO: 19951 - protein, 423 aa, Ehrlichia ruminantium str. Gardel
MAGKRVVITGLGLVTPLGNDIKTVWDLLCKGTSGIKKINRFDASDLDCKIGGQIIMKSDSEIHTFDPANWIEEKELKKMDIFIHFGIAAAIQAVNDSNLLAYSNLDYNRVGVIVGSGIGGLAFIEKTSICLQDRGPKRISPFFIPASLINLLPGHISIKYGFAGVNDGGVTACATSAQTIGNAARIIKSGEADVIIAGGAESAICRMGVAGFAALKALSTKFNDTPELASRPWDKQRDGFVMGEGSGIIVLEDYEHAKKRNAKIYAELIGYGMTADAYHITAPHPEGKGGKKSMELALSSAQLSPDSINYINAHGTSTPIGDSTEIHAIKEVFKDSTYKIPISSTKSSIGHLLGAAGSVEAIFCILAINTGIVPPTLNLYDSSEDPKLNLVPLTAQEHTINYALSNSFGFGGTNVSLVFSKLY

SEQ ID NO: 19952 - DNA, 1269 bp, Wolbachia endosymbiont strain TRS of Brugia malayi
  CDS (1)..(1269): transl_table=11
atgagcagaagagtagtagttactggtattggcttaattactccactggcagcagatgttgaaaatacttggcttaagttaataaatggtaagtctggtataaagaaaatcagtagattcgatgcttctgaccttagctgcaaagttgcagggcaagtccctttacaacatgacaacattgagcattgttttaacccattgaattacatctctgagaaagatctaaaaagaacagatcgctttattcattacggtattgcagctgccattcaggcagtagatgattcactaattttggaaaatcaaagcattaaccgagaacgtattggtgtggccattggctctggcataggtggtcttccatcaattcaggaaaatgtaattatcatgcaggaaaagggacccagacgtgttagtccattttttgttcctgcaagcttaataaatttaatatctggccatgtttctatcaaatatgaatttacaggtccaaatgattcagcagtaactgcatgtgcaacaggtgcacacgcaatcataaactcagcaagagctataaaacttggtgaagcagacgtgatgattgcaggtggatcagaaagtgcattgtgtagagttggaattgcaggttttgcatctatgaaggcattatcaactaaatttaacgataaacctaaagaagcttcaagaccgtggaatgaaggacgcgatggatttgtcatgggggaaggagcaggtatattagtgctagaagaatatgaacatgcaaaaaaaagaggtgcaaaaatatatgcagaactcactggatatgggctaacaggagatgcatatcatattacagcaccacatttagaaggaagaggtgcattaaaagcaatgcaactcgccttaaaaagtgcacaaataaatccaaatcaaatcgggtatatcaatgcacatggaacttcaacacctcttggagataaaattgaagtaatagcgataaaacaattattcgatgactatgcctataaaataccaatttcttcaactaaatcttctataggacatttacttggtgctgcaggaagtgttgaagcaatatttagcattcttgtgttaaacaatggaattgttccgccaactttaaatttacataaaccttcagaaggatgtgatttaaattttataccgcttaaagctcaagagcatgaaattcaatatgcgctttccaattcgtttggttttggtggtactaatgcatcacttgtttttggaaagtgtagttga

SEQ ID NO: 19953 - protein, 422 aa, Wolbachia endosymbiont strain TRS of Brugia malayi
MSRRVVVTGIGLITPLAADVENTWLKLINGKSGIKKISRFDASDLSCKVAGQVPLQHDNIEHCFNPLNYISEKDLKRTDRFIHYGIAAAIQAVDDSLILENQSINRERIGVAIGSGIGGLPSIQENVIIMQEKGPRRVSPFFVPASLINLISGHVSIKYEFTGPNDSAVTACATGAHAIINSARAIKLGEADVMIAGGSESALCRVGIAGFASMKALSTKFNDKPKEASRPWNEGRDGFVMGEGAGILVLEEYEHAKKRGAKIYAELTGYGLTGDAYHITAPHLEGRGALKAMQLALKSAQINPNQIGYINAHGTSTPLGDKIEVIAIKQLFDDYAYKIPISSTKSSIGHLLGAAGSVEAIFSILVLNNGIVPPTLNLHKPSEGCDLNFIPLKAQEHEIQYALSNSFGFGGTNASLVFGKCS

SEQ ID NO: 19954 - DNA, 1299 bp, Xanthomonas oryzae pv. oryzae KACC10331
  CDS (1)..(1299): transl_table=11
gtgtttttcaagcgtcatccgcaacccccaagcaccgtccgttacgtggttaggagatctgcaatgagtcgtcgtgttgtcgttaccggcatgggcattgtgtcgccgctgggcaatgatctggccaccagctgggatggaatcgtccacggccgctcgggcattggcccgatcacgcagatcgatgcctcgcagttcaccaccaagatcgccggtgaaatcaagaatttcgaccccacgctttttgtgtccgccaaggacgtcaagaagatggattcgttcatccactacggtctcggcgcctcgttcatggcgttggacgattccggcctggaaatcgacgacagcaatgccgaacgcgtgggcgccatcctcggctccggcatcggcgggctgctcggtattgaagagcagaccatcaaattccatgagggcggcgcgcgcaagatttccccgttctatgtgcccagcaccatcatcaacatgctgcctggccaggtgagcctgatcaaaggcctgaagggcccgacgttctcggcggtatcggcctgcgccacctccaaccattcgatcggcaccgcgatgcgcatgatccagcacggcgatgccgatgtgatgctggccggcggcgccgagcgcgggtcgtcgccgggttcggtgggcggcttctgcgcgatgaaggcgatgtccacccgcaacgacgacccgaccggcgcctcgcggccgtgggacaagcagcgcgatggcttcgtgctgggcgacggtgccggcgttctggtgctggaagaatacgaacacgccaaggcgcgtggcgcgcgcatctatgcagagctggttggcttcggcgccagttccgatgcgttccacatgaccgccccgagcgaagatggcgaaggcgcggcgcgcagcatggccgcggcgatgcgcgatgccaagctcaatcccgagcagatcggttatctcaatgcgcacggcacctccacgccgctgggcgatctggccgaaacgatcgcgatgaagcgcgcgctgggcgatcacgcctacaagaccatggtgagctcgaccaagtcgatgaccgggcatctgctcggcgcggccggtggcgtggaagcgatcttttcggtgatggcgctgcataccgggatcattccgccgaccatcaacctggaagagcccagcgaaggctgcgacctggattacgtgccgaacgtggcgcgcgaggtgcaggtggacgcggtaatgtccaacggcttcggctttggcggcaccaacggcacgctggtgttcaagcgcgtctga

SEQ ID NO: 19955 - protein, 432 aa, Xanthomonas oryzae pv. oryzae KACC10331
MFFKRHPQPPSTVRYVVRRSAMSRRVVVTGMGIVSPLGNDLATSWDGIVHGRSGIGPITQIDASQFTTKIAGEIKNFDPTLFVSAKDVKKMDSFIHYGLGASFMALDDSGLEIDDSNAERVGAILGSGIGGLLGIEEQTIKFHEGGARKISPFYVPSTIINMLPGQVSLIKGLKGPTFSAVSACATSNHSIGTAMRMIQHGDADVMLAGGAERGSSPGSVGGFCAMKAMSTRNDDPTGASRPWDKQRDGFVLGDGAGVLVLEEYEHAKARGARIYAELVGFGASSDAFHMTAPSEDGEGAARSMAAAMRDAKLNPEQIGYLNAHGTSTPLGDLAETIAMKRALGDHAYKTMVSSTKSMTGHLLGAAGGVEAIFSVMALHTGIIPPTINLEEPSEGCDLDYVPNVAREVQVDAVMSNGFGFGGTNGTLVFKRV

SEQ ID NO: 19956 - DNA, 1245 bp, Vibrio fischeri ES114
  CDS (1)..(1245): transl_table=11
gtgtccaaacgtcgtgtagttgttacaggcatgggtatgctaacaccggtgggtaacactgttgaagcatcttggaaagcgctgttagcaggccaaagcggtatcgttaatatcgaacactttgacaccactgagtttactactcgttttgcaggtctagttcaagactttaatgctgaagagtacatgtctaagaaagacgctcgtaagatggatttatttatccaatacggcgtagctgctggcattcaggcattagatgactcgggttttaaagttactgaagaaaatgctcaccgtatcggtgcagcaattggttcaggtattggtggccttggcttaattgaagctggctacaaagcattcagtgaaaaaggtcctcgtaagatcagcccgtttttcgtgccttctacaatcgttaatatgatcgcaggtcatatgtcgattattcgtggtttacgtggtccaaatatcgcaatttcaactgcttgtactacaggtcttcataatattggtcatgctgcacgtatgatcgcttatggtgatgctgatgcaatgctagctggtggtgctgagaaagcatctacagagctaggtatgggtggttttggtgcagcaaaagcactatctacaaataatgaaaaccctcaaggcgcatctcgtccttgggacaaaaaccgtgatggttttgttctaggtgatggtgctggcatgatggttcttgaagaatatgaacacgctaaagctcgtggtgctaagatctactgtgaacttgtaggttttggtatgagtggtgatgcttaccatatgacttcgccaacgccagatggttctggtggtgcgttagcgatggaagctgcgatgcgtgatgctggcgtaactggtgaacaaatcggttacgtaaatgcacacggtacgtctactcctgctggtgatgtagctgaaattaaaggcattaaacgtgctcttggtgaagctggctctaagcaagttttagtatcttcaacaaaatcaatgactggtcaccttttaggtgctgcaggttctgttgaagcaatcatcacagcgatgtctttggttgatcaaatcgttccaccaacaatcaaccttgatgatcctgaagaaggtttagatattgaccttgttccacacacagctcgtaaagtaacagatatggaatacgcaatctgtaactcattcggttttggtggtacaaacggttcactaatcttcaagaaaatgtaa

SEQ ID NO: 19957 - protein, 414 aa, Vibrio fischeri ES114
MSKRRVVVTGMGMLTPVGNTVEASWKALLAGQSGIVNIEHFDTTEFTTRFAGLVQDFNAEEYMSKKDARKMDLFIQYGVAAGIQALDDSGFKVTEENAHRIGAAIGSGIGGLGLIEAGYKAFSEKGPRKISPFFVPSTIVNMIAGHMSIIRGLRGPNIAISTACTTGLHNIGHAARMIAYGDADAMLAGGAEKASTELGMGGFGAAKALSTNNENPQGASRPWDKNRDGFVLGDGAGMMVLEEYEHAKARGAKIYCELVGFGMSGDAYHMTSPTPDGSGGALAMEAAMRDAGVTGEQIGYVNAHGTSTPAGDVAEIKGIKRALGEAGSKQVLVSSTKSMTGHLLGAAGSVEAIITAMSLVDQIVPPTINLDDPEEGLDIDLVPHTARKVTDMEYAICNSFGFGGTNGSLIFKKM

SEQ ID NO: 19958 - DNA, 1248 bp, Neisseria gonorrhoeae FA 1090
  CDS (1)..(1248): transl_table=11
atgagtcagagaagagtagtcattacaggcttaggtcaggtttcccctgtcggcaacactgccgcagaggcttgggacaacctgctcgccggcaaaagcggcatcggcgcgattacccgctttgacgcatccgacatcaacagccgtgtcgccggcgaagtgcgcggtttcgacatcggacaatacatcagcgcgaaagaagcgcgccggatggacgtgttcatccactacggcatcgccgccgcattgcaggcgattgccgattcgggtttggacgatgtggaaaacctcgacaaagaccgcatcggcgtgaacatcggttccggcatcggcggactgcccagcatcgaggccaccggcaaagccgtaatcgaaggcggcgcgcgcaaaatcaaccctttctttatccccggttcgctgatcaacctgatttccggacacgttaccatcctcaaaggctaccgcggcccgagctacggcatggtttccgcctgtaccaccggcgcgcacgccatcggcgattccgcccgactgatcaaatacggcgacgcggacataatggttgccggcggcgcggaaggcgcaatcagcaccttgggcgtgggcggttttgctgcgatgaaagccctctccacccgcaacgacgaccccgccaccgcttcccgtccgtgggacaaaggccgcgacggcttcgtcatcggcgaaggcgcgggcatattggtgttggaagaattagaacacgccaaaaaacgcggcgcgaaaatctacgccgaaatcgtcggcttcggcatgagttccgatgcttaccatatcaccgcgccgaacgaagaaggccccgcccttgccgttacccgcgcgctgaaagatgccggcatcaatcccgaagacgtggattacgtcaacgcgcacggcacgtccacccccttgggcgatgccaacgaaaccaaagccctcaaacgcgcgttcggcgaacacgcctgcaaaaccgtcatcagctcgaccaaatccatgaccggccacctgctcggcgcggcgggcggcgtggaggccgtgtacagcattttggcgatacacgacggcaaaatcccgccgaccatcaacatttttgaacaagacgttgaagccggctgcgatttggactactgcgccaacgaagcgcgcgacgcggaaatcgacgttgccatttccaactccttcggcttcggcggcaccaacggtacgctggtcttcaaacgcttcaaaggctga

SEQ ID NO: 19959 - protein, 415 aa, Neisseria gonorrhoeae FA 1090
MSQRRVVITGLGQVSPVGNTAAEAWDNLLAGKSGIGAITRFDASDINSRVAGEVRGFDIGQYISAKEARRMDVFIHYGIAAALQAIADSGLDDVENLDKDRIGVNIGSGIGGLPSIEATGKAVIEGGARKINPFFIPGSLINLISGHVTILKGYRGPSYGMVSACTTGAHAIGDSARLIKYGDADIMVAGGAEGAISTLGVGGFAAMKALSTRNDDPATASRPWDKGRDGFVIGEGAGILVLEELEHAKKRGAKIYAEIVGFGMSSDAYHITAPNEEGPALAVTRALKDAGINPEDVDYVNAHGTSTPLGDANETKALKRAFGEHACKTVISSTKSMTGHLLGAAGGVEAVYSILAIHDGKIPPTINIFEQDVEAGCDLDYCANEARDAEIDVAISNSFGFGGTNGTLVFKRFKG

SEQ ID NO: 19960 - DNA, 1263 bp, Bacteroides fragilis NCTC 9343
  CDS (1)..(1263): transl_table=11
atggaattaaagagagttgtagtaacaggtctgggcgccattactcctgttggcaataatgtcccggaattctgggagaacctcgtgaacggggttagtggagcaggacctattactcatttcgatgcatcgcaattcaagactcaatttgcatgtgaagtcaaaggcttcgatgcaactcaatatatcgaccgcaaagaggctcgtaaaatggacctgtacacacagtatgccgttgccgttgccaaagaagcagttgcagactcgggtcttgatatcgaaaatgaggatttaaacagaatcggcgttatttttggtgccggtatcggtggtatacgtacatttgaggaggaaacgagtaattacgcccttcacaaagaaaacggtcctaagtacaatccgttcttcatccctaagatgatttcagatattgctgccggacagatttctattatgtatggcttccacggcccgaactacgcaacttgttctgcatgtgcaacttctactaacgccatcgccgatgcattcaacctgatccgtctgggtaaggcaaacgtgattgtatccggtggttcggaagccgctatcgcagctgccggtgtaggaggtttcaatgctatgcatgcattgtcaactcgtaacgacgaaccacaatctgcatctcgtccgttcagtgcaagccgtgacggctttgtaatgggtgaaggtggtggatgtttgattcttgaagaactggaacatgcaaaagcccgtggcgcaaaaatctatgcagaagttgccggcgtaggtatgtctgctgatgctcaccacctgacagcatctcatccggaaggactcggtgcaaaattggtgatgaagaatgccctggaagacgcagagatgagtcctgaagaagtggattacatcaatgttcatggaacatctactccggtcggagatatatcggaagccaaagcaatcaaagaagtatttggtgaacatgcttttgagttgaatatcagttcaaccaaatcaatgacaggtcacttgttgggcgctgccggtgcggtagaatcaattgcaagtattctggctattaagaacggcatcgttcctccgactatcaatcatgccgaaggtgacaatgacgagaacattgactataatcttaatttcacgttcaacaaagcacagaaacgcgaaattaatgttgccctttcgaatacattcggattcggcggtcacaatgcttgtgtaatcttcaagaaatacgctgaataa

SEQ ID NO: 19961 - protein, 420 aa, Bacteroides fragilis NCTC 9343
MELKRVVVTGLGAITPVGNNVPEFWENLVNGVSGAGPITHFDASQFKTQFACEVKGFDATQYIDRKEARKMDLYTQYAVAVAKEAVADSGLDIENEDLNRIGVIFGAGIGGIRTFEEETSNYALHKENGPKYNPFFIPKMISDIAAGQISIMYGFHGPNYATCSACATSTNAIADAFNLIRLGKANVIVSGGSEAAIAAAGVGGFNAMHALSTRNDEPQSASRPFSASRDGFVMGEGGGCLILEELEHAKARGAKIYAEVAGVGMSADAHHLTASHPEGLGAKLVMKNALEDAEMSPEEVDYINVHGTSTPVGDISEAKAIKEVFGEHAFELNISSTKSMTGHLLGAAGAVESIASILAIKNGIVPPTINHAEGDNDENIDYNLNFTFNKAQKREINVALSNTFGFGGHNACVIFKKYAE

SEQ ID NO: 19962 - DNA, 1251 bp, Chlamydophila abortus S26/3
  CDS (1)..(1251): transl_table=11
atgagtaaaaaacgtgtagttgtcacgggattgggcgttgtttcttgtttaggtaacgaaatagacaccttttatgataatttgcttgccggtgttagcggtgttcgtacgatcacttctttcccatgcgaagattatgctacgcgttttgctggttggatccccgaatttaatcccgagccctatttagataaaaagcaagcacgaagagtagattgttttattacttacgccgtagttgcagctaagaaagctattgctatgtctagatgggacaaagataatcttccagcggatcctcttcgttgcggtgtgatcatcggttcgggtatgggaggattacagacattggacgatggtatggaacgcctgattcttggtaataaaaaactctctccatttttcataccttacattatcactaatatggctcctgccctgattgctatggatttcgggctgatgggaccgaactattccatatctacagcttgcgcaacttcaaactattgtatagatgccgcgtatcagcacctggtttctggacgcgcggatattatagtttgtggaggtaccgaagctgccgtgaatcgtgttggcttggcaggttttattgctaatcgtgccttatcagaaaggaatgatgcccctcaagaagcctctcgtccttgggatagggatagggacgggtttgtcattggtgaaggagccggaatcttagttttggaaaccttggaaaacgctttaaagcgaggagctcctatatatgcagagatcctcggtgcgtatactacttgcgacgcttttcatattacagctcctagagatgacggagaagggatcacctcctgtattcttggggctttagaaagttctggtattcctaaagaacgcgtaaactatattaacgctcatggtacatcaactcctctaggggatatatcggaagttttagcattgaaaaaagctttcggtagtcatgtaaagaagctgcgaatgaattccacgaagtcacttatagggcattgcctaggagctgctgggggcgtcgaagctgttgcgacaattcaagcaattcaaacggggaaattacatcctacgattaatttagaaaacccgattacggaaattgatgattttgacgtagttgcaaataaagcccaggattgggatatagatgtcgctatgtcgaattcttttggttttggtggacataattcaacgatattattctcgaggtatataccctaa

SEQ ID NO: 19963 - protein, 416 aa, Chlamydophila abortus S26/3
MSKKRVVVTGLGVVSCLGNEIDTFYDNLLAGVSGVRTITSFPCEDYATRFAGWIPEFNPEPYLDKKQARRVDCFITYAVVAAKKAIAMSRWDKDNLPADPLRCGVIIGSGMGGLQTLDDGMERLILGNKKLSPFFIPYIITNMAPALIAMDFGLMGPNYSISTACATSNYCIDAAYQHLVSGRADIIVCGGTEAAVNRVGLAGFIANRALSERNDAPQEASRPWDRDRDGFVIGEGAGILVLETLENALKRGAPIYAEILGAYTTCDAFHITAPRDDGEGITSCILGALESSGIPKERVNYINAHGTSTPLGDISEVLALKKAFGSHVKKLRMNSTKSLIGHCLGAAGGVEAVATIQAIQTGKLHPTINLENPITEIDDFDVVANKAQDWDIDVAMSNSFGFGGHNSTILFSRYIP

SEQ ID NO: 19964 - DNA, 1263 bp, Brucella abortus biovar 1 str. 9-941
  CDS (1)..(1263): transl_table=11
atgaggcgtgtcgtcatcaccggtctcggtctggtgtcaccgctcgcaagcggtgtggaagagacttggaagcggcttcttgccggtgaaagcggggctcgccgcgttacggaattcgaggtggacgatctggcctgccagattgcctgccgcattcccgttggcgatggcacgaacggtacgttcaatcccgacctgcatatggacccgaaggaacagcgcaaggtcgatcctttcatcgtttatgccgtcggtgcagccgatcaggctctggatgatgccggctggcacccggaaaatgatgaggatcaggtccgcaccggcgttcttatcggttcgggcatcggcggcatcgaaggcattgtcgaggcgggctacacgctgcgcgacaagggcccgcgccgtatttcgcccttcttcattccgggccgtctcatcaatctggcctccggccatgtgtcgatcaagcacaagctgcgcgggccgaaccactcggtcgtcacggcctgtgcaaccggcacgcacgctattggcgatgccgcccgcctcattgctttcggcgatgcggatgtgatggttgccggtggcacggaatcgccggtgagccgcatttcgcttgctggctttgccgcctgcaaggcgctttccaccgagcgcaatgacgatccgaccgccgcttcacgtccttatgacgaggatcgtgacggcttcgtcatgggcgaaggcgctggcattgtggtgcttgaagagctggaacacgctttggcgcgcggtgcgaagatttatgccgaagtcatcggctatggcatgtcgggcgatgccttccatatcacggccccgaccgagagcggtgagggcgcacagcgctgcatggtggcggctctcaagcgtgccgggatcgtgccggacgagatcgactatatcaatgcgcatggcacgtccaccatggccgatacgatcgagcttggcgcggtggagcgcgtggtgggtgaggcggctgcgaagatttcgatgtcttccaccaaatcatccatcggccacctgttgggtgcggcaggggctgccgaagcggtcttctccacgctggccattcgcgacaatatcgcgcctgccacactcaatctggacaatccggcggcgcagaccaggatcgatctcgtgccgcacaagccgcgcgaacgcaagatcgatgtggcgctgtcgaattcgttcggtttcggtggcaccaatgcatcgctggtgctgcgccgctacacggcctga

SEQ ID NO: 19965 - protein, 420 aa, Brucella abortus biovar 1 str. 9-941
MRRVVITGLGLVSPLASGVEETWKRLLAGESGARRVTEFEVDDLACQIACRIPVGDGTNGTFNPDLHMDPKEQRKVDPFIVYAVGAADQALDDAGWHPENDEDQVRTGVLIGSGIGGIEGIVEAGYTLRDKGPRRISPFFIPGRLINLASGHVSIKHKLRGPNHSVVTACATGTHAIGDAARLIAFGDADVMVAGGTESPVSRISLAGFAACKALSTERNDDPTAASRPYDEDRDGFVMGEGAGIVVLEELEHALARGAKIYAEVIGYGMSGDAFHITAPTESGEGAQRCMVAALKRAGIVPDEIDYINAHGTSTMADTIELGAVERVVGEAAAKISMSSTKSSIGHLLGAAGAAEAVFSTLAIRDNIAPATLNLDNPAAQTRIDLVPHKPRERKIDVALSNSFGFGGTNASLVLRRYTA

SEQ ID NO: 19966 - DNA, 1236 bp, Xanthomonas campestris pv. campestris str. 8004
  CDS (1)..(1236): transl_table=11
atgagtcgtcgtgttgtcgttaccggcatgggcatggtgtcgccgctgggcaatgatctggccaccagttgggatgggatcatccacggtcgctcgggcattggcccgatcaggcagatcgatgcctcgcagttcaccaccaggatcgcgggcgagatcaagaatttcgatcccacccagtttgtgtccgccaaggacgtcaagaagatggattcgttcatccactacggtgtcggcgcctcgttcatggcgttggacgattccgggctggagatcaacgaaagcaatgccgaacgcgtgggcgccattctgggctccggtatcggcgggctgctcggcatcgaagagcagaccatcaaattgcatgagggcggcgcgcgcaagatttcgccgttctatgtgcccagcaccatcatcaacatgctgccgggccaggtgagcctgatcaaaggcctgaagggcccgacgttctcggccgtgtcggcctgcgccacctccaaccattcgatcggcactgcgatgcgcatgatccagcacggcgatgccgacgtgatgctggccggtggcgccgagcgcggttcgtccccaagttcggtgggcgggttctgcgccatgaaggcgatgtccacgcgcaacgacgaccccaccgctgcatcgcgtccgtgggacaagcagcgcgacgggttcgtgctgggtgacggcgccggcgtgctggtgctggaagagtacgaacacgccaaggcacgcggcgcgcgcatctatgcagagctggtcggtttcggtgccagttcggatgcgttccacatgactgcgcccagcgaagatggcgaaggcgcggcgcgcagcatggccgcggcgatgcgcgatgccaagctcaaccccgagcagatcggctacctcaacgcgcacggcacctccacgccgctgggcgatctggccgaaaccatggcgatgaagcgtgcgctgggcgaccacgcgtacaagaccatggtcagctcgaccaagtcgatgaccggccacctgctcggcgcggccggcggcgtggaagcgatcttctcggtgatggcgctgcataccggcatcattccgccgaccatcaacctggaagagcccagcgaaggctgcgatctggactacgtgccgaacgtggcgcgcgaggtgcaggtggatgcggtgatgtccaacggcttcggctttggcggcaccaacggcaccctggtgttcaagcgcatctga

SEQ ID NO: 19967 - protein, 411 aa, Xanthomonas campestris pv. campestris str. 8004
MSRRVVVTGMGMVSPLGNDLATSWDGIIHGRSGIGPIRQIDASQFTTRIAGEIKNFDPTQFVSAKDVKKMDSFIHYGVGASFMALDDSGLEINESNAERVGAILGSGIGGLLGIEEQTIKLHEGGARKISPFYVPSTIINMLPGQVSLIKGLKGPTFSAVSACATSNHSIGTAMRMIQHGDADVMLAGGAERGSSPSSVGGFCAMKAMSTRNDDPTAASRPWDKQRDGFVLGDGAGVLVLEEYEHAKARGARIYAELVGFGASSDAFHMTAPSEDGEGAARSMAAAMRDAKLNPEQIGYLNAHGTSTPLGDLAETMAMKRALGDHAYKTMVSSTKSMTGHLLGAAGGVEAIFSVMALHTGIIPPTINLEEPSEGCDLDYVPNVAREVQVDAVMSNGFGFGGTNGTLVFKRI

SEQ ID NO: 19968 - DNA, 1281 bp, Rickettsia felis URRWXCal2
  CDS (1)..(1281): transl_table=11
atgtcgaaccaaagagtaaataaaagagtagttattactggacttggacttgttactcctgttgggcttaatgttagctcatcttggaaaaatattgtaaatgggataagcggtataaaaactattacggaatttgacacttctaaacttgcgtgtaaaattgccggacttatagataactctgagaaagatggatttaaacttgaaaacttcacacaagcagatgacgttaatagactaagtaaaatggataaatttatccattacggagtagcagccgcaaccgaagcagttgaagatagcggctggttacccgaagatgaagaatctcgtgatagaaccggtttgatattaggctcaggaatcggtgggcttaaaatgatcgaagatacctctatcaaactttatcaagaaaataacggcaaagttagccctttctttatccccgcttcattaattaatcttttatccggtcttgtttctataaaatacggttttagcggtccaaatcaagcagcagtaacggcttgctctacaggagcacatgctataggcgatgctatgcgtatgataaagcacggctatgcagatgttatggtcgcaggcggtgcagaagcccctgttacacctgttggagttgcaggtttcgttgctgctagagcattatgtactaaatataacgataatcctgaaaaagcctcaagaccttgggataaagaccgcagcggttttgttatgggtgaaggagcaggcgttgtagtcttggaagaatatgagcatgccttaaatcgaggggctaaaatttacggtgaagttataggatacggctctacaggtgatgcgtaccatatgacagcaccgcatcctgaaggtagaggagcttatagagcgatgagagatgcagtgctagatgcagctatcactcccgatatgattgattacattaatgcacatggcacttctactaatctcggtgatggaatagaattagcagcggtacaaaaattatttttagaagcgaatccccaaattttaatgtcttctactaaatcatcaataggacatttgcttggtgcggcaggaagcgttgagtttatcttttcagctcttgcaattcgagatcagattgcaccgccaactttaaatttagataaccctatggatgaggttaagatagatttagtaaaattaaaagctagagaaactaaaatagactacgtgctttccaactcattcgggttcggcggtactaatgctagcttagtcattaggaagatttga

SEQ ID NO: 19969 - protein, 426 aa, Rickettsia felis URRWXCal2
MSNQRVNKRVVITGLGLVTPVGLNVSSSWKNIVNGISGIKTITEFDTSKLACKIAGLIDNSEKDGFKLENFTQADDVNRLSKMDKFIHYGVAAATEAVEDSGWLPEDEESRDRTGLILGSGIGGLKMIEDTSIKLYQENNGKVSPFFIPASLINLLSGLVSIKYGFSGPNQAAVTACSTGAHAIGDAMRMIKHGYADVMVAGGAEAPVTPVGVAGFVAARALCTKYNDNPEKASRPWDKDRSGFVMGEGAGVVVLEEYEHALNRGAKIYGEVIGYGSTGDAYHMTAPHPEGRGAYRAMRDAVLDAAITPDMIDYINAHGTSTNLGDGIELAAVQKLFLEANPQILMSSTKSSIGHLLGAAGSVEFIFSALAIRDQIAPPTLNLDNPMDEVKIDLVKLKARETKIDYVLSNSFGFGGTNASLVIRKI

SEQ ID NO: 19970 - DNA, 1245 bp, Staphylococcus haemolyticus JCSC1435
  CDS (1)..(1245): transl_table=11
atgactgagaataaacgagttgtaattactggtatgggtgcattatcacctattggcaatgatgcccagacaagttgggaaaatgccttgaaaggtgttaatggaatcgatactattactagaatagatacagaagattataatgttcatttagcaggtgaacttaaagattttaatattgaagaccatattgaaaagaaagaagctcgacgtatggaccgtttcacacaatatgcggtagttgcagcacgtcaagcagttgaagatgctaaattggaaatcaatgatgaaactgctaatcgcataggtgtatggattggttcagggattggtggtatggaaacgtttgaaacagcacatacaacacttcaaaataagggtccaagaagagtaagtccattcttcgtacctatgttaattcctgatatggcaaccggccaagtatcaattgatttaggtgcaaaagggccaaatggttctacagttacagcatgtgcaactggtacaaactcaattggtgaagcatttaaaatcatacaacgtggcgatgcagatgcgatgataacaggtggtacagaagcgccaattacacacatggcacttgcaggattcagtgctagtcgtgccttgtctacaaatgatgataaagaaacagcttgtcgtccattccaagaaggtcgagatggcttcgttatgggtgaaggtgctggtattttagtgattgaatcattagaatcggcacaagcacgtggtgctcaaatctatgctgaaatagttggttatggttcaactggtgatgcatatcatattacagctcccgctcctgaaggtgaaggtggttcacgtgcaatgcaagcagcacttgatgatgcaggtattgaagcaaaagatgttcaatatcttaatgcacatggcacaagtacacctgtaggtgatatgtatgaaattagagcgatcaagaatacatttggagatgctgctaatcaactaaaagttagctctactaaatcaatgactggtcatttattaggtgctactggtggtttagaggctatcttctcagcattatctattcgtgactctaaagtcgcaccaactattcatgcgaatacaccagatcctgaatgtgatctagacatcgttccaaatgaagcgcaagatttagaaattacttatgcaatgagtaacagtcttggatttggtggtcataatgctgtattagtatttaagaaatttgaagattaa

SEQ ID NO: 19971 - protein, 414 aa, Staphylococcus haemolyticus JCSC1435
MTENKRVVITGMGALSPIGNDAQTSWENALKGVNGIDTITRIDTEDYNVHLAGELKDFNIEDHIEKKEARRMDRFTQYAVVAARQAVEDAKLEINDETANRIGVWIGSGIGGMETFETAHTTLQNKGPRRVSPFFVPMLIPDMATGQVSIDLGAKGPNGSTVTACATGTNSIGEAFKIIQRGDADAMITGGTEAPITHMALAGFSASRALSTNDDKETACRPFQEGRDGFVMGEGAGILVIESLESAQARGAQIYAEIVGYGSTGDAYHITAPAPEGEGGSRAMQAALDDAGIEAKDVQYLNAHGTSTPVGDMYEIRAIKNTFGDAANQLKVSSTKSMTGHLLGATGGLEAIFSALSIRDSKVAPTIHANTPDPECDLDIVPNEAQDLEITYAMSNSLGFGGHNAVLVFKKFED

SEQ ID NO: 19972 - DNA, 1245 bp, Pseudomonas fluorescens Pf-5
  CDS (1)..(1245): transl_table=11
gtgtcgcgtagacgcgtcgtagtcaccggtatgggtatgttgtcgccactgggtacggatgtgccaagcagctggcagggcattctggctggccaaagtggcatcggtctgatcgaacacaccgacctttctgcctattccacccgttttggcggctcggtaaagggcttcaatgtcgaggaatacctgtcggtcaaagaggcccgcaaactcgacctgttcattcaatacggcctggcagccggtttccaggcggtacgcaacgccggtctggaagtcaccgatgccaaccgtgaacgcatcggcgtggccatgggctcgggtattggcggtttgaccaatatcgaggaaaccagccgcatcctgcacgattccggcccacgacggatttctccgttcttcgtgcctggctcgatcatcaacatgatttccggtttcctgtccatccacttgggtgcccaggggccgaactacgccatttccactgcgtgcaccaccggtacccactgcatcggcatggctgcgcgcaacatcgcctacggcgaagccgacgtgatgatcgccggcggtgctgaaatggctgcctgtggcctgggcatgggcggcttcggcgcgtcccgtgcactgtcgacccgcaacgacgagccgacccgcgccagccgtccctgggacaaggggcgtgatggcttcgtcctgtccgacggcgccggcgccctggttctggaagagctggagcacgccaaggctcgtggggccaccatctatgcggagctgatcggcttcggcatgagcggtgacgcctatcacatgacgtcgcctcccgccgatggtgccggtgctgcgcgctgcatcgccaatgccctgcgcgacgccaagctcaacgtggaccaggtgcagtacatcaacgcccatggcacttcgaccccggccggcgacctggccgaggccgaagcgatcaagagcgtgttcggcgatcacgcctacaagctggcggtcagttccaccaagtccatgacgggtcacctgctgggtgccgcgggggcgatcgaggcgatcttcagtgtgctggcaatcaacagccaggccgcgccgcccaccatcaacctggatgagccggatgaaggctgtgacctcgatttcgtgccgcacaccgcgcgcagcatggacatcgacgtagtgctgtccaactccttcggttttggtggcaccaacggctccctggtgttccgccggttctccgagtga

SEQ ID NO: 19973 - protein, 414 aa, Pseudomonas fluorescens Pf-5
MSRRRVVVTGMGMLSPLGTDVPSSWQGILAGQSGIGLIEHTDLSAYSTRFGGSVKGFNVEEYLSVKEARKLDLFIQYGLAAGFQAVRNAGLEVTDANRERIGVAMGSGIGGLTNIEETSRILHDSGPRRISPFFVPGSIINMISGFLSIHLGAQGPNYAISTACTTGTHCIGMAARNIAYGEADVMIAGGAEMAACGLGMGGFGASRALSTRNDEPTRASRPWDKGRDGFVLSDGAGALVLEELEHAKARGATIYAELIGFGMSGDAYHMTSPPADGAGAARCIANALRDAKLNVDQVQYINAHGTSTPAGDLAEAEAIKSVFGDHAYKLAVSSTKSMTGHLLGAAGAIEAIFSVLAINSQAAPPTINLDEPDEGCDLDFVPHTARSMDIDVVLSNSFGFGGTNGSLVFRRFSE

SEQ ID NO: 19974 - DNA, 1269 bp, Pseudomonas fluorescens Pf-5
  CDS (1)..(1269): transl_table=11
atgagcaaacgcatcgtagtcaccggcatgggcgcaatcacgccactgggttgtggagtcgaacaggtatggcggcgcctgctggcaggccagtccggcatccgctcgttaccggaagaactcatcggcgagctgtcgaccaccatcggcggccaggtgcccgactcgctccaggacccggaggccggcttcgacccggaccaactgctggcccccaaggaacagcgcaagatggatcgcttcatcctcttcgccctggccgcggccgaggaggccctggcccaggccggctggaagccggataccgcagaagcccaggaacgcacggccaccatcatcgcctccggggtgggcggcttcccggccatcgccgaagcggtacgtaccaccgacagcaagggcccgcgccgcctgtcgccgttcaccattccctcgttcctgagcaacatggccgccgggcacgtgtcgatccgccatggtctcaagggccccctgggcgcgccggtgaccgcctgtgccgccggggtccaggcgattggcgatgccgcgcggatgatccgcgccggggaaatcgacatcgctgtgtgtggcggtgcagaggcggccatccaccgggtcagcctgggcggcttcgccgcagcccgcgccttgtccagcgaattcaacgacaccccggaacgcgcttcccgtccgttcgaccaggctcgggatggttttgtcatgggtgaaggcgccggcctgctggtcatcgaggaactggaacatgccctggcccgcggcgcccggcccatcgccgagctggtgggctacggcaccagcgccgacgcctaccacatgacggccggcccggaagacggcgacggcgcccgtcgcgccatgcagcaggccctgcgccaggccggtatccaggcatcccaggtgcagcacctcaatgcccacgccacctccacccccgtgggtgacaaaggcgagctggctgctatcagaacggtgttcggcaccgacagtggactggccatcagcgccaccaaatccgccactggccacctgctgggtgcggccggaggaatcgaggcgatcttcaccatcctcgccctgcgcgatcagatcgccccggccaccctcaacctggaaaacccggacagcgccgccgcagggctggacctggtcagggggcaggctcgccaactggccatgcaatacgcactgtccaatggcttcggctttggcggggtgaatgccagcgtgctgttcaagcgctgggaatag

SEQ ID NO: 19975 - protein, 422 aa, Pseudomonas fluorescens Pf-5
MSKRIVVTGMGAITPLGCGVEQVWRRLLAGQSGIRSLPEELIGELSTTIGGQVPDSLQDPEAGFDPDQLLAPKEQRKMDRFILFALAAAEEALAQAGWKPDTAEAQERTATIIASGVGGFPAIAEAVRTTDSKGPRRLSPFTIPSFLSNMAAGHVSIRHGLKGPLGAPVTACAAGVQAIGDAARMIRAGEIDIAVCGGAEAAIHRVSLGGFAAARALSSEFNDTPERASRPFDQARDGFVMGEGAGLLVIEELEHALARGARPIAELVGYGTSADAYHMTAGPEDGDGARRAMQQALRQAGIQASQVQHLNAHATSTPVGDKGELAAIRTVFGTDSGLAISATKSATGHLLGAAGGIEAIFTILALRDQIAPATLNLENPDSAAAGLDLVRGQARQLAMQYALSNGFGFGGVNASVLFKRWE

SEQ ID NO: 19976 - DNA, 1416 bp, Psychrobacter arcticum 273-4
  CDS (1)..(1416): transl_table=11
atgagccagcacagcagtttacccaacgactcacttatcgaccaagctatgaatagtactattaatagccctactgccaatactcctgccaccgctcagacaaaaaaacgtcataagccgccacatttcgagcgcactgatgatatgcgtgtcgtagtgactggcatgggtgccgttacgccattgggattagatgtcgaaagctcatgggcgaagctccttaaaggtgaaagcggtatcacagctatcagtcattttgatgcgtctggttatcgcgcgcaaatcgcaggcgtggtcaaagactttgatgccaagcaatacatgaacgccaaagacgcgcgccgttatgatgagtttatacattatgcggttgctgcctcttctatggcgctacatcaagcaggttttatcgaggaagtgagcgctgctgacgctccggtacaaggggttgatcaagagcgctttggggtgattataggttcagggattggtggtattcaaaacatcgaaaacagccgtgataccttacgtgaaaaaggctcaagcaaagtctccccctttattattccaggctctattgttaatatggcagcgggcttagtagctattaaacactgtttgaaaggtcccaatcttgcaacctcaactgcctgtaccacagcgactcatgcgattggtctagcagcgcggttgattgcttatggtgacgccgatgtgatactggcaggcggtagtgaaaaaggctcaagcccgcttggtatctcaggttttggtgctatgcatgccctctcaacccgcaatgatgagccaactcgcgcttcacgcccgtttgataaagatcgcgatggttttgtacttggtgatggtgctggcgtaatgatactagaaagccttgctcatgcaaaagcacgcggtgcgacgatattggctgaattggttggctttggtatgagtgacgatgccagtcatatcaccgcgcctccagaagatggtagcggtgcggcacgagcgatgcgtaatgccttaaatgatgcgggtattgagccgtcagtcgtgggctatgtcaatgcccatggcaccagcacgcctgccggtgatgtcgcggaatctatcgccattgaaacggtattttcgcctgtgaaagacaccattttggtcagctcaaccaaatcgatgaccggtcatctgcttggcgctgcgggtggtgttgaagctatttttactgtacttgctctgcaacatcagcaagtaccgccaacgattaatttggacaatattgaagacaactgtaatttggattatgtcgccaatcaatcgcgtcaagtagataatttgcagtacgcggtatccaatagctttggttttggcggcaccaacggctcactaatatttgcacgttggcctgtcaatcagtaa

SEQ ID NO: 19977 - protein, 471 aa, Psychrobacter arcticum 273-4
MSQHSSLPNDSLIDQAMNSTINSPTANTPATAQTKKRHKPPHFERTDDMRVVVTGMGAVTPLGLDVESSWAKLLKGESGITAISHFDASGYRAQIAGVVKDFDAKQYMNAKDARRYDEFIHYAVAASSMALHQAGFIEEVSAADAPVQGVDQERFGVIIGSGIGGIQNIENSRDTLREKGSSKVSPFIIPGSIVNMAAGLVAIKHCLKGPNLATSTACTTATHAIGLAARLIAYGDADVILAGGSEKGSSPLGISGFGAMHALSTRNDEPTRASRPFDKDRDGFVLGDGAGVMILESLAHAKARGATILAELVGFGMSDDASHITAPPEDGSGAARAMRNALNDAGIEPSVVGYVNAHGTSTPAGDVAESIAIETVFSPVKDTILVSSTKSMTGHLLGAAGGVEAIFTVLALQHQQVPPTINLDNIEDNCNLDYVANQSRQVDNLQYAVSNSFGFGGTNGSLIFARWPVNQ

SEQ ID NO: 19978 - DNA, 1239 bp, Colwellia psychrerythraea 34H
  CDS (1)..(1239): transl_table=11
atgagacgtgtagtagtaactggcattggcatgcttagcccattagccaacaccgcagaagaaacatggcaaaacctgctacttggtaaaagtggtataggtaatattgatcattttgataccacagattaccccactaaatttgctggtttagtaaaagactttgatgcccagaattatatggaacgaaaagaagccaaaaaaatggatctttttattcaatatggtattgcagcgggcgtacaagcttttaaagactcaggtcttgaagttactgagcaaaatgcaccacgtattggtgttgctattggctctggcattggcggtttaggcttaattgaacaaaatcataacaagctaatcaaagccgaaggtaatcctcgtaagttatcgccattttttgtgccttcaaccattatcaatatgattgcgggtcacttatcaataatgtttggcctgcaaggtcctaatattgccataactacagcgtgtacgagtggcgtgcataatattggccatgctgcccgtatgattgcttacggagatgccgacgcagttgttgccggaggtgctgaaaaagcgtccacaacactaggcatgggcggctttggtgctgctcgcgctttatctcgtcgaaatgatgaccctgaagcggcatctcgtccttgggacaaagatcgtgatggttttgttcttggtgatggtgctggtgttatcgttgttgaagaatatgaacatgcaaaagcccgtggcgcaaaaatttatgctgagctagttggttttggtatgagcggtgatgcttaccatatgacttcaccacctgaaaatggtgatggcgcagcgcgtgctatgcaaaatgctattaatgatgcgaaagtagatattagtagaattggttacattaatgcccacggtacttctacacaagccggtgatatggctgaaactaatgcggttaagactgtatttggtgctggtgcaaagaatgtaatgatgggttctaccaagtctatgactggacatttgttaggcgctgcaggagctattgaagctattttcagtatccaagcactagtgaataagcaagttccaccgacgataaatttagataaccctgatgaaggttgtgatctagattatattgctggtgcagcacgtgatgttgaacttgaatatgtactttgtaattcgtttggttttggtggtactaacggctcattaatctttaagaagatttag

SEQ ID NO: 19979 - protein, 412 aa, Colwellia psychrerythraea 34H
MRRVVVTGIGMLSPLANTAEETWQNLLLGKSGIGNIDHFDTTDYPTKFAGLVKDFDAQNYMERKEAKKMDLFIQYGIAAGVQAFKDSGLEVTEQNAPRIGVAIGSGIGGLGLIEQNHNKLIKAEGNPRKLSPFFVPSTIINMIAGHLSIMFGLQGPNIAITTACTSGVHNIGHAARMIAYGDADAVVAGGAEKASTTLGMGGFGAARALSRRNDDPEAASRPWDKDRDGFVLGDGAGVIVVEEYEHAKARGAKIYAELVGFGMSGDAYHMTSPPENGDGAARAMQNAINDAKVDISRIGYINAHGTSTQAGDMAETNAVKTVFGAGAKNVMMGSTKSMTGHLLGAAGAIEAIFSIQALVNKQVPPTINLDNPDEGCDLDYIAGAARDVELEYVLCNSFGFGGTNGSLIFKKI

SEQ ID NO: 19980 - DNA, 1212 bp, Colwellia psychrerythraea 34H
  CDS (1)..(1212): transl_table=11
atgaaacgtgtcgtaataacaggcttaggtatagtctcaagtattggtaacaatgcggatgaagtattagcctcattaaaagctggtaagtcaggtatctctcattctgaaagttttgcagagcaaggtctacgtagtcaagtttggggtaaacctgatattgaaactaaagatcacattgatcgtaaagccatccgtttcatgggtgatgctgcaggttatgcttatattgctatggatcaagctgttaaagatgcaaaattaactgaagatcaagtctcaaatttccgtactggtattgttgctggatctggtggagcttcatctgaaaacatcgttgcttcaactgatacgcttcgtaaccgtggtattcgtcgtgttggtccttatgccgtaccaaaaactatgggcagcacagtatcagcttgtttagcaacgccttttaaaattaaaggcgttaactactcaattagttcagcttgtgcaacaagtgctcattgtattggtaatgcgatggagcttattcaattaggcaaacaagatatcgtttttgctggtggtggtgaagaagttcattggtcacttgctatgatgtttgatggtatgggggctttatcagcgggtcgtaatgatacacctgaattagcttctcgtacctatgatgcagaccgtgatggttttgttatttctggcggcggcggtatggttgttgttgaagaattagaacatgcccttgcacgtggcgcacatatttacgctgaacttgttggctatggcgcaacctctgatggttatgacatggtagctccaagtggtgaaggcgcagttcgttgtatgcaacaagccatgcaaggtgttgaaggtaaacttgattacttaaatactcacggaacttctacaccggttggcgatgttaaagaattaggcgcaattcaagaattatttggtgaagattcaccagctattagtgctactaaagcaatgacaggtcatgcacttggtgctgctggcgttcacgaagctatttactcaatattaatgatggaaaacaactttgttgctccttcaattaacattgataatttagatgaaaaagcacaaggcttagatattgttactgaaaagcgtgatgttgagctaaaccttgttatgtcgaatagctttggttttggtggaactaatgccaccttggtaatgaaaaaatataaataa

SEQ ID NO: 19981 - protein, 403 aa, Colwellia psychrerythraea 34H
MKRVVITGLGIVSSIGNNADEVLASLKAGKSGISHSESFAEQGLRSQVWGKPDIETKDHIDRKAIRFMGDAAGYAYIAMDQAVKDAKLTEDQVSNFRTGIVAGSGGASSENIVASTDTLRNRGIRRVGPYAVPKTMGSTVSACLATPFKIKGVNYSISSACATSAHCIGNAMELIQLGKQDIVFAGGGEEVHWSLAMMFDGMGALSAGRNDTPELASRTYDADRDGFVISGGGGMVVVEELEHALARGAHIYAELVGYGATSDGYDMVAPSGEGAVRCMQQAMQGVEGKLDYLNTHGTSTPVGDVKELGAIQELFGEDSPAISATKAMTGHALGAAGVHEAIYSILMMENNFVAPSINIDNLDEKAQGLDIVTEKRDVELNLVMSNSFGFGGTNATLVMKKYK

SEQ ID NO: 19982 - DNA, 1245 bp, Pseudomonas syringae pv. phaseolicola 1448A
  CDS (1)..(1245): transl_table=11
gtgtcgcgtagacgcgtcgtggtcaccgggatgggcatgctttcgccactgggcaatgacgtgcccagcagttggcagggcattctggcgggccgcagtggcattggccttatcgagcacacggacttgtcggccttcaccacccgtttcggcggttcggtcaagggtttcaacgtcgaagaatacctcgcgcccaaagaagcgcgccggctcgatctcttcattcagtatggtctcgcggccagctttcaggcggtgcgtaatgcaggcctcgaagtcactgatgcaaaccgtgaacgcatcggcgtcgcgatgggttcgggtatcggtggtctgaccaatatcgaaaacagcagtcgtctgctgcacgagcaagggccaggacggatttctccgtttttcgtgccgggctcgatcatcaacatgatttccggtttcctgtctatccatctgggtgcacaggggcctaattactccatcgccacggcttgcaccacggcgacccactgcatcggcatggcggctcgcaacatcgcctatgacgaagcggacgtgatgattgccggtggcgctgaaatggctgcctgtggcctggggctgggtggtttcggtgccgcgcgtgcgctgtcgacccgcaacgacgacccgacccgtgccagtcgtccctgggacgaaggccgtgatggtttcgtcctgtccgacggtgcaggtgcgatggtgcttgaagaacttgagcacgccaaggcgcgtggtgcgaccatctacgctgagctggtcgggttcggcatgagcggcgatgcctatcacatgacctcgccacctgatgacggtgccggtgctgcacgctgcatcgtcaatgcgttgcgtgacgccaaggtcaatgccgatcaggttcagtacatcaacgcacacggtacgtcgacgcctgcgggcgatctggccgaggcttctgcgatcaagtcggtatttggcgatcatgcctacaagctggctgtcagttcgaccaagtcgatgaccggccacctgctgggcgctgctggtgctgtcgaggcgatcttcagtgtgctggcaatggttgatcaggtggctccgccgaccatcaacctggatgagccaagcgaaggctgcgatctggatttcgtgcctcacgaagcacgccgcatgccgatcgacgttgttctttcgaactcgttcggcttcggtggcaccaacggttcgctggtattccgtcggttcgccgagtaa

SEQ ID NO: 19983 - protein, 414 aa, Pseudomonas syringae pv. phaseolicola 1448A
MSRRRVVVTGMGMLSPLGNDVPSSWQGILAGRSGIGLIEHTDLSAFTTRFGGSVKGFNVEEYLAPKEARRLDLFIQYGLAASFQAVRNAGLEVTDANRERIGVAMGSGIGGLTNIENSSRLLHEQGPGRISPFFVPGSIINMISGFLSIHLGAQGPNYSIATACTTATHCIGMAARNIAYDEADVMIAGGAEMAACGLGLGGFGAARALSTRNDDPTRASRPWDEGRDGFVLSDGAGAMVLEELEHAKARGATIYAELVGFGMSGDAYHMTSPPDDGAGAARCIVNALRDAKVNADQVQYINAHGTSTPAGDLAEASAIKSVFGDHAYKLAVSSTKSMTGHLLGAAGAVEAIFSVLAMVDQVAPPTINLDEPSEGCDLDFVPHEARRMPIDVVLSNSFGFGGTNGSLVFRRFAE

SEQ ID NO: 19984 - DNA, 1233 bp, Streptococcus pyogenes MGAS5005
  CDS (1)..(1233): transl_table=11
atgacatttaaaagagtagtggtaacaggttatggtctaacatctccaatcgggcatgatcctgaaacgttttggaacaatctgaaagctggccaaattggtattggtcctattactaaatttgacacgactgattatgcagtcaagaatgctgctgaaattcaggattttccatttgacaaatactttgtgaaaaaagatttgaaccgtttcgatagatattctctttatgctctttacgcagcgaaagaggctattaatcatgctgatttaaatattgagatggttgattccgatcgatttggcgttattgttgcttcaggtattggtggaattgcggagattgaagagcaagtgattcgcttacatgaaaaagggccaaaacgtgtgaagccaatgacgttgccaaaagcgctaccaaatatggctgcaggaaatgtcgccatgtctttaaaagctcaaggagtatgtaaatcaattaatactgcctgcgcttcttcaaatgatgcgattggggatgcctttcgtgccattaaatttgggactcaagatgtgatgatagttggtgggtcagaggcggccataaccaagtttgccattgctggcttccaaagtttaacagctctctcaacaactgaagatccaagcagaagctctattccatttgataaagaccgcaatggttttatcatgggagaaggatcaggaatgcttgttttagaaagcctagaacatgcgcaagaacgcggggcgacaatcttagcagaaattgtgggttatggaaatacctgcgatgcctaccatatgacatctccaaatcctgagggattaggagctcgtaaagccatccacttagccttacaagaagctggtattgaagccagtgctattaattatgtcaatgcgcacggaacttcaaccccagctaatgaaaaaggagagagtcaagcaattgtagccgttcttggtaaggatgttccggtgtcttcaacaaaatcgtttacgggtcaccttcttggagcagcaggcgctattgaagctattgccactatcgaggctatgcgtcataactatgttccgatgacggctgggacacaagctttatcagaggatatcgaagcaaatgtcatctttggagaaggaaaagaaacagctatcaactatgccatttcaaatacttttggatttggtggtcataatgctgtattagctttcaaatgttgggaggagtag

SEQ ID NO: 19985 - protein, 410 aa, Streptococcus pyogenes MGAS5005
MTFKRVVVTGYGLTSPIGHDPETFWNNLKAGQIGIGPITKFDTTDYAVKNAAEIQDFPFDKYFVKKDLNRFDRYSLYALYAAKEAINHADLNIEMVDSDRFGVIVASGIGGIAEIEEQVIRLHEKGPKRVKPMTLPKALPNMAAGNVAMSLKAQGVCKSINTACASSNDAIGDAFRAIKFGTQDVMIVGGSEAAITKFAIAGFQSLTALSTTEDPSRSSIPFDKDRNGFIMGEGSGMLVLESLEHAQERGATILAEIVGYGNTCDAYHMTSPNPEGLGARKAIHLALQEAGIEASAINYVNAHGTSTPANEKGESQAIVAVLGKDVPVSSTKSFTGHLLGAAGAIEAIATIEAMRHNYVPMTAGTQALSEDIEANVIFGEGKETAINYAISNTFGFGGHNAVLAFKCWEE

SEQ ID NO: 19986 - DNA, 1236 bp, Dechloromonas aromatica RCB
  CDS (1)..(1236): transl_table=11
ttggcacgtcgcagagtcgtaattaccggtttggggctcatttccccggtcggcaacagcgtagaggaaggctggcagaacatcatcgccggccgttctggtatcgctcccgttacccgattcgatacttccaccttcccggttcagtttgccggtgaggtcaagaatttcgatattacccaatatatttcggccaaggatgcccggcgcatggataggtttatccattacggtctggctgccggcatacaggctgtccgcgatgccggtctggataaggaaggtgctgctgaccccgagcgcgtcggtgtcgccattggctccggtatcggcggtctgccgctgatcgaggaaaccaaagacgaatacattgctggcggtgtgcgcaaggtttcgccgttcttcgtgcccggttcgatcattaacatgatctccggcaacctgtcgatcgagtacggcttcaaggggccgaatctggctatcgtcaccgcttgtacgacgggtacccactcgatcggcgaggccgcgcgcatcattgaatacggcgatgccgatgtgatggtggccggtggtgctgaatcgacggtttcgccgctgggcatggggggcttcagtgccgctcgtgctctgtctactcgcaatgatgatccgacgacggccagtcgtccgtgggacaaggatcgtgatggctttgtcctcggcgaaggtgccggtgttctggttctcgaagagtacgagcatgccaaggcccgcggcgcaaagatctatgccgaagtggctggctacggccggagcgctgatgcttatcacattactgcgccgaacatggacggcccacgtcgttccatggtcaatgcactgaagaatgctggcattgcgccgtccgacgtgcagtacgtcaacgcgcatggcacttcgactccgcttggtgacaagaacgagtcggatgccatcaaggctgctttcggtgatgccgcttataagatcgtcgtcaattcgacaaagtcgatgaccggtcacctgttgggtggcgctggtggcgtcgagtctttgttcacggttctggccatccatcaccagatatctccgccaaccatcaacatcttcaaccaggatccggagtgcgacctggactactgtgccaacaaggcacggccgatgaagattgatattgcgctgaaaaacaacttcggcttcggcggtacgaacggctcgctggttttcaagcgcgtctaa

SEQ ID NO: 19987 - protein, 411 aa, Dechloromonas aromatica RCB
MARRRVVITGLGLISPVGNSVEEGWQNIIAGRSGIAPVTRFDTSTFPVQFAGEVKNFDITQYISAKDARRMDRFIHYGLAAGIQAVRDAGLDKEGAADPERVGVAIGSGIGGLPLIEETKDEYIAGGVRKVSPFFVPGSIINMISGNLSIEYGFKGPNLAIVTACTTGTHSIGEAARIIEYGDADVMVAGGAESTVSPLGMGGFSAARALSTRNDDPTTASRPWDKDRDGFVLGEGAGVLVLEEYEHAKARGAKIYAEVAGYGRSADAYHITAPNMDGPRRSMVNALKNAGIAPSDVQYVNAHGTSTPLGDKNESDAIKAAFGDAAYKIVVNSTKSMTGHLLGGAGGVESLFTVLAIHHQISPPTINIFNQDPECDLDYCANKARPMKIDIALKNNFGFGGTNGSLVFKRV

SEQ ID NO: 19988 - DNA, 1263 bp, Thermobifida fusca YX
  CDS (1)..(1263): transl_table=11
atgacacgacgcgtagtcatcaccggcatcggggtgatcgcacccggcgggataggcacgcaggccttctggaacctgctgaccgaaggcaggacagcgacccgccccatctccctgttcgacgcgagcgtcttccggtcccggatcgccgccgaagtcgacttccaccccgaagagcacggactcaccgcccagcaggcccgcaccatggaccgggccgcccagttcgctgtcgtcgccacccgcgaagccatggcggacagcggcctgaccatcgaccgcccagaccgggtcggcgtggtcgtaggcagcgccgtcggcgcatccaccagcctggaaaaccagtaccggctgtccagcgacgacggacagcttgaccccgtccgctacgaccccgcggtcaccgacctctaccggcacttcgtgcccagctcgttcgctaccgacgtggcctgggaggtaggggcggaaggaccagccaccgtggtgtccaccgggtgcacctctggactggactcggtgggctatgccgccgacctggtccgagaaggcatcgtcgacgccgtcgtcgtcggcagcaccgacgcccccctcacccccatcacctcggcctgcttcgacgcgatcaaggcgacctcaccccgcaacgacacccccgccaccgcgtcccgcccgttcgaccgcacccgcaacggcttcgtcctcggtgaaggatgcgccatgttcgtcatcgaggaacgcgagcacgcccgggcccgcggcgcccgcatatacggcgaactcgcaggctacgccacccggtccaacgcctaccacatgaccgggctccgcgcggacggccacgaaatggcggaagccatccgggtcgcgctgcacgaggcacgcgtcaaccccgacgacatcgactacatcaacgcgcacggctcaggcaccaaacagaacgaccgccacgagaccgccgccttcaaaaaagccctcggcagccacgcctaccggacaccggtcagctccatcaagtccatgatcggccactccctcggcgcgatcggctccatcgaaatcgccgcctgcctcttggccatgcgggacaacatcgtgccgccgacagccaacctgaccgaacccgaccccgagtgcgacctcgactatgtgccaatcaccgcgcgtgagcaccgagtcgacacggtgctcacggtaggcagcggcttcggcggcttccaaagcgcgatggtcctcaccacagcggacaggaggctcccatga

SEQ ID NO: 19989 - protein, 420 aa, Thermobifida fusca YX
MTRRVVITGIGVIAPGGIGTQAFWNLLTEGRTATRPISLFDASVFRSRIAAEVDFHPEEHGLTAQQARTMDRAAQFAVVATREAMADSGLTIDRPDRVGVVVGSAVGASTSLENQYRLSSDDGQLDPVRYDPAVTDLYRHFVPSSFATDVAWEVGAEGPATVVSTGCTSGLDSVGYAADLVREGIVDAVVVGSTDAPLTPITSACFDAIKATSPRNDTPATASRPFDRTRNGFVLGEGCAMFVIEEREHARARGARIYGELAGYATRSNAYHMTGLRADGHEMAEAIRVALHEARVNPDDIDYINAHGSGTKQNDRHETAAFKKALGSHAYRTPVSSIKSMIGHSLGAIGSIEIAACLLAMRDNIVPPTANLTEPDPECDLDYVPITAREHRVDTVLTVGSGFGGFQSAMVLTTADRRLP

SEQ ID NO: 19990 - DNA, 1239 bp, Thermobifida fusca YX
  CDS (1)..(1239): transl_table=11
atgagtaaccgcgaagtcgtcgtcaccggccttggagcgagcagtcctctgggaggtgacgtcgccacgacctggtcggcgctgctcgaaggtcgatccggcatcacttccctgcccgaggagtggcatgagaagctcccggtgcacttcgcgggcctcctcgctgaggagccgtccgagaagctggaacgccaccgactgcgccgcctggaccggacccagcagttggcgttgatcaccgcgcgggaagcgtgggacgacgcgggctcccctgaagtagacccgttgcgtctgggtgtcgtgatgtccagcggtatcggtggcatcttgaccaccctccaccagtacgacatcttccgggagaagggctggaagcgggtctccccgttcaccgtgccgatgctcatgcccaacagcccggccgccgctgtggcgctggagttcactgcccgggcgggggctcacgccgcggtcagcgcctgcgcgtccagtgcggaggccatcgctgacggcatcaacatgatccgctccggccgcgccgacgtggtgatcgcgggagggtgcgaggcggcgatccacccgctgaacattgccgcgttcgctgcgatgcgtgccttgtccacccgcaacgacgacccgcagggcgcgtcgcgtccgttcgacgtcaaccgggacggtttcgtcatgggtgagggggcagccactctcatcctggagtcggctgagcacgctgcggcccgcggggcccgcgtgtacgcggtggccgcgggagccggatacacctgcgacgcctacgacattgtgcagcctgacccggtcggtgctggggcttcccgtgcgatctctgccgcgatcgcggacgctgggctgagcccgtccgatatcgcgcacatcaacgcgcacgccacttccacgccggcgggtgacgtgccggagaccgtggcgatccgcagtgccctgggcgactcggctgctgacgctgtcgcggtgacctccaccaagtccatgaccggccacctgctgggtggtgctggtgcgttggagtcggtggccaccgtcttggcgctgtaccacggggtggtgcctgcaaccatcaacgttgaggagatcgaccccggcgtggtggttgacgtggtggtggacaagcctcgggagctgccgtcttccgcggtggctgcgctgaacaactctttcggtttcggcggacacaacatcgccttggcgttccgccgtccttga

SEQ ID NO: 19991 - protein, 412 aa, Thermobifida fusca YX
MSNREVVVTGLGASSPLGGDVATTWSALLEGRSGITSLPEEWHEKLPVHFAGLLAEEPSEKLERHRLRRLDRTQQLALITAREAWDDAGSPEVDPLRLGVVMSSGIGGILTTLHQYDIFREKGWKRVSPFTVPMLMPNSPAAAVALEFTARAGAHAAVSACASSAEAIADGINMIRSGRADVVIAGGCEAAIHPLNIAAFAAMRALSTRNDDPQGASRPFDVNRDGFVMGEGAATLILESAEHAAARGARVYAVAAGAGYTCDAYDIVQPDPVGAGASRAISAAIADAGLSPSDIAHINAHATSTPAGDVPETVAIRSALGDSAADAVAVTSTKSMTGHLLGGAGALESVATVLALYHGVVPATINVEEIDPGVVVDVVVDKPRELPSSAVAALNNSFGFGGHNIALAFRRP

SEQ ID NO: 19992 - DNA, 1248 bp, Prochlorococcus marinus str. NATL2A
  CDS (1)..(1248): transl_table=11
atgatggagaaactccatcgagttgttattacaggtcttggcgccattactccaattggcaacgacctcgaaagttacctcaaagggcttcaatccgggcaaaatggggtagatcaaataacactctttgatgcctcatcccatgcatgcagatttgcagcagaggtgaaaagttttgatccgactggcaaattagagccaaaagaatccaaacgatgggatcgtttttcaaaatttggagttattgcagcaaaagaagccttaaatcattcaggtctaataattgacaactcaaattctggaagaattggtgtaattattggttctggagttggcggattgttgactatggaaacccaagctcatgttttagagaacaagggagcaagtcgagttagtccttttactgttcccatgatgattcccaacatggctacagggttagcagctattgcactaggcgctaaaggtccaagttcagcagtttccactgcttgtgccgctggatcaaatgctataggtgatgcatttagactgctccaattaggcaaagcagatgcaatggtttgcggtggagcagaagcaagtatcacccctctaggagtagcaggatttgctagtgcaaaagccttatccttcagaaatgatgatccatctaccgcaagtagaccttttgattctcaacgagatggatttgtaattggagaaggggccggagtactaattttagaaactcttgatcatgcattaaaaagagacgcaacaatccatgcagagatcattggttatggaaccacttgtgatgctcatcacattacctctcctacacctggtggagtgggaggggcagaagctatgaaacttgcattaattgatggacaaattaatcccgaagaagtcgattacattaatgctcacggaactagcactccagctaatgacagcaatgaaacatctgctataaaagctgctttaggaaatcatgcgtatcaagtacctacaagctcaaccaaatctatgactgggcacttactaggagggtctggtggaatcgaagctgttgcttgtgctctggcaataaaacatgaaataattccgccaacaattaattattccaatccagacccaaattgtgatcttgattatgtgcccaacaaagcaagagaaaagaaattaggtgtcgtactatctaactcattcgggtttggcggtcacaatgtctgtctagcttttcgacaaatgatctaa

SEQ ID NO: 19993 - protein, 415 aa, Prochlorococcus marinus str. NATL2A
MMEKLHRVVITGLGAITPIGNDLESYLKGLQSGQNGVDQITLFDASSHACRFAAEVKSFDPTGKLEPKESKRWDRFSKFGVIAAKEALNHSGLIIDNSNSGRIGVIIGSGVGGLLTMETQAHVLENKGASRVSPFTVPMMIPNMATGLAAIALGAKGPSSAVSTACAAGSNAIGDAFRLLQLGKADAMVCGGAEASITPLGVAGFASAKALSFRNDDPSTASRPFDSQRDGFVIGEGAGVLILETLDHALKRDATIHAEIIGYGTTCDAHHITSPTPGGVGGAEAMKLALIDGQINPEEVDYINAHGTSTPANDSNETSAIKAALGNHAYQVPTSSTKSMTGHLLGGSGGIEAVACALAIKHEIIPPTINYSNPDPNCDLDYVPNKAREKKLGVVLSNSFGFGGHNVCLAFRQMI

SEQ ID NO: 19994 - DNA, 1233 bp, Ralstonia eutropha JMP134
  CDS (1)..(1233): transl_table=11
gtgagccgtcgtcgcgtcgttgtcactgggcttggccttgtgtctccggtcggaaacacggttgccgaaggctgggccaacctggttgccggcaagtccggtatcgccaccgtcaccaaattcgatcattccgcgctttccgtgcactttgccggtgaagtgaagggcttcaatgccgaggattacatcccggccaaggaagcccgcaatatggatacgttcatccactatggcattgctgccggcgcccaggcgctcaaggacagcggctatgaggtgaccgatgccaatgcggagcgcatcggcgtgctggtcggctcgggcattggcggcttgccgatgatcgaggacacgcatgccacgctgaccgagcgtggtccacgccgtatttcgccgttcttcgtgccgggatcgatcatcaacatgatctctggccacctgtcgatcatgcacggcctgaagggcccgaacctcgccgcggtgaccgcctgcacgaccggcctgcacagcattggcctggctgctcgcctgattcaggccggcgacgccgacgccatgctggcgggcggtgccgagtcgaccgtgtcgccgctgggcatcggcggtttcgcggccgcgcgcgccttgtcgacgcgcaatgacgatcccgcagccgcttcgcgcccgtgggacaaggaccgcgacggcttcgtgctgggcgagggtgccggcgtcatgatgctggaagagtacgaatctgcgaaggcgcgcggtgcgcgcatctatgcggagctcgtgggcttcggcatgagtggagacgcattccacatgactgcgccgaacatggacggcccgcgccgctgcatggtcaacgcgctgcgggacgccggcatcaacgcggacgaggtgcagtacctgaacgcgcacggcacgtcgacgccgctcggcgacaagaacgaaaccgatgctatcaaagcagccttcggtgaccatgcctacaagatggtggtgaattcgaccaagtcgatgaccggccacttgctgggcggcgcaggtggcctggaatcggtgttcaccgtgctcgcactgcataaccaggtgtcgccgccgaccatcaacatcgataaccaggatccggaatgtgacctggactacgtggccaacacggcgcgtgaaatgaaaatcgatgtggccgtgaagaacaacttcggcttcggcggtaccaacggcacgctggtcttccgtcgcgcctga

SEQ ID NO: 19995 - protein, 410 aa, Ralstonia eutropha JMP134
MSRRRVVVTGLGLVSPVGNTVAEGWANLVAGKSGIATVTKFDHSALSVHFAGEVKGFNAEDYIPAKEARNMDTFIHYGIAAGAQALKDSGYEVTDANAERIGVLVGSGIGGLPMIEDTHATLTERGPRRISPFFVPGSIINMISGHLSIMHGLKGPNLAAVTACTTGLHSIGLAARLIQAGDADAMLAGGAESTVSPLGIGGFAAARALSTRNDDPAAASRPWDKDRDGFVLGEGAGVMMLEEYESAKARGARIYAELVGFGMSGDAFHMTAPNMDGPRRCMVNALRDAGINADEVQYLNAHGTSTPLGDKNETDAIKAAFGDHAYKMVVNSTKSMTGHLLGGAGGLESVFTVLALHNQVSPPTINIDNQDPECDLDYVANTAREMKIDVAVKNNFGFGGTNGTLVFRRA

SEQ ID NO: 19996 - DNA, 1245 bp, Staphylococcus saprophyticus subsp. saprophyticus ATCC 15305
  CDS (1)..(1245): transl_table=11
atgagcaaagaacaacgtgttgttattacaggaattggcgcattatcacctataggaaatgatgctaagtctacttgggacaatgcattaaaaggtgtaagtggtatagattcgattacacgcatagatacaacggattacaatgtccatttagctggagagttaaaagactttgatattgaagagcatattcctaaaaaagaagcgagacgcatggatcgctttacacaatatgcagttgtagctgcaagagaagccgttaatgatgctaaacttgaaattaatgatagtactgcggataaaattggcgtatggattggttcaggtattggtggtatggaaacatttgaaatttcacatagccaattattaaatcgtggaccaagacgtgtgagtccgttcttcgtacctatgctgatcccagatatggcgacaggtcaagtatcaatagatttaggtgctaaagggccgaatggttcgacggttactgcttgtgcaactggtacgaactcaataggtgaagcattcaagattattcaacgtggcgatgcagatgcaatgattactggtggtacagaagcaccgattacacatatggcattagctggctttagtgcgagtcgtgcattatctacaaatgatgataaagaaactgcatgtcgtcctttccaagaaggtcgtgatggatttatcatgggtgaaggtgcaggtattgtcgttttagaatcacttgaatcagcgaaagctcgtggtgcgcaaatttacgctgaagtcgtaggttatggatcaactggtgacgcatatcatataacagccccagctccagaaggtgaaggcggttcacgtgctatgcaagcggcaatagatgatgctggtattgaagcgaaagacattcaatatttaaatgcacatggaacaagcactccagtaggtgacttaactgaaattcaagctattaagaatactttcggtgaagcggcgaaatcattgaaagtaagttcaactaaatcaatgacaggtcatttactaggggctacaggtggattagaagctattttctctgcactttcaattagagatagtcgtattgcaccaacgattcatgctgattcaccagatcctgaatgcgatttagatatcgttccaaacaaagcagaagatttagatattacctatgcaatgagtaatagtttaggttttggtggacacaatgctgtacttgtattgaaaaaatttactgattaa

SEQ ID NO: 19997 - protein, 414 aa, Staphylococcus saprophyticus subsp. saprophyticus ATCC 15305
MSKEQRVVITGIGALSPIGNDAKSTWDNALKGVSGIDSITRIDTTDYNVHLAGELKDFDIEEHIPKKEARRMDRFTQYAVVAAREAVNDAKLEINDSTADKIGVWIGSGIGGMETFEISHSQLLNRGPRRVSPFFVPMLIPDMATGQVSIDLGAKGPNGSTVTACATGTNSIGEAFKIIQRGDADAMITGGTEAPITHMALAGFSASRALSTNDDKETACRPFQEGRDGFIMGEGAGIVVLESLESAKARGAQIYAEVVGYGSTGDAYHITAPAPEGEGGSRAMQAAIDDAGIEAKDIQYLNAHGTSTPVGDLTEIQAIKNTFGEAAKSLKVSSTKSMTGHLLGATGGLEAIFSALSIRDSRIAPTIHADSPDPECDLDIVPNKAEDLDITYAMSNSLGFGGHNAVLVLKKFTD

SEQ ID NO: 19998 - DNA, 1269 bp, Ehrlichia canis str. Jake
  CDS (1)..(1269): transl_table=11
atgacaacaagaagaatcgtgatcactggtttaggattggttacttctttaggaagtgatgtaaaaacagtatgggaccttttatctaatggagtatcaggcataagcaaaattaatagatttgacacatctgaccttgactgtaagatagctggacaagtaataatgaagtctgaatctgaagaatacgtttttaatgctgcagactacattccagaaaaagacttaaaaaaaatggataactttattcattttggcatagcagctgccacacaagcagttaacgattctaatttacttgattgtaaagatcttgattatgacagagtaggagtaatagtaggatcaggaataggtggtcttccatttatagaaaaaacagttatatgcttacaagagagaggtcccagaaggattagtcctttcttcataccagcaagtttaattaatcttgtctctggtcatatatctataaagtatgggttcacagggttgactgacgcagtagtaactgcatgctctacaggagcacaagctataggtaatgcagcaagagtgattcaatctggtgaagcagatgtaataatagcaggtggagctgaaggtgcggtatgccgcataggaattgcaggattttcagctatgaaagcattatcaacaaaattcaatgatactccagagctagcatcacgaccttgggataaacaaagagatgggtttgtcatgggagaaggtgcaggaatagttatattagaagattatgagcatgcaaaaaaacgtggagcaaaaatatacggagaactgttaggatatggcatgacatcagatgcatatcatatatcagcacctcatccagaaggcaaaggagggatgaaagctatggaactagcgttatctagcgcacaattaaatccagagtctatcaattatataaacgcacatggcacttctactcctctaggagacagtacagaaattcaagcaataaaaagtatatttaaagaaagcatctacaaagttccaatatcatcaactaaatcttctataggtcacctacttggagcagcaggaagcgttgaagctatcttttctatacttgctatgaatacaagcattacaccccctacattaaacttatatgaatcatcagaggatccacaattaaatctcgttccactcaatgcacaggaacataagattaattattgtctttctaattctttcggctttggtggagtaaatatatcattagtttttgggaaattataa

SEQ ID NO: 19999 - protein, 422 aa, Ehrlichia canis str. Jake
MTTRRIVITGLGLVTSLGSDVKTVWDLLSNGVSGISKINRFDTSDLDCKIAGQVIMKSESEEYVFNAADYIPEKDLKKMDNFIHFGIAAATQAVNDSNLLDCKDLDYDRVGVIVGSGIGGLPFIEKTVICLQERGPRRISPFFIPASLINLVSGHISIKYGFTGLTDAVVTACSTGAQAIGNAARVIQSGEADVIIAGGAEGAVCRIGIAGFSAMKALSTKFNDTPELASRPWDKQRDGFVMGEGAGIVILEDYEHAKKRGAKIYGELLGYGMTSDAYHISAPHPEGKGGMKAMELALSSAQLNPESINYINAHGTSTPLGDSTEIQAIKSIFKESIYKVPISSTKSSIGHLLGAAGSVEAIFSILAMNTSITPPTLNLYESSEDPQLNLVPLNAQEHKINYCLSNSFGFGGVNISLVFGKL

SEQ ID NO: 20000 - DNA, 1269 bp, Dehalococcoides sp. CBDB1
  CDS (1)..(1269): transl_table=11
atgactgataaccagccccaaaacagggttgtcataaccggtatcggtattgtcagccctcttggacttgatacccaaaccacctgggaaggcctgataaacgggcgttcaggtatagaccatatcagcctttttgacgcatcaaatttggctgtccgctttggcggagaggtaaaggattttgacccggcaaactatatatcccgcaaggatatccgccggatggaccgttttgctcagctggccgtagctgccggtaaacaggcactggaaaattcaggcttaaccgtagacgaaagcaccagtcaggatattggcgtaattgtcggcagcggcataggcgggctttcggttctctttgaacagattaaagtatttctggaacaggggccggacagagtcagcccctttttagtaccgatgatgattgcagacatggccggtgcccaagtgtctatccagctgggtcttaaagggtctaatttctgtaccacatctgcctgttcttccggttcagatgccataggtacagcttttgaaaaaatacgtttcggttctgccaaaatcgttctggcaggcggcgccgaatccataatgaacccggtaggttttgccggtttctcagctctaaaagccctttccacccgcaatgaagacccccagacagcttcacgcccgtttgatgccaaccgtgacgggtttgttatttcggagggtgcggctattctggtactggaagagttgcagaccgctaaggcccgcggggcaaatattattgccgagataataggctacggcggttcatcagacgcttttcatatcacccagccggtggaatccggagttgaagccgcacgcgccataaatatcgcccttaaaacagccggtatcaagccggaggcggtggattatattaatgcccacggcacttccaccccgcttaatgacaagatggaaaccaatgctataaaggtggctttcggagaacatgcccgaaaacttgccatcagttccacaaaatccatgctggggcatcttatcggcggggcaggtgctatcgaagcatccatatgcgccctgactatcaaaaacggcattatccctccaactataaactacaccacgcctgatccggaatgtgatctggattacactcccaacaccgcccgtaaagctaaagtaaaggttgcccttaataattcctttggtttcggcgggcataattcagtgcttatcctcagggaaatgggcaatgaaaatattggctaa

SEQ ID NO: 20001 - protein, 422 aa, Dehalococcoides sp. CBDB1
MTDNQPQNRVVITGIGIVSPLGLDTQTTWEGLINGRSGIDHISLFDASNLAVRFGGEVKDFDPANYISRKDIRRMDRFAQLAVAAGKQALENSGLTVDESTSQDIGVIVGSGIGGLSVLFEQIKVFLEQGPDRVSPFLVPMMIADMAGAQVSIQLGLKGSNFCTTSACSSGSDAIGTAFEKIRFGSAKIVLAGGAESIMNPVGFAGFSALKALSTRNEDPQTASRPFDANRDGFVISEGAAILVLEELQTAKARGANIIAEIIGYGGSSDAFHITQPVESGVEAARAINIALKTAGIKPEAVDYINAHGTSTPLNDKMETNAIKVAFGEHARKLAISSTKSMLGHLIGGAGAIEASICALTIKNGIIPPTINYTTPDPECDLDYTPNTARKAKVKVALNNSFGFGGHNSVLILREMGNENIG

SEQ ID NO: 20002 - DNA, 1233 bp, Thiobacillus denitrificans ATCC 25259
  CDS (1)..(1233): transl_table=11
ttgtccaaacgtcgtgtcgtcgtcaccgggctggggatcgtttctccagtcggaaacaccatcccggaagcctgggacaaccttgtcgcggggcgcccgggcatctcccggatcacccgtttcgatcccacgcccttcgcttcgcagatggcgggtgaggtacggaattttgatgtcgcacaatacctcaatccgaaggatgcgcgccgtatggatgtcttcatccagttcggcatggcggccgggatccaggcgattcgtgattcgggcatcgaagtcaccgaagccaattccgatcgtatcggtatcaacatcggctccggaatcggcggcttgccgctgatcgaggagacgcacggtctcctgatggaatcgggtccgcggaagatttcgcccttttttatccccggttccatcatcaacatgatttcgggcaacctgtcgatcctatacggcatcaacggccccaacctcgcggtcgtgacggcgtgcacgacgggcttgcacgccgtcggcctgtcggcccgcatgatccaggccggcgacaccgacgtgatgatcgcgggcggtgcggaatgtgcgacgtcgccgctcggcgtcggcggtttcgcggcggcgcgcgcgctgtcgacgcgcaacgacgatcccgcgacggcgagtcggccgtgggacaaggatcgcgacggcttcgtgctcggcgagggtgcgggcgtactcgtgctcgaggaatacgaacacgccaaggcgcgcggggcaaaaatctactccgaagtcgccggcttcggcatgagcggcgacgcctaccacatgaccgcaccgagcacggacggcccgcggcgctcgatggtgaacgcgatgcgcgacgccgggctcaaccccgatcagatccagtacatcaacgcgcacggcacctcgacgccgctcggcgacaagaacgaaaccgaggcgatcaaactcgcgctgggcgacgccgcgtacaaggccgtggtcaactcgaccaagtcgatgaccggccatctgctcggcggcgccggcggggtcgagtcggtattcagcgtgctcgcggtgcatcaccaggtctcgccgccgacgatcaacattttctcgcaggaccccgagtgcgatctcgactactgcgcgaacacggcccgcgacatgaagatcgacgcggcgctcaagaacaacttcgggttcggcggcaccaacggctcgctggtcttcaagcgcgtttga

SEQ ID NO: 20003 - protein, 410 aa, Thiobacillus denitrificans ATCC 25259
MSKRRVVVTGLGIVSPVGNTIPEAWDNLVAGRPGISRITRFDPTPFASQMAGEVRNFDVAQYLNPKDARRMDVFIQFGMAAGIQAIRDSGIEVTEANSDRIGINIGSGIGGLPLIEETHGLLMESGPRKISPFFIPGSIINMISGNLSILYGINGPNLAVVTACTTGLHAVGLSARMIQAGDTDVMIAGGAECATSPLGVGGFAAARALSTRNDDPATASRPWDKDRDGFVLGEGAGVLVLEEYEHAKARGAKIYSEVAGFGMSGDAYHMTAPSTDGPRRSMVNAMRDAGLNPDQIQYINAHGTSTPLGDKNETEAIKLALGDAAYKAVVNSTKSMTGHLLGGAGGVESVFSVLAVHHQVSPPTINIFSQDPECDLDYCANTARDMKIDAALKNNFGFGGTNGSLVFKRV

SEQ ID NO: 20004 - DNA, 1215 bp, Pseudomonas syringae pv. syringae B728a
  CDS (1)..(1215)
atgggcatgctttcgccactgggcaatgacgtgcccagcagttggcaaggcattctggcgggccgcagtggcattggccttatcgagcacacggacttgtcagccttcaccacccgcttcggcggctcggtcaagggtttcaacgtcgaagaatacctcgcgcccaaagaagcgcgccgcctcgatctctttattcagtatggccttgcggccagctttcaggccgtgcgtaatgcaggcctcgaagtcactgatgcaaaccgtgagcgcatcggcgttgccatggggtcgggcatcggtggtctgaccaatatcgaaaacagcagtcgtctgctgcacgagcagggtcctggacggatttcgccgttcttcgttcctggctcgatcatcaatatgatttccggtttcctgtcgatccacctgggcgcacagggacccaattactccatcgcgacggcttgcacgactgcaacccactgcatcggcatggcggctcgcaacatcgcctatgacgaagcggacgtgatgatcgccggtggcgctgaaatggccgcctgtggactcggtctgggcggcttcggtgcagcgcgtgcgctgtcgacccgcaacgatgacccgacccgcgccagtcgcccctgggacaagggccgtgatggctttgtcctgtccgacggtgccggtgccatggtgctcgaagagcttgagcacgccaaggcgcgtggcgcgaccatttatgcagagctggtcgggttcggcatgagcggcgacgcttatcacatgacttcgccacctgatgacggcgccggtgctgcacgctgcatcgtcaatgcgttgcgtgatgccaaggtcaatcccgatcaggtgcagtacatcaacgcacacggtacgtcgacgcctgcaggcgatctggccgaagcttctgcgatcaagtcggtattcggtgatcacgcctacaagctggcagtcagttcgaccaagtcgatgaccggccacctgctgggcgccgccggtgctgtcgaagcgatcttcagcgtcctggcaatggttgatcaggtggctccgccgaccatcaacctggatgagccaagcgaaggctgcgatctggacttcgtgcctcacgaagcgcgccgcatgccgatcgacgtcgttctgtcgaactccttcggctttggtggcaccaacggctcgctggtattccgtcggttcgccgagtaa

SEQ ID NO: 20005 - protein, 404 aa, Pseudomonas syringae pv. syringae B728a
MGMLSPLGNDVPSSWQGILAGRSGIGLIEHTDLSAFTTRFGGSVKGFNVEEYLAPKEARRLDLFIQYGLAASFQAVRNAGLEVTDANRERIGVAMGSGIGGLTNIENSSRLLHEQGPGRISPFFVPGSIINMISGFLSIHLGAQGPNYSIATACTTATHCIGMAARNIAYDEADVMIAGGAEMAACGLGLGGFGAARALSTRNDDPTRASRPWDKGRDGFVLSDGAGAMVLEELEHAKARGATIYAELVGFGMSGDAYHMTSPPDDGAGAARCIVNALRDAKVNPDQVQYINAHGTSTPAGDLAEASAIKSVFGDHAYKLAVSSTKSMTGHLLGAAGAVEAIFSVLAMVDQVAPPTINLDEPSEGCDLDFVPHEARRMPIDVVLSNSFGFGGTNGSLVFRRFAE

SEQ ID NO: 20006 - DNA, 1215 bp, Pseudomonas aeruginosa UCBPP-PA14
  CDS (1)..(1215)
atgggcatgctgtcgccgctgggcctggatgtcccgagcagttgggaaggtattctcgccggtcgcagcgggatcgccccgatcgagcatatggacctgtccgcctattccacccgcttcggtggttcggtcaagggtttcaatgtcgaggaatacctgtccgccaaggaagcccgcaagctcgacctgttcatccagtacggtctcgccgccagcttccaggccgttcgcgattccggcctggaggtcaccgacgccaatcgtgagcgtatcggcgtatccatgggttccggtatcggcggcctgaccaatatcgagaacaactgccgatccctgttcgagcaggggccgcggcgcatctcgccgttcttcgtgcccggttcgatcatcaacatggtttccggcttcctgtcgatccacctgggtctgcaggggcccaactacgccctcaccaccgcctgcaccaccggtacccacagcatcggcatggctgctcgcaacatcgcctatggcgaggccgacgtgatggtcgccggcggttccgaaatggctgcctgcggtctcggcctgggcggtttcggcgcggctcgcgcgctctccactcgcaacgacgagccgacccgtgccagccgtccgtgggaccgggatcgcgacggcttcgtcctgtccgacggttccggcgccctggtgctcgaagaactggagcacgcccgtgcccgcggcgcgcggatctatgccgagctggttggcttcggcatgagcggcgacgccttccacatgaccgcgccgccggaagatggcgccggtgccgcccgctgcatgaagaacgcgctgcgcgatgccggcctggatcctcgtcaggtcgattacatcaacgcccatggcacctccaccccggccggcgacatcgccgagatcgccgcggtgaagagcgtgttcggcgagcatgcccatgcgctgtcgatgagttcgaccaagtcgatgaccggccacctgttgggtgccgccggtgcggtggaggcgatcttcagcgtgctggccctgcgcgaccaggtcgccccgccgaccatcaacctggacaacccggacgaaggttgcgacctcgacctggtggcccacgaagccaagccgcgcaagatcgacgtggccctgtcgaactcgttcggtttcggcgggaccaacggcaccctggtgttccgcaggttcgccgactga

SEQ ID NO: 20007 - protein, 404 aa, Pseudomonas aeruginosa UCBPP-PA14
MGMLSPLGLDVPSSWEGILAGRSGIAPIEHMDLSAYSTRFGGSVKGFNVEEYLSAKEARKLDLFIQYGLAASFQAVRDSGLEVTDANRERIGVSMGSGIGGLTNIENNCRSLFEQGPRRISPFFVPGSIINMVSGFLSIHLGLQGPNYALTTACTTGTHSIGMAARNIAYGEADVMVAGGSEMAACGLGLGGFGAARALSTRNDEPTRASRPWDRDRDGFVLSDGSGALVLEELEHARARGARIYAELVGFGMSGDAFHMTAPPEDGAGAARCMKNALRDAGLDPRQVDYINAHGTSTPAGDIAEIAAVKSVFGEHAHALSMSSTKSMTGHLLGAAGAVEAIFSVLALRDQVAPPTINLDNPDEGCDLDLVAHEAKPRKIDVALSNSFGFGGTNGTLVFRRFAD

SEQ ID NO: 20008 - DNA, 1215 bp, Pseudomonas fluorescens PfO-1
  CDS (1)..(1215)
atgggtatgttgtcgccactgggcacggatgtgccgagcagttggcagggcattctggctggccgcagtggcattggtctgatcgaacacaccgacctttctgcctattccacccgctttggcggctcggtaaagggcttcaatgtcgaggaatacctgtcggtcaaggaagcgcgcaagctcgacctgttcattcagtacggtctggcggccggctttcaagccgtacgcaatgccggtctggaagtcaccgatgccaaccgtgaacgcatcggcgtggccatggggtcgggtatcggcggtctgaccaacatcgaagaaaccagccgcaccctgcacgagactggcccacgccggatttctccgttctttgtgcctggctcgatcatcaatatgatttccggtttcctgtccatccacctgggtgcacaggggcctaactatgccatcgccacggcgtgtaccaccggtacgcactgcatcggcatggcggcgcgcaacatcatgtacgacgaagccgacgtgatgattgccggcggtgccgagatggccgcgtgcggtctgggcatgggcggcttcggtgcttcccgtgcgctgtcgacccgcaacgacgagccgacccgcgccagccgtccgtgggacaagggccgtgacggcttcgtgctgtccgacggcgccggtgcgctggtgctcgaagagctcgagcacgccaaggcccgtggcgcgaccatctacgccgagctgatcggtttcggcaccagtggcgacgccttccacatgacttcgccacccgccgacggcgccggtgctgcacgctgcatcaccaacgcgctgcgcgatgcgaagatcaacgtcgatcaagttcaatacatcaacgcccacggcacttcgaccccggccggcgaccttgccgaagccaacgcgatcaagtcggtgttcggtgatcacgcctacaaactggcagtcagctccaccaagtccatgaccggtcacctgctgggtgcggcgggcgcggtcgaggcgatcttcagcgtcctggcgatcaacagccaggtggcgccaccgaccatcaacctcgaagagccggacgaaggctgcgacctcgatttcgtgccgcacaccgcgcgcaatatggatatcgatgtcgtgctgtccaactcgttcgggtttggcggcaccaacggcacgctggcgttccgtcggttcgccggctga

SEQ ID NO: 20009 - protein, 404 aa, Pseudomonas fluorescens PfO-1
MGMLSPLGTDVPSSWQGILAGRSGIGLIEHTDLSAYSTRFGGSVKGFNVEEYLSVKEARKLDLFIQYGLAAGFQAVRNAGLEVTDANRERIGVAMGSGIGGLTNIEETSRTLHETGPRRISPFFVPGSIINMISGFLSIHLGAQGPNYAIATACTTGTHCIGMAARNIMYDEADVMIAGGAEMAACGLGMGGFGASRALSTRNDEPTRASRPWDKGRDGFVLSDGAGALVLEELEHAKARGATIYAELIGFGTSGDAFHMTSPPADGAGAARCITNALRDAKINVDQVQYINAHGTSTPAGDLAEANAIKSVFGDHAYKLAVSSTKSMTGHLLGAAGAVEAIFSVLAINSQVAPPTINLEEPDEGCDLDFVPHTARNMDIDVVLSNSFGFGGTNGTLAFRRFAG

SEQ ID NO: 20010 - DNA, 1236 bp, Enterococcus faecium DO
  CDS (1)..(1236): transl_table=11
atgaatcgagtggtaattactggctatggagtcacttcacctattggaaatgacgcagacagctttttgaatagcttaaaagaggggacgaatggcatcgcaccgatcactaaatttgatgcttcagaaacagggattaccttagcgggtgaagtcaaagatttcccttacgataaatattttattaaaaaagatagcaaacgaatggatatgttttcgatctatggaatctacgctgctttagaagcaatggagatgagcggtttagataaagaaaaaatgaatcaagaccggtttggcgtcatcatcggatctgggatcggtggtcttccaacaatcgaaaaccaagttattcgtctacatgaaaaaggtgcaaaacgagtttctccaatgttcgtaccaatggcgattgccaacatggcagctggaaatattgctttgcgtgtaggtgcaaaaggtatttgtacagctatcgtaacagcttgtgctagcggaacgaattcaattggggaagcattccgtaacatcaaacatggctattctgatgtcattcttgctggaggaacagaagcaacgatttgtgagatggggattgctggatttgcagctttaacagcactctcagaatcaactgatcctaatcgtggttcgattccgtttgacgaaaatcggaatggttttgtgatgggtgaaggagcaggcgttctagttcttgaatctttagaacatgcacaagctcgcggtgccaaaatctatggagaaatcgttggatacggtgcaaactgtgacgcttaccatatgacagctcctactccagatggttctggtgcatctaaagcaatgaagcttgcgatggaagaagctggtgtacagccggaacaagtcggatatatcaatgctcacggaacaagtacaccagccaatgaccaggcagaagcaaaagcaatccaaatcgcattaggtgaaaatttcagagatacttacgtcagcagcacgaaatcgatgactggacatttattgggagcagccggcgggatcgaagccttggcaactttgctggcattagaacatcaatttatcccacctacgatcaatgtagaaaaacaagatcctgagattgacttgacagttgtcaaaaacgaaagcaaacctgcaagttttacttatgcaatgagtaattcattagggtttggcggacataatgcggttctgtgcatgaaacgctgggaggaataa

SEQ ID NO: 20011 - protein, 411 aa, Enterococcus faecium DO
MNRVVITGYGVTSPIGNDADSFLNSLKEGTNGIAPITKFDASETGITLAGEVKDFPYDKYFIKKDSKRMDMFSIYGIYAALEAMEMSGLDKEKMNQDRFGVIIGSGIGGLPTIENQVIRLHEKGAKRVSPMFVPMAIANMAAGNIALRVGAKGICTAIVTACASGTNSIGEAFRNIKHGYSDVILAGGTEATICEMGIAGFAALTALSESTDPNRGSIPFDENRNGFVMGEGAGVLVLESLEHAQARGAKIYGEIVGYGANCDAYHMTAPTPDGSGASKAMKLAMEEAGVQPEQVGYINAHGTSTPANDQAEAKAIQIALGENFRDTYVSSTKSMTGHLLGAAGGIEALATLLALEHQFIPPTINVEKQDPEIDLTVVKNESKPASFTYAMSNSLGFGGHNAVLCMKRWEE

SEQ ID NO: 20012 - DNA, 1308 bp, Neurospora crassa
  misc_feature (251)..(251): n is a, c, g, or t
  misc_feature (463)..(463): n is a, c, g, or t
  misc_feature (522)..(522): n is a, c, g, or t
  misc_feature (669)..(669): n is a, c, g, or t
  misc_feature (677)..(677): n is a, c, g, or t
  misc_feature (908)..(908): n is a, c, g, or t
  misc_feature (982)..(982): n is a, c, g, or t
  misc_feature (996)..(996): n is a, c, g, or t
  misc_feature (1033)..(1033): n is a, c, g, or t
  misc_feature (1036)..(1036): n is a, c, g, or t
  misc_feature (1047)..(1047): n is a, c, g, or t
  misc_feature (1067)..(1067): n is a, c, g, or t
  misc_feature (1150)..(1150): n is a, c, g, or t
  misc_feature (1263)..(1263): n is a, c, g, or t
  misc_feature (1266)..(1266): n is a, c, g, or t
  misc_feature (1302)..(1302): n is a, c, g, or t
  CDS (1)..(1308)
atgagacgcgtggtagtgacaggcctcggtgccatcacgcccttggccgtcggcatccgtcccacctggcgccggctcttggactctcattcgggcatcgtcagcgtcgctgacctcgagccccaggacaaatggaaggagctcaccagcaccgtgggcggccttgttcctacgcctgcgaggaacaagcagaatgttgacgaacagcacacttggaaggctgcggactggttggagccttcggaccaganacgcatgtctctcttcgcccagtattctgtcgctgctactgaaatggccctgcaagatgctgggtggaagcccacgaggcaggaagaccttgaagccacaggtgtctgcatgggaagcggaatcggtaacttggatgacttttataacaccagcgtcacgtatgacaaagagggctacaagagggtctcccctctctttgttcccaagattnttatcaacctcggggctggccacatcgccatgcgctacggtttccgtgggcccaaccantctgccaccaccgcttgtaccaccggcgctcactccatcggtgatgcctcccgcttcattgcctttggcgacgctgatgttatggtcgccggcggctccgagtcctgcattcaccctttaacttttgctggctttggccggtctcgntcgctgtntaccgcgtacaaccacgatccgacatctgcctgccgaccctttgacaaggaccgcgccggcttcgtggtatccgagggtgctgctgtcctcattctagaggagctggagcacgccaagaggcgcggcgctaggatcttggccgagctgacggggtatggatgcagtggtgatgcacatcacatgacggcgccaagggatgatgggtcaggggcattcctgtctatgaacanggcgctcaaaaatgccgggtgtcaaccgggggacgtggactatatcaatgcccatgccacggggacggctgtangagatgcggctgangcgattgccattcggtcgctgatgatgggtgaagaangantggacgacgantccaggattacggtgaacancaccaagggagcgattggtcatcttcttggtgcggcgggggccattgaatctgtgttttcgattctggccattgctgaggganccataccccccactctcaacttgaccagtcccaatgtcggcgttggattcaactttgtccctgttcaggcgcagcaaaaggaagtcaaggtggccatgtccaacagctttggnttngggggcaccaatgcctccttggtattttcaaagttngagtag

SEQ ID NO: 20013 - protein, 435 aa, Neurospora crassa
  misc_feature (84)..(84): Xaa can be any naturally occuring amino acid
  misc_feature (155)..(155): Xaa can be any naturally occuring amino acid
  misc_feature (174)..(174): Xaa can be any naturally occuring amino acid
  misc_feature (226)..(226): Xaa can be any naturally occuring amino acid
  misc_feature (303)..(303): Xaa can be any naturally occuring amino acid
  misc_feature (328)..(328): Xaa can be any naturally occuring amino acid
  misc_feature (332)..(332): Xaa can be any naturally occuring amino acid
  misc_feature (345)..(346): Xaa can be any naturally occuring amino acid
  misc_feature (349)..(349): Xaa can be any naturally occuring amino acid
  misc_feature (356)..(356): Xaa can be any naturally occuring amino acid
  misc_feature (384)..(384): Xaa can be any naturally occuring amino acid
  misc_feature (422)..(422): Xaa can be any naturally occuring amino acid
  misc_feature (434)..(434): Xaa can be any naturally occuring amino acid
MRRVVVTGLGAITPLAVGIRPTWRRLLDSHSGIVSVADLEPQDKWKELTSTVGGLVPTPARNKQNVDEQHTWKAADWLEPSDQXRMSLFAQYSVAATEMALQDAGWKPTRQEDLEATGVCMGSGIGNLDDFYNTSVTYDKEGYKRVSPLFVPKIXINLGAGHIAMRYGFRGPNXSATTACTTGAHSIGDASRFIAFGDADVMVAGGSESCIHPLTFAGFGRSRSLXTAYNHDPTSACRPFDKDRAGFVVSEGAAVLILEELEHAKRRGARILAELTGYGCSGDAHHMTAPRDDGSGAFLSMNXALKNAGCQPGDVDYINAHATGTAVXDAAXAIAIRSLMMGEEXXDDXSRITVNXTKGAIGHLLGAAGAIESVFSILAIAEGXIPPTLNLTSPNVGVGFNFVPVQAQQKEVKVAMSNSFGXGGTNASLVFSKXE

SEQ ID NO: 20014 - DNA, 1425 bp, Perilla frutescens
  CDS (1)..(1425)
atgcaatccctccactccaccggtctccgcccatctccgctcgacccacttctcaaaccccaccgctcctccgccgcggctctgccgggaagcaatgccaggccccccgcaaagaagctcccattcagagtctccgccgcagccgccgtggcggcggcgcccaagcgcgagaccgacccgaagaagcgcgtggtgatcacggggatggggttggtgtccgttttcggaaacgacgtcgacgcctactacgagaagctgctgagcggggagagcggcatcactctcattgatagattcgatgcgtcgaagttcccgacccgcttcggcgggcagattcgcgggttcaaggcggagggatacattgatgggaagaatgatcggagattggatgattgcttgaggtactgcattgtcgccggaaagaaggcgctcgagggtgcagatcttggtggagagaagctcaataagattgataagatccgagctggtgttctggttgggacgggaatgggcggtcttacagttttctctgatggtgttaaggctctaatagagaaaggtcacaggaaaataactccgtttttcataccttatgctataacaaacatggcctcggctttgcttgcgattgatcttggcttgatgggacccaattattcgatatcaactgcttgtgccacctcaaattattgtttctatgctgctgccaatcacatccgtcggggtgaagctgatctgatgattgctggtggaactgaagccgcgatgattcctattggtttgggtggttttgtcgcttgcagagcattgtcacagagaaatgatgatccacaaactgcttctaggccctgggacaaggatcgagatggttttgttatgggtgaaggttctggagtcttggtgatggagagtttggaacatgcaatgaaacgaggggcgccaatcattgctgaatacttgggaggtgcagtaaattgtgatgcttatcacatgacagatcccagagctgatggactcggtgtctcgtcatgtattcaaagtgcccttgaagattctggcgtttcacctgaggaggttaactacataaatgctcatgccacttccaccattgttggtgatttagcagacgtaaatgctattaagaaggtattcaagaacacctcagggatcaaaataaatgcaaccaagtcgatgatagggcattgtcttggtgctgctggtggtttagaagctattgcatcagtaaaagcaattacaactggatggcttcatcccaccataaatcaatttaatccggagccttccataggctttgataccgttgcaaacgaaaaacagcagcatgaagtcaatgttgcaatctcaaattcctttggattcgggggccacaactctgttgtcgcgttttctgcattcaaaccgtga

SEQ ID NO: 20015 - protein, 474 aa, Perilla frutescens
MQSLHSTGLRPSPLDPLLKPHRSSAAALPGSNARPPAKKLPFRVSAAAAVAAAPKRETDPKKRVVITGMGLVSVFGNDVDAYYEKLLSGESGITLIDRFDASKFPTRFGGQIRGFKAEGYIDGKNDRRLDDCLRYCIVAGKKALEGADLGGEKLNKIDKIRAGVLVGTGMGGLTVFSDGVKALIEKGHRKITPFFIPYAITNMASALLAIDLGLMGPNYSISTACATSNYCFYAAANHIRRGEADLMIAGGTEAAMIPIGLGGFVACRALSQRNDDPQTASRPWDKDRDGFVMGEGSGVLVMESLEHAMKRGAPIIAEYLGGAVNCDAYHMTDPRADGLGVSSCIQSALEDSGVSPEEVNYINAHATSTIVGDLADVNAIKKVFKNTSGIKINATKSMIGHCLGAAGGLEAIASVKAITTGWLHPTINQFNPEPSIGFDTVANEKQQHEVNVAISNSFGFGGHNSVVAFSAFKP

SEQ ID NO: 20016 - DNA, 1593 bp, Perilla frutescens
  CDS (1)..(1593)
atggccgcatgcatgtccgtcacgtgtgagagagaatccggcgtttctgcgctgtcgacgacgtcgtctaattcacgccgcctcaccaaatgggccgcccaccgccgcaagagggttctcgccaaatgtgcgccgcgcattcggaatctagtggattcttctctctcccttgagccccgccaccacttgcataaatctcacgaatgtttcttcggcttcgaatcgagaaatgctccgatgcagcgcggccgccagaaactcctccacccctccgcctattctggagaaatgatggcagtagctgtaaatccagccatggaagtttcacccaagaagaaacctccaaccaagcaccgacgagtggtcgtgacaggtatgggtgtggagacaccacttggtagtgatccagatgtcttctataataatctgctagaaggagtcagtggaattagtgagatagaggcttttgattgctcgcagtttccaaccagaattgctggagaaatcaagtcattctcaacagatggctgggttgtacctaaactttccaagagaatggacaagttcatgctttacatgttgacagcgggcaagaaggctttggctgatggaggaattacagtagatgccatggatgaactaaataaagcaaaatgtggtgtgctaattggctctgctatgggtggaatgaaagttttttatgatgcgattgaagcattgcgggtctcatataggaagatgaatccattttgtgttccttttgcaactaccaacatgggttctgccatgcttgcaatggatctgggatggatgggcccaaactactcaatatctactgcttgtgcaacaagtaacttttgtatactgaatgctgctaaccacatcatcagaggtgaagctgacttgatgctttgtggtggctcagatgcagcaattataccaattggattgggaggctttgttgcatgcagagcactgtcacaaagaaacagtgatccaactaaagcctcacgtccctgggatagtaatcgtgatggatttgttatgggagaaggtgctggagtactgctcttggaggaactagaacatgcaaagagtagaggtgcaactatctatgctgagtttcttggaggaagcttcactagtgatgcttatcacatgacagagcctcatccacaaggaactggtgtcattttatgcttagagaaggctttggctcaatcaggagtatctaaagaagatgtgaattatataaatgcacacgcaacttctactccagctggtgatcttaaggagtatcaggctcttcttcattgttttggcaagaatccggagttgagagtgaactccacaaaatccatgattgggcacctacttggagcagctggtgctgtcgaggcggttgcaactgtgcaggcaatcaggactggctgggttcatccaaatattaatcttgaaaatccagatggtggtgtggatgcaaatgtgttagtgggaccaacaaaagaaagactcgacattaaggtggcattgtctaattcgtttgggtttggtggtcataactcatcgattttgtttgctccatacaagtag

SEQ ID NO: 20017 - protein, 530 aa, Perilla frutescens
MAACMSVTCERESGVSALSTTSSNSRRLTKWAAHRRKRVLAKCAPRIRNLVDSSLSLEPRHHLHKSHECFFGFESRNAPMQRGRQKLLHPSAYSGEMMAVAVNPAMEVSPKKKPPTKHRRVVVTGMGVETPLGSDPDVFYNNLLEGVSGISEIEAFDCSQFPTRIAGEIKSFSTDGWVVPKLSKRMDKFMLYMLTAGKKALADGGITVDAMDELNKAKCGVLIGSAMGGMKVFYDAIEALRVSYRKMNPFCVPFATTNMGSAMLAMDLGWMGPNYSISTACATSNFCILNAANHIIRGEADLMLCGGSDAAIIPIGLGGFVACRALSQRNSDPTKASRPWDSNRDGFVMGEGAGVLLLEELEHAKSRGATIYAEFLGGSFTSDAYHMTEPHPQGTGVILCLEKALAQSGVSKEDVNYINAHATSTPAGDLKEYQALLHCFGKNPELRVNSTKSMIGHLLGAAGAVEAVATVQAIRTGWVHPNINLENPDGGVDANVLVGPTKERLDIKVALSNSFGFGGHNSSILFAPYK

SEQ ID NO: 20018 - DNA, 1278 bp, Streptomyces roseofulvus
  CDS (1)..(1278): transl_table=11
gtgaaccgacaagtcgccgtcaccggcatcggcgtggtggctccgggagggatcgggcgcaagccgtactgggagcagctcacctccggacgcaccgccacgcgcgccatctccttcttcgacgcctcgcccttccgctcgcggatcgccgccgaggtcgacttcgaccccgcggcggcgggcctgagcccgcgcgaggtccgccgcatggaccgggccgcgcagttcgccgtcgtgagcgccagggagagcctcgccgacagcggactcgacgtcgccgacctcgacccccaccggatcggggtgagcatcggcagcgccgtgggcgggaccacctcgctggaacgcgagtacctcgccctcagcgacagcgggcgacagtgggaactcgacctctcctacctctcgccgcacctctacgacgccttcacccccagctcgctcgcccgcgaggtggccggggtgatcggcgcggaggggcccgcggcagtcgtctccaccggctgcacctccggcatcgactcgctcggccacgcccgcgacctcatcgccgagggcagcgccgacgtcgtgctcgcgggcggcaccgacacccccatctcgccgatcgccgtcgcctgcttcgacgccatcaaggccacctcgcccagcaacgacgacccggcgcacgcctcgcgccccttcgacagggaacgcaacggcttcgtcctcgcggagggcgccgccgtcctcgtgctggaggagctggggcacgcgcgggcccgcgacgcccacgtctacgctctcgtgtccggctacgccacgcgctgcaacgcgtaccacatgaccgggctcaccccgcacggcagggagatggccgaggcgatccggcacgcgctcgccgagagcgggaccgaccccgccgccgtggactacgtcaacgcccacggctccggcaccaagcagaacgaccggcacgagaccgccgccttcaaggccacgctcggcgagcgggccaggagcgtgccggtcagctccatcaagtcgatgatcggccactcgctcggtgccatcggttcgctggagatcgcggcctgggcgctcgccatggagtacggcgtggtgccgcccaccgccaacctcgacacgcccgaccccgagtgcgacctcgactacgtgccccacgaggcgcgcgagacgcgggtggacagggtcctgagcgtcggcagcggcttcggcggtttccagagcgccatggtcctcacccgggacacgggcgcccgcctcccgacggcctga

SEQ ID NO: 20019 - protein, 425 aa, Streptomyces roseofulvus
MNRQVAVTGIGVVAPGGIGRKPYWEQLTSGRTATRAISFFDASPFRSRIAAEVDFDPAAAGLSPREVRRMDRAAQFAVVSARESLADSGLDVADLDPHRIGVSIGSAVGGTTSLEREYLALSDSGRQWELDLSYLSPHLYDAFTPSSLAREVAGVIGAEGPAAVVSTGCTSGIDSLGHARDLIAEGSADVVLAGGTDTPISPIAVACFDAIKATSPSNDDPAHASRPFDRERNGFVLAEGAAVLVLEELGHARARDAHVYALVSGYATRCNAYHMTGLTPHGREMAEAIRHALAESGTDPAAVDYVNAHGSGTKQNDRHETAAFKATLGERARSVPVSSIKSMIGHSLGAIGSLEIAAWALAMEYGVVPPTANLDTPDPECDLDYVPHEARETRVDRVLSVGSGFGGFQSAMVLTRDTGARLPTA

SEQ ID NO: 20020 - DNA, 1467 bp, Capsicum chinense
  CDS (1)..(1467)
atgagtagtattactagtagttgttattctaatttgatattgaagaagaaagaatcaagaatcaatggaggatttcatttacagtataatggacttagagctattgaaagtgtacaaatgccagcaagctctgttgcttataagccaaaagttgtaaaatggggaagaatcagggtcatggcttctccagctgtctcagctcctaagagagagacggacccgaagaaaaggattgtcataaccggaatgggccttgtttcagtctttggaagtgatatcgataatttttacaacaaacttctcgagggacaaagtggaatcagtttaatagacagatttgatgcctcaagttacacagttaggttcgcgggacagattcgtgatttctcctctgaaggctacatagacggaaagaatgatcgtcgcttggatgactgctggagatattgtcttgttgctgggaaaagggccctcgaagatgctaaccttggccaacaagttcttgatactatggacaaaacaaggatcggtgtcttggttgggtcgagcatggggggttcaaaagttttcgccgatgcggtggaagccttggtgcaaagaggatacaagaaaattaatccatttttcattccttactcaatcactaacatgggatcagcattgttggctatagacactggactaatgggaccaacttactctatttcaacggcttgtgcaactgccaattactgcttttacgcatctgcaaatcacattagaagaggcgaagctgatatcatggtagcaggtggaacggacgcttttatttcggctattggtgttggtggtctcatagcttgtcgagccttgtctcaaagaaatgatgaatatgaaaaggcttcaaggccatgggacaggaatcgtgatggatttgtcattggtgaaggctccggtgtcctggtgatggaaaatttggagcatgccttgaaaagaggtgctcctatcatagcggaatacttgggaggtgctatcacgtgtgatgctcatcacataaccgatcctcgtgctgatggacttggagtttcgtcttgcatagtaatgagtttggtagatgcgggagtttccccagaagaggtgaactatataaatgctcatgcaacatctactcttgctggagatttggctgaggtcaatgccatcaagaaggtcttcaaggatacctcggaaatcaaaatgaacgggacaaagtcgatgattggtcatggactcggggcttctggtggacttgaagccattgcaaccatcaaggcgatcacaacaggatggcttcatccaaccatcaatcaatatgacttagaacctcaggttacaattgacaccgttccaaatgtgaagaagcaacatgaagtgaacgtcggtatctccaactcgttcggattcggagggcataactcagtggttgtttttgcaccctacaaaccttga

SEQ ID NO: 20021 - protein, 488 aa, Capsicum chinense
MSSITSSCYSNLILKKKESRINGGFHLQYNGLRAIESVQMPASSVAYKPKVVKWGRIRVMASPAVSAPKRETDPKKRIVITGMGLVSVFGSDIDNFYNKLLEGQSGISLIDRFDASSYTVRFAGQIRDFSSEGYIDGKNDRRLDDCWRYCLVAGKRALEDANLGQQVLDTMDKTRIGVLVGSSMGGSKVFADAVEALVQRGYKKINPFFIPYSITNMGSALLAIDTGLMGPTYSISTACATANYCFYASANHIRRGEADIMVAGGTDAFISAIGVGGLIACRALSQRNDEYEKASRPWDRNRDGFVIGEGSGVLVMENLEHALKRGAPIIAEYLGGAITCDAHHITDPRADGLGVSSCIVMSLVDAGVSPEEVNYINAHATSTLAGDLAEVNAIKKVFKDTSEIKMNGTKSMIGHGLGASGGLEAIATIKAITTGWLHPTINQYDLEPQVTIDTVPNVKKQHEVNVGISNSFGFGGHNSVVVFAPYKP

SEQ ID NO: 20022 - DNA, 1554 bp, Cuphea wrightii
  CDS (1)..(1554)
atggccgccgtctcctccccattctgtacgtggctcgttgccgcctgcatgtccacttcattcgacaacgacccacgttccctttccaacaagcgggtccgcctctcccgccgccggaggactctctcctcccattgctccctccgcggatccaccttccaatgcctcggggataacgtaggattcgattccctcttcggatccaatcacggccaccggaggctcggccgcgcttcccgttccggggaggccatggctgtggcaatgcaacctgcaccggaagtctccacaaaaaagaaacctgttaccaagcaaaggcgagtagttgtgacaggtatgggcgtagtgactcctctaggccatgaccccgatgttttctacaataatctcctagacggagtaagtggcataagtgagatagagaccttcgactgcactcagtttcccacgagaattgccggagagatcaagtctttctccacagatgggtgggttgccccgaagctctccaagaggatggacaaattcatgctttacatgctgactgcaggcaagaaagcattagcagatgctggaatcactgaagatgtgatgaaagagctcgataaaagaaagtgtggagttctcattggctccgggatgggcggtatgaagctattcaacgattccattgaggctctgaggatttcatataagaaaatgaatcccttttgtgtaccttttgctacgacgaatatgggatccgctatgcttgcaatggacttgggatggatgggacctaattattcgatatcaactgcatgtgctacaagtaacttctgtatactgaatgctgcgaatcacataatcagaggcgaagcggatatgatgctttgtggtggctcggatgcagccattatacctatcggtttgggaggtttcgttgcatgccgagctttgtcacagaggaataatgaccctaccaaagcttcgagaccatgggacagtaatcgtgatggatttgtgatgggagaaggagccggagtgttacttctcgaggagttagagcatgcaaagaaaagaggtgcaaccatttatgcggaatttctaggtgggagtttcacttgtgatgcctaccacatgaccgagcctcaccctgaaggagctggagtgatcctctgcatagagagggccttggctcagtcgggagtctcgaaagaagacgtaaattacataaatgcgcatgcaacttcaactcctgctggagatattaaggaatatcaagctctcgcccgcattttcagccaaaacagcgagttaagagtgaattccaccaaatcgatgatcggtcatcttcttggagctgctggcggcgtagaagccgttacagtagttcaggccataaggactggttggatccatccaaatattaatttggaaaacccggacgatggcgtggatgcaaaattgctcgtcggccctaagaaggagaaactgaaggtgaaggtcggtttgtccaattcattcgggttcggtggccataactcatccatactctttgccccttgcaattag

SEQ ID NO: 20023 - protein, 517 aa, Cuphea wrightii
MAAVSSPFCTWLVAACMSTSFDNDPRSLSNKRVRLSRRRRTLSSHCSLRGSTFQCLGDNVGFDSLFGSNHGHRRLGRASRSGEAMAVAMQPAPEVSTKKKPVTKQRRVVVTGMGVVTPLGHDPDVFYNNLLDGVSGISEIETFDCTQFPTRIAGEIKSFSTDGWVAPKLSKRMDKFMLYMLTAGKKALADAGITEDVMKELDKRKCGVLIGSGMGGMKLFNDSIEALRISYKKMNPFCVPFATTNMGSAMLAMDLGWMGPNYSISTACATSNFCILNAANHIIRGEADMMLCGGSDAAIIPIGLGGFVACRALSQRNNDPTKASRPWDSNRDGFVMGEGAGVLLLEELEHAKKRGATIYAEFLGGSFTCDAYHMTEPHPEGAGVILCIERALAQSGVSKEDVNYINAHATSTPAGDIKEYQALARIFSQNSELRVNSTKSMIGHLLGAAGGVEAVTVVQAIRTGWIHPNINLENPDDGVDAKLLVGPKKEKLKVKVGLSNSFGFGGHNSSILFAPCN

SEQ ID NO: 20024 - DNA, 1623 bp, Cuphea wrightii
  CDS (1)..(1623)
atggcggccgccgcttccatggttgcgtccccattctgtacgtggctcgtagcctcttgcatgtccacttcattcgacaacgacccacgttcgccgtccgtcaagcgtttcccccgccggaagagggttctctcccaacgcggatccacattccaatgcctcgtcgcctcatgcatcgacccttgtgatcaataccggtcctccgcctcccttagcttcctcggggataacggatttgcttcccttttcggatccaagccattcatgtccaatcgcggccaccggaggctccgccgtgcttcccattccggggaggccatggctgtggctctgcaaccggcacaggaagctggcacgaagaagaaacctgttatcaagcaaaggcgagtagttgttaccggaatgggcgtggttactcctctaggccatgaacctgatgttttctacaacaatcttctagatggagtaagcggcataagtgagatagagaccttcgactgcactcagtttcccacgagaattgccggagagatcaagtctttttccacagatgggtgggtggccccaaagctatccaagaggatggacaagttcatgctttacttgttgactgctggcaagaaagcattagcagatggtggaatcaccgatgaggtgatgaaagagcttgataaaagaaagtgtggagttctcattggctccggaatgggcggcatgaaggtgttcaacgatgccattgaagctctgagggtttcatacaagaagatgaatcccttttgtgtaccttttgctaccacaaatatgggatcagctatgcttgcaatggacttgggatggatgggtcctaactactcgatatcaactgcctgtgcaacaagtaatttctgtatactgaatgctgcaaaccacataatcagaggcgaagctgacatgatgctttgtggaggctcggatgcagtcattatacctattggtttgggaggttttgtggcgtgccgagctttgtcacagaggaatagtgaccctaccaaagcctcgagaccatgggatagtaatcgtgatggatttgtaatgggcgaaggagctggagtgttacttctcgaggagttagagcatgcaaagaaaagaggtgcaaccatttatgcggagtttttagggggaagtttcacttgcgatgcctatcacatgaccgagcctcaccctgaaggagctggagtgatcctctgcatagagaaggccttggctcaggccggagtctctaaagaggacgtgaattacataaatgcgcatgcaacttccacatccgctggagatatcaaggaataccaagctcttgcccggtgtttcggtcaaaacagtgagctgagagttaattccactaaatcaatgatcggtcatcttcttggagcagctggtggtgtagaagcagttaccgtagttcaggcgataaggaccgggtggatccatccaaatcttaatttggaagacccagacaaagctgtggatgcaaaattgctcgtcggacctaagaaggagagactgaatgtcaaggtcggtttgtccaattcattcgggttcggtggtcataactcatccatacttttcgccccttgcaatgtctaa

SEQ ID NO: 20025 - protein, 540 aa, Cuphea wrightii
MAAAASMVASPFCTWLVASCMSTSFDNDPRSPSVKRFPRRKRVLSQRGSTFQCLVASCIDPCDQYRSSASLSFLGDNGFASLFGSKPFMSNRGHRRLRRASHSGEAMAVALQPAQEAGTKKKPVIKQRRVVVTGMGVVTPLGHEPDVFYNNLLDGVSGISEIETFDCTQFPTRIAGEIKSFSTDGWVAPKLSKRMDKFMLYLLTAGKKALADGGITDEVMKELDKRKCGVLIGSGMGGMKVFNDAIEALRVSYKKMNPFCVPFATTNMGSAMLAMDLGWMGPNYSISTACATSNFCILNAANHIIRGEADMMLCGGSDAVIIPIGLGGFVACRALSQRNSDPTKASRPWDSNRDGFVMGEGAGVLLLEELEHAKKRGATIYAEFLGGSFTCDAYHMTEPHPEGAGVILCIEKALAQAGVSKEDVNYINAHATSTSAGDIKEYQALARCFGQNSELRVNSTKSMIGHLLGAAGGVEAVTVVQAIRTGWIHPNLNLEDPDKAVDAKLLVGPKKERLNVKVGLSNSFGFGGHNSSILFAPCNV

SEQ ID NO: 20026 - DNA, 1488 bp, Hordeum vulgare
  CDS (1)..(1488)
atggcggcagcggcgccaccgctctgcgcgtggctcgtcgccgcgggcgcgcacgcggactgcggggcggacgagcaccagcatcgccggacgcagtgcctcgacgccggctccggcgcgatgttcggcctcgaccgccgccccctcggggcgcggcgccgtgggcccgcgcgctctggaatggccatgtctgttgccttgcagcctgaaaggataactgtcgagaagaagagacctgatgttaaacaaaggagagtcgttgtcactggcatgggtgtagtgacgccactgggtcatgatcctgatgtgttttacaccaaccttcttgacggtcatagtggaataagcgagattgaaacgtttgactgctccaagttccccacgagaattgcaggagagataaaatccttctctacagaaggttgggttgtacccaagctatctaagcgaatggacaagttcatgctgtatttgataactgctggtaagaaagcattggaaaatggtggactcaccgaagaagtaaggaacgagttggataaaaccagatgtggggttctcattggctctgcgatgggcggcatgaaggtatttaatgatgcaattgaagcgttaagggtttcttacaggaaaatgaacccgttttgtgttccctttgctactactaatatgggttctgcaatacttgcaatggatctgggctggatgggaccaaattactctatttccactgcatgtgccaccagtaacttttgtatcctcaacgcagcaaaccatatcagaagaggggaagctgatgtcatgctttgtggtggttctgatgcgccactcatcccaattgggttgggaggttttgttgcctgcagagctctttcacagaggaacagtgacccaacaaaagcttcccggccctgggatatggaccgtgatggttttgttatgggagaaggggcaggtgtgctagtattggaagaacttgagcatgctaagcaaagaggtgcaacaatatatgctgaatttcttggtggaagcttcacatgcgatgcttaccatatgactgagccgcatcctgaaggaacggggatcactctctgcattgagaaggcactggctgattcaggggtagcaagggaagaaatcaactatgtgaatgcgcatgcaacatccacacaatcaggcgatttgaaggagtatgaagccattgttcgttgctttggccagaaccctcagctgagggtgaactcaacaaaatcaatgactgggcatcttataggagcagctggtggaatagaagctgttgcttgtgtacaagctataagaactggttgggtccatccaaatctgaatttggagaacccagaaaaagtagtggacgtgggcgtgttggtgggatcagagaaggagagatgcgaagtaaaggtggcgctgtcaaactcatttggatttggtgggcataactcatcaattctgtttgcccccttcaagtaa

SEQ ID NO: 20027 - protein, 495 aa, Hordeum vulgare
MAAAAPPLCAWLVAAGAHADCGADEHQHRRTQCLDAGSGAMFGLDRRPLGARRRGPARSGMAMSVALQPERITVEKKRPDVKQRRVVVTGMGVVTPLGHDPDVFYTNLLDGHSGISEIETFDCSKFPTRIAGEIKSFSTEGWVVPKLSKRMDKFMLYLITAGKKALENGGLTEEVRNELDKTRCGVLIGSAMGGMKVFNDAIEALRVSYRKMNPFCVPFATTNMGSAILAMDLGWMGPNYSISTACATSNFCILNAANHIRRGEADVMLCGGSDAPLIPIGLGGFVACRALSQRNSDPTKASRPWDMDRDGFVMGEGAGVLVLEELEHAKQRGATIYAEFLGGSFTCDAYHMTEPHPEGTGITLCIEKALADSGVAREEINYVNAHATSTQSGDLKEYEAIVRCFGQNPQLRVNSTKSMTGHLIGAAGGIEAVACVQAIRTGWVHPNLNLENPEKVVDVGVLVGSEKERCEVKVALSNSFGFGGHNSSILFAPFK

SEQ ID NO: 20028 - DNA, 1470 bp, Hordeum vulgare
  CDS (1)..(1470)
atgtcggcggtggcgccaccgctgtgcacttggatcgtcgccgcctgcttgtctgcaacctgcgtcgcagacgatgaggggaagcagcgcaactacatcggcggcgggcttttctgcacgcgccgccaccttgctgcgcgccgccgaggcggggcacgctctggagtgcccattgctgtttcctttcatcctgaaagaggagctgtggaaaacaacaaatctgaaaccaaacaacggagggtagttgtcactggcatgggtgtcgtgactccgttaggccatgagcctgatgagttttacaacaaccttctacagggtgtcagtggagtaagtgagatagaagcatttgactgttccagctatcccacgagaattgcaggagaaatcaaatccttctcaacagatggttgggttgcaccaaagttagctaagcgaatggataagttcatgcaatatttgatagttgctggtaagaaagcattggacaatggtggagtcactgaagatatcatgaacgagttggacaaatcgagatgtggagttctaattggatctggtatgggtggcatgaaggtttttagtgatgcaattgaagcattgagggtctcctacaggaagatgaacccattttgtgtaccttttgcaactacaaacatgggctctgcagtacttgcgatggatttgggctggatgggcccaaactactccatctctactgcttgcgccactagtaacttctgcattctgagtgcagctaatcatatcatgaggggggaaactgatttgatgctttgtggtggttctgatgctcccattataccaattggattgggaggttttgtggcatgtagagctctttcacagagaaatagtgatccaacaaaagcttctcggccttgggatgtggatcgtgatgggtttgtcatgggagaaggggctggtgtgcttcttttggaagaacttgagcatgcaaagcaaagaggtgcagaaatatatgccgaatttctgggtggaaactttacgtgcgatgcatatcatatgacggaaccacatcctgaagggaagggggttattctttgtgtcgaaaatgcactagctgatgcaggagtaacaaggcaagacattaactacgtaaatgcccatgctacatctacacagttgggcgatttgaaggaattcgaagctcttcgccgctgttttggccagaatcctcagctaagagtaaactcaacaaagtcgatgactggccacttgctaggtgctgcaggtggaatagaagctgtagctgctatacaagctataagaactggttggatccatccgaatatcaatctaaacaatccggagaaaaatgtggatgtcagcttgctggtgggatcacaaaaggagagatgtgacgtgaaagttgcgttgtcgaattcatttggattcggtgggcacaattcatcaattttatttgcacccttttga

SEQ ID NO: 20029 - protein, 489 aa, Hordeum vulgare
MSAVAPPLCTWIVAACLSATCVADDEGKQRNYIGGGLFCTRRHLAARRRGGARSGVPIAVSFHPERGAVENNKSETKQRRVVVTGMGVVTPLGHEPDEFYNNLLQGVSGVSEIEAFDCSSYPTRIAGEIKSFSTDGWVAPKLAKRMDKFMQYLIVAGKKALDNGGVTEDIMNELDKSRCGVLIGSGMGGMKVFSDAIEALRVSYRKMNPFCVPFATTNMGSAVLAMDLGWMGPNYSISTACATSNFCILSAANHIMRGETDLMLCGGSDAPIIPIGLGGFVACRALSQRNSDPTKASRPWDVDRDGFVMGEGAGVLLLEELEHAKQRGAEIYAEFLGGNFTCDAYHMTEPHPEGKGVILCVENALADAGVTRQDINYVNAHATSTQLGDLKEFEALRRCFGQNPQLRVNSTKSMTGHLLGAAGGIEAVAAIQAIRTGWIHPNINLNNPEKNVDVSLLVGSQKERCDVKVALSNSFGFGGHNSSILFAPF

SEQ ID NO: 20030 - DNA, 1608 bp, Ricinus communis
  CDS (1)..(1608)
atgtcggtcacgtgctcaaaggagaacagacacgcgttcttctcttcatcgacaccgggcaccaccagcagtcacagtcgtacaagaaggaggcctaaatataatagtatcagcacccctgcctctcaatctttctttaattctttatcatcttctggatcgagttttcaacaattaatgtcttcttgcttggccttcgagccttgtagtcattactacagctctaatggcctctttcctaacactcctcttcttcctaagcgccatcctagacttcatcatcgccttcctcgttctggggaagcaatggcagtggctgtgcaacctgaaaaggaggttgcaacaaataagaaacctcttatgaagcaaaggagagtagttgttactgggatgggtgttgtttcaccccttggtcatgatatagacgtctattacaataatcttcttgacggttctagtggtattagtcagattgattcctttgactgtgcccaatttcctacgaggattgctggagagatcaagtctttctcaactgatggatgggttgcaccaaaactttccaagagaatggataaattcatgctttacatgcttactgctggcaaaaaagccttggcagatggtggtattacagaggatatgatggatgaattggataaagctagatgtggagttttaattggttctgcaatgggtggcatgaaggttttcaatgatgcaattgaagcattaaggatctcgtataggaagatgaatcctttctgcgtaccttttgcgactacaaatatgggctctgccatgcttgcaatggaccttggttggatggggccaaactattcaatatctactgcttgtgctactagcaatttttgtatattgaatgccgcaaaccacatcattagaggcgaagctgatattatgctttgtggtggctcagatgcagcaattatacctattggcttgggaggttttgtggcatgcagagcgctctcacagaggaatgatgatcctacaaaagcttcacgaccttgggatatgaatcgggatggatttgtgatgggggaaggagctggtgttcttcttttagaagaactagaacatgctaagaaaagaggtgcaaatatttatgcggaatttcttggaggaagctttacatgtgatgcttatcacatgactgaaccgcgtccagatggagttggtgtcattctctgtatagaaaaggcattagcgcgatctggtgtatccaaggaggaagtaaactacataaatgcacatgctacgtctaccccagctggagaccttaaagaatatgaagctcttatgcgctgtttcagccaaaatcctgatttgagagtgaactctacgaagtctatgattggccatttactaggagcagctggtgctgtggaagctatagcaacaatacaggcgatacggacaggatgggttcatccaaacatcaacctggaaaacccagaagaaggcgtggacacaaaggtgctggttggcccaaagaaggagagattggacattaaggttgctctgtccaactcttttgggttcggtgggcacaactcatcgatcatttttgctccgtacaagtga

SEQ ID NO: 20031 - protein, 535 aa, Ricinus communis
MSVTCSKENRHAFFSSSTPGTTSSHSRTRRRPKYNSISTPASQSFFNSLSSSGSSFQQLMSSCLAFEPCSHYYSSNGLFPNTPLLPKRHPRLHHRLPRSGEAMAVAVQPEKEVATNKKPLMKQRRVVVTGMGVVSPLGHDIDVYYNNLLDGSSGISQIDSFDCAQFPTRIAGEIKSFSTDGWVAPKLSKRMDKFMLYMLTAGKKALADGGITEDMMDELDKARCGVLIGSAMGGMKVFNDAIEALRISYRKMNPFCVPFATTNMGSAMLAMDLGWMGPNYSISTACATSNFCILNAANHIIRGEADIMLCGGSDAAIIPIGLGGFVACRALSQRNDDPTKASRPWDMNRDGFVMGEGAGVLLLEELEHAKKRGANIYAEFLGGSFTCDAYHMTEPRPDGVGVILCIEKALARSGVSKEEVNYINAHATSTPAGDLKEYEALMRCFSQNPDLRVNSTKSMIGHLLGAAGAVEAIATIQAIRTGWVHPNINLENPEEGVDTKVLVGPKKERLDIKVALSNSFGFGGHNSSIIFAPYK

SEQ ID NO: 20032 - DNA, 1410 bp, Ricinus communis
  CDS (1)..(1410)
atgcaagccctgcagtccccgtctctccgaccatcccctctaaccccgctccataaaaatactcacaatgcagcaaaacgcccaactaaaaaggtctcctttatcaccgcatcatcaacaaataacaacacgacgatttcagctccaaagcgagagaaagaccccagaaaaagggtagtcataactggtacgggtttggtatctgtgtttgggaatgatgtcgatacttactacgataaattgcttgctggagaaagtgggatcggacttattgataggttcgatgcgtctaagtttcctactagatttggtggacagatcagggggtttaattcacaaggttatattgatgggaaaaatgatagaaggcttgatgattgtttgaggtattgcattgttgctggtaaaaaagctcttgagcatgctgatcttggtggtgataagttgtctaagattgataaagagcgagctggtgtgcttgttggaacagggatgggtggtcttacagtcttttcagatggtgttcaggccctaattgaaaaaggacacaggaaaattaccccattctttattccttatgctataacaaacatgggatctgccttgttagctattgaacttggtctcatgggtcctaattattcaatttcaactgcttgtgctacctccaattattgcttctatgctgctgccaatcatattcgcagaggtgaggctgaattgatgattgctggtggaactgaagccgccatcattccaatcggtttgggaggttttgtagcatgtagggccttatcacaaaggaatgatgatccacaaactgcctcaaggccatgggacaaagatcgagatggctttgttatgggtgaaggtgctggagtgttggtaatggagagtttggaacatgcaatgaaaaggggtgcaccaataattgctgagtacttgggaggtgctgttaattgtgatgcttatcacatgactgatccaagggctgatggacttggggtctcttcctgcattgagagaagtcttgaagatgccggtgtgtcacctgaggaggttaactatataaatgcacatgcaacttccactcttgctggtgaccttgctgagataaatgctattaaaaaagtattcaagaatacgtctgacatcaaaatcaatgcaaccaagtctatgataggacattgccttggtgctgctggaggtctggaagcaattgcctgtgtgaaggccattaccacaggatggttgcatcctacaattaatcaatttaacccagagccatcagttgaatttgacactgttgccaataagaagcagcagcacgaagtgaatgttgccatttcaaattcctttggattcggtggacacaactctgtggtagccttttctgcatttaaaccctga

SEQ ID NO: 20033 - protein, 469 aa, Ricinus communis
MQALQSPSLRPSPLTPLHKNTHNAAKRPTKKVSFITASSTNNNTTISAPKREKDPRKRVVITGTGLVSVFGNDVDTYYDKLLAGESGIGLIDRFDASKFPTRFGGQIRGFNSQGYIDGKNDRRLDDCLRYCIVAGKKALEHADLGGDKLSKIDKERAGVLVGTGMGGLTVFSDGVQALIEKGHRKITPFFIPYAITNMGSALLAIELGLMGPNYSISTACATSNYCFYAAANHIRRGEAELMIAGGTEAAIIPIGLGGFVACRALSQRNDDPQTASRPWDKDRDGFVMGEGAGVLVMESLEHAMKRGAPIIAEYLGGAVNCDAYHMTDPRADGLGVSSCIERSLEDAGVSPEEVNYINAHATSTLAGDLAEINAIKKVFKNTSDIKINATKSMIGHCLGAAGGLEAIACVKAITTGWLHPTINQFNPEPSVEFDTVANKKQQHEVNVAISNSFGFGGHNSVVAFSAFKP

SEQ ID NO: 20034 - DNA, 1269 bp, Pseudomonas syringae pv
  CDS (1)..(1269): transl_table=11
atgagcagaagaattgtggtgacaggcatgggcgcagtcacacccctaggggcaggggtggagttgacctggaaacgcctgctcgaaggggcttcgggcattggtacacttcctgtggagatgacgcagggattgccagtgacgattggcggccaggtgcccggcattgctgacgacccggaaggcggttttaatccggattcagtggtgggcgctaaagatcagcgtaagatggatcgatttatcgtcttcgctttggcagctgcaaatgaggccttgaatcaagccaactggtctccgcaagagcctcatgagcaggaaaggacagctaccattgtggcatctggcattggcggctttcctgcgatagctgatgcagttcgcacattggacagtaaaggccccaagcggctttcaccattcacaattccatccttcctatgcaacatggcagccggtcatatttccatcaagtttggactgaaaggaccgctcgggtcaccagttacggcgtgtgcagcgggtgtacaagcaattggagacgctgcacgcatgattttagctggcgaagtggatgtagctgtatgcggcggcgcagaagcttgcattcatcaagtcagcctcgctgggtttgctgctgcacgagcattgtcgactgggcacaatgactttcctcaaaaagcatcccgcccttttgatcaagatcgtgacggcttcgtcatgggggaaggggcaggaatacttgttatcgaggagctttcgcatgccctcgccagaggcgcaacgcctatcgccgaacttgtcggctacggtaccagcgccgatgcctatcacatgacctccggcccagaggatggcaatggcgcgttgcgttcaatgcggatggcactaaatcaggccggggtaacgccagcagagatacagcatttgaatgctcatgccacctccactccagtaggggacaagggtgagatcgctgctatcaatgctttgttcggagagcatccaagcccggccatcagcgcaacaaaatcagcgactggacatctcttaggcgcagctgggggaattgaagcaatcttcacagttctcgccctccgcgaccaggttgcacctggaacgctgaacgtggcccacctcgatccgactgcgtgtaatctcgatattgtccagggtaagtcccgaagctgcgccatggagtacgccctatcaaacggcttcggttttgggggggtgaacgcaagcgtgttgttcaaacgatgggggtga

SEQ ID NO: 20035 - protein, 422 aa, Pseudomonas syringae pv
MSRRIVVTGMGAVTPLGAGVELTWKRLLEGASGIGTLPVEMTQGLPVTIGGQVPGIADDPEGGFNPDSVVGAKDQRKMDRFIVFALAAANEALNQANWSPQEPHEQERTATIVASGIGGFPAIADAVRTLDSKGPKRLSPFTIPSFLCNMAAGHISIKFGLKGPLGSPVTACAAGVQAIGDAARMILAGEVDVAVCGGAEACIHQVSLAGFAAARALSTGHNDFPQKASRPFDQDRDGFVMGEGAGILVIEELSHALARGATPIAELVGYGTSADAYHMTSGPEDGNGALRSMRMALNQAGVTPAEIQHLNAHATSTPVGDKGEIAAINALFGEHPSPAISATKSATGHLLGAAGGIEAIFTVLALRDQVAPGTLNVAHLDPTACNLDIVQGKSRSCAMEYALSNGFGFGGVNASVLFKRWG

SEQ ID NO: 20036 - DNA, 1272 bp, Streptomyces glaucescens
  CDS (1)..(1272): transl_table=11
gtgagcccgaccaatcgcaccgtggtcgtcaccggtatcggcgcaaccacaccgctgggtggcgacgcagcctccacctgggagggcctggtcgccgggcgctccggcgtcaagcccctcgaacaggactgggccgccgaccaggcggtccggatcgccgcgccggtggccgtggagcccaccgaggtcctcccccggccgcaggcccgcaagctggaccggtcggcgcagttcgcgctggtcgccgccaaggaggcgtgggccgacgcgggcttcaccggcaaggccggcgaggactcgtccgtcgaccccgaccggctgggcgccgtcatcgcctccggcatcggcggtgtgacgaccctgctggaccagtacgacgtgctgaaggagaagggcgtccgccgcgtctccccgcacaccgtccccatgctcatgccgaacggcccgtcggccaacgtcggtctggccgtgaacgcccgtgcgggcgtccacacgccggtctccgcgtgcgcgtccggcgccgaggccatcggctacgccatcgagatgatccgcaccggccgtgccgacgtggtgatcgccggtggcaccgaggccgccatccacccgctgccgatcgccgcgttcggcaacatgatggcgatgtccaagaacaatgacgacccgcagggcgcgtcccggccgtacgacgtcgcccgggacggcttcgtcctcggcgagggcgccggcgtgatcgtcctggagtccgccgagcacgccgcacggcgcggggcccgggtgtacgccgaggcggtcgggcagggtatctccgccgacagccacgacatcgtgcagccggagccggagggccgcggcatcgcgcacgccctgcagaacctgctggagcggacggacctcgaaccggccgagatcatgcacgtcaacgcgcacgcgacgtcgacgccggccggtgacgtggccgagctgaaggcgctgcggaaggtgttcggcgacgaggccgaccacttcgcggtgtccgccaccaagtcgatgaccggtcacctgctcggcggcgccggcggtgtcgagtcggtcgcgaccgtcctcgcgctgtaccaccgggtggcgccgcccaccatcaacgtggacaacctcgaccccgaggccgaggcgaacgcggacatcgtccgcggtgaggcccgcaagctgcccgtcgagggccgtatcgcggccctgaacgactccttcgggttcggtgggcacaacgtggtgctggcgttccggacggtgtga

SEQ ID NO: 20037 - protein, 423 aa, Streptomyces glaucescens
MSPTNRTVVVTGIGATTPLGGDAASTWEGLVAGRSGVKPLEQDWAADQAVRIAAPVAVEPTEVLPRPQARKLDRSAQFALVAAKEAWADAGFTGKAGEDSSVDPDRLGAVIASGIGGVTTLLDQYDVLKEKGVRRVSPHTVPMLMPNGPSANVGLAVNARAGVHTPVSACASGAEAIGYAIEMIRTGRADVVIAGGTEAAIHPLPIAAFGNMMAMSKNNDDPQGASRPYDVARDGFVLGEGAGVIVLESAEHAARRGARVYAEAVGQGISADSHDIVQPEPEGRGIAHALQNLLERTDLEPAEIMHVNAHATSTPAGDVAELKALRKVFGDEADHFAVSATKSMTGHLLGGAGGVESVATVLALYHRVAPPTINVDNLDPEAEANADIVRGEARKLPVEGRIAALNDSFGFGGHNVVLAFRTV

SEQ ID NO: 20038 - DNA, 1269 bp, Streptomyces griseus
  CDS (1)..(1269): transl_table=11
gtggaacgccgggcagtgatcacgggaatcggtgtgtgcgcaccgggcggaaccggtgtggacagcttctgggagctgatgtgcgacggccggacggccacccgcggcatcaccctcttcgacccgtctccgtaccgctccagggtcgccgccgagatcgacttcgacccgcgggcgcacgggctgacgccgcaggagatccggcggatggaccgggccgcgcagttcggcgtggtgacggcacgggaggccttcgccgacagcgggctcgacggcgccgcgctcgatccgttccgtacgggagtcagcctcggcaccgcgatcggcgcggccggcggcctggacgcggagtaccgcgtggtcagcgacgacggccggctggagctggtcgaccaccggtacgcgaccccgcatctgtacgacctgttcgtgccgagctccttcgcgaccgaagtggcctgggccgtcggcgcggaaggaccggcgacggtggtgtccaccggctgcaccgccgggatcgacgcggtgggccacgcggtggaggcgatccgcgacggcagcgccgatgtgatggtcaccggcgcggtggacgcgccgatcaccccgctcacgatggcggccttcgacgcgatccgcgccaccacgtccctcaacgacgaggcggacaccgcctcccgccccttcgacgcgtcacgcaagggcttcgtcctcggtgagggggcggcggtgttcgtcctggaggaggcggagcacgcacggcgcagaggcgcgtacgtgtacgcggagatcgccggatacgcctcgcgcggcaacgccttccacatgaccggactgcggtccgacggagcggagctggccgccgcgatccgggcggcgctggacgaggcccggctcgacgcgtcggcggtggactacgtcaacgcgcacggttccggcacccgccagaacgaccggcacgagacggtcgcgctcaagtcggctctgggacagcacgcccaccgggtgccggtcagcgcgatcaagtcgatggtcgggcactcgctcggggcgatcggctccatcgagatcgccgcctgcgcactggccatgcggcaccacgtcatccctccgaccgccaatctgcacaccccggatcccgagtgcgatctcgactatgtcccgctgacggcccgcgcgcagcgcaccgatgccgtcctcaccatcggcagcggattcggcggcttccagagcgcgatggtgctggcccgtcccgacaggagcgccgcgtga

SEQ ID NO: 20039 - protein, 422 aa, Streptomyces griseus
MERRAVITGIGVCAPGGTGVDSFWELMCDGRTATRGITLFDPSPYRSRVAAEIDFDPRAHGLTPQEIRRMDRAAQFGVVTAREAFADSGLDGAALDPFRTGVSLGTAIGAAGGLDAEYRVVSDDGRLELVDHRYATPHLYDLFVPSSFATEVAWAVGAEGPATVVSTGCTAGIDAVGHAVEAIRDGSADVMVTGAVDAPITPLTMAAFDAIRATTSLNDEADTASRPFDASRKGFVLGEGAAVFVLEEAEHARRRGAYVYAEIAGYASRGNAFHMTGLRSDGAELAAAIRAALDEARLDASAVDYVNAHGSGTRQNDRHETVALKSALGQHAHRVPVSAIKSMVGHSLGAIGSIEIAACALAMRHHVIPPTANLHTPDPECDLDYVPLTARAQRTDAVLTIGSGFGGFQSAMVLARPDRSAA

SEQ ID NO: 20040 - DNA, 1293 bp, Streptomyces nogalater
  CDS (1)..(1293): transl_table=11
atgaaggaatccatcaaccgtcgcgtggtcatcaccggaatagggatcgtcgcgcccgatgccaccggggtgaaaccgttctgggatctgctgacggccggtcgcaccgcgacccggaccatcaccgccttcgatccctctccgttccgttcccgcatcgccgcggaatgcgatttcgacccgcttgccgaagggctgaccccccagcagatccggcgtatggaccgggccacgcagttcgcggtcgtcagcgcccgggaaagcctggaggacagcggactcgacctcggcgccctggacgcctcccgcaccggcgtggtcgtcggcagcgcggtcggctgcaccacgagcctggaagaggagtacgcggtcgtcagcgacagcggccggaactggctggtcgacgacggctacgccgtaccgcacctattcgactacttcgtgcccagctccatcgccgccgaggtggcacacgaccgcatcggcgcggagggccccgtcagcctcgtgtcgaccgggtgcacctcgggcctggacgccgtgggccgcgcggccgacctgatcgccgagggagcggcggatgtgatgctggccggtgcgaccgaggcgcccatctcccccatcaccgtggcgtgcttcgatgccatcaaggcgaccaccccccgcaacgacacgcccgccgaggcgtcccgtccgttcgaccgcaccaggaacgggttcgtactcggcgagggcgctgccgtgttcgtcctggaggagttcgaacacgcgcgccgccggggcgcgctcgtgtacgcggagatcgccgggttcgccactcgctgcaacgccttccacatgaccggtctgcgcccggacgggcgggagatggcggaggccatcggggtggcgctcgcccaggcgggcaaggcgccggctgacgtcgactacgtcaacgcccacggttccggcacccggcagaatgaccgtcacgagacggcggccttcaagcgcagtctcggcgaccacgcctaccgggtcccggtcagcagcatcaaatccatgatcgggcactcgctgggcgcgatcggctccctggagatcgccgcctccgtgctggccatcacacacgacgtggtgccgcccaccgccaatctgcacgagccggatcccgagtgcgatctggactacgtgccgctgcgggcgcgtgcgtgcccggtggacacggtgctcacggtgggcagcgggttcggcggtttccagagcgccatggtgctgtgcggtccgggctcgcggggaaggtcggccgcgtga

SEQ ID NO: 20041 - protein, 430 aa, Streptomyces nogalater
MKESINRRVVITGIGIVAPDATGVKPFWDLLTAGRTATRTITAFDPSPFRSRIAAECDFDPLAEGLTPQQIRRMDRATQFAVVSARESLEDSGLDLGALDASRTGVVVGSAVGCTTSLEEEYAVVSDSGRNWLVDDGYAVPHLFDYFVPSSIAAEVAHDRIGAEGPVSLVSTGCTSGLDAVGRAADLIAEGAADVMLAGATEAPISPITVACFDAIKATTPRNDTPAEASRPFDRTRNGFVLGEGAAVFVLEEFEHARRRGALVYAEIAGFATRCNAFHMTGLRPDGREMAEAIGVALAQAGKAPADVDYVNAHGSGTRQNDRHETAAFKRSLGDHAYRVPVSSIKSMIGHSLGAIGSLEIAASVLAITHDVVPPTANLHEPDPECDLDYVPLRARACPVDTVLTVGSGFGGFQSAMVLCGPGSRGRSAA

SEQ ID NO: 20042 - DNA, 1260 bp, Streptomyces peucetius
  CDS (1)..(1260): transl_table=11
gtgaaccggcggatcgtcatcaccgggatcggcgtggtggctcccggcgccgtcgggaccaagccgttctgggagctgctgctgtccggaaccaccgccacccgcgccatcagcactttcgacgccacgcccttccgttcccgtatcgccgccgagtgcgacttcgatccggtggcggcggggctgtccgcggagcaggcccggcgcctcgaccgggccgggcagttcgcgctggtcgccggtcaggaggcgctcgccgacagcgggctgcgaatcgatgaggactccgcgcaccgggtcggggtgtgcgtgggcaccgccgtcggctgcacgcagaaactggagtccgagtacgtcgctctcagcgcgggcggagcgcactgggtcgtggaccccggccgggggtcgcccgagctgtacgactacttcgtgccgagttccctcgccgccgaagtggcctggctcgccggggcggaggggcccgtgaacatcgtctcggccgggtgcacctcggggatcgactccatcgggtacgcctgcgagctcatccgcgaggggacggtggacgccatggtcgcgggaggcgtggacgcacccatcgcgccgatcacggtggcctgcttcgacgccatcagggcgacctccgaccacaacgacacccccgagaccgcctcgcgtcccttcagccgcagccgcaacggctttgtgctgggcgagggcggtgcgatcgtggtcctggaagaggcggaggcggccgtgcgcaggggcgcgcggatctacgccgagatcggcgggtacgcctcacgcggcaacgcgtaccacatgaccgggctgcgcgcagacggcgccgagatggcggcggcgatcaccgcggccctcgacgaggcccgccgcgacccctcggacgtggactacgtcaacgcccacggaacggcgacgaagcagaacgaccggcacgagacctccgcgttcaagcgctccctgggggagcacgcgtaccgggtgcccatcagctccatcaagtcgatgatcggtcactccctgggcgctgtcggctcgctcgaagtggcggcgaccgcactggccgtggagtacggggtgatcccgccgaccgcgaatctgcacgacccggatccggaactcgacctggactacgtgccgctgacggcacgagaaaagcgggtgcggcacgcgctgacggtgggcagcggcttcggcggcttccagagcgccatgctgctgagccgtctcgagaggtga

SEQ ID NO: 20043 - protein, 419 aa, Streptomyces peucetius
MNRRIVITGIGVVAPGAVGTKPFWELLLSGTTATRAISTFDATPFRSRIAAECDFDPVAAGLSAEQARRLDRAGQFALVAGQEALADSGLRIDEDSAHRVGVCVGTAVGCTQKLESEYVALSAGGAHWVVDPGRGSPELYDYFVPSSLAAEVAWLAGAEGPVNIVSAGCTSGIDSIGYACELIREGTVDAMVAGGVDAPIAPITVACFDAIRATSDHNDTPETASRPFSRSRNGFVLGEGGAIVVLEEAEAAVRRGARIYAEIGGYASRGNAYHMTGLRADGAEMAAAITAALDEARRDPSDVDYVNAHGTATKQNDRHETSAFKRSLGEHAYRVPISSIKSMIGHSLGAVGSLEVAATALAVEYGVIPPTANLHDPDPELDLDYVPLTAREKRVRHALTVGSGFGGFQSAMLLSRLER

SEQ ID NO: 20044 - DNA, 1278 bp, Streptomyces roseofulvus
  CDS (1)..(1278): transl_table=11
gtgaaccgacaagtcgccgtcaccggcatcggcgtggtggctccgggagggatcgggcgcaagccgtactgggagcagctcacctccggacgcaccgccacgcgcgccatctccttcttcgacgcctcgcccttccgctcgcggatcgccgccgaggtcgacttcgaccccgcggcggcgggcctgagcccgcgcgaggtccgccgcatggaccgggccgcgcagttcgccgtcgtgagcgccagggagagcctcgccgacagcggactcgacgtcgccgacctcgacccccaccggatcggggtgagcatcggcagcgccgtgggcgggaccacctcgctggaacccgagtacctcgccctcagcgacagcgggcgacagtgggaactcgacctctcctacctctcgccgcacctctacgacgccttcacccccagctcgctcgcccgcgaggtggccggggtgatcggcgcggaggggcccgcggcagtcgtctccaccggctgcacctccggcatcgactcgctcggccacgcccgcgacctcatcgccgagggcagcgccgacgtcgtgctcgcgggcggcaccgacacccccatctcgccgatcgccgtcgcctgcttcgacgccatcaaggccacctcgcccagcaacgacgacccggcgcacgcctcgcgccccttcgacagggaacgcaacggcttcgtcctcgcggagggcgccgccgtcctcgtgctggaggagctggggcacgcgcgggcccgcgacgcccacgtctacgctctcgtgtccggctacgccacgcgctgcaacgcgtaccacatgaccgggctcaccccgcacggcagggagatggccgaggcgatccggcacgcgctcgccgagagcgggaccgaccccgccgccgtggactacgtcaacgcccacggctccggcaccaagcagaacgaccggcacgagaccgccgccttcaaggccacgctcggcgagcgggccaggagcgtgccggtcagctccatcaagtcgatgatcggccactcgctcggtgccatcggttcgctggagatcgcggcctgggcgctcgccatggagtacggcgtggtgccgcccaccgccaacctcgacacgcccgaccccgagtgcgacctcgactacgtgccccacgaggcgcgcgagacgcgggtggacagggtcctgagcgtcggcagcggcttcggcggtttccagagcgccatggtcctcacccgggacacgggcgcccgcctcccgacggcctga

SEQ ID NO: 20045 - protein, 425 aa, Streptomyces roseofulvus
MNRQVAVTGIGVVAPGGIGRKPYWEQLTSGRTATRAISFFDASPFRSRIAAEVDFDPAAAGLSPREVRRMDRAAQFAVVSARESLADSGLDVADLDPHRIGVSIGSAVGGTTSLEPEYLALSDSGRQWELDLSYLSPHLYDAFTPSSLAREVAGVIGAEGPAAVVSTGCTSGIDSLGHARDLIAEGSADVVLAGGTDTPISPIAVACFDAIKATSPSNDDPAHASRPFDRERNGFVLAEGAAVLVLEELGHARARDAHVYALVSGYATRCNAYHMTGLTPHGREMAEAIRHALAESGTDPAAVDYVNAHGSGTKQNDRHETAAFKATLGERARSVPVSSIKSMIGHSLGAIGSLEIAAWALAMEYGVVPPTANLDTPDPECDLDYVPHEARETRVDRVLSVGSGFGGFQSAMVLTRDTGARLPTA

SEQ ID NO: 20046 - DNA, 1467 bp, Glycine max
  CDS (1)..(1467)
atggcttcgaccaccacctcctccctctgcacgtggctcgttgctgcttgcatgtcagtcacgtgccacgccgaccgcaccaaaacccctcacgcaatgttccgctcctccaaaaagtctcgctactctcaattcaacgtttgtcgatccactcattctggtaaaacaatggctgtagctttgcaacctacccaagagatcacgacaataaaaaaacctcccacgaagcaaaggcgagtggttgtgacaggattgggtgtggttacaccacttgggcatgagccagatatcttctacaataatttgcttgatggtgctagtggcataagcgagattgaaacatttgattgtgcagaatatccaacaaggattgctggtgaaatcaagtctttctcaactgatggctgggtagcaccaaaactttctaagagaatggataaatttatgctctatatgctgacagctggcaaaaaagccttggttgatggtggaattactgatgatgtaatggatgagttaaataaagaaaagtgtggagttctgattgggtcagcaatgggtggcatgaaggttttcaatgatgccatcgaagctttacgaatctcatataagaagatgaatcctttttgtgtaccttttgcaacaacaaatatgggttctgccatgcttgcaatggatctgggatggatgggccctaattattctatctctacagcttgtgctacaagtaacttttgtatattgaatgcagcaaaccatatcattagaggtgaagctgatgtgatgctttgtggaggctcagatgctgctattataccaattggtttgggaggctttgtggcatgcagggcactctcacaaaggaatactgatcctaccaaagcttcacgcccttgggacattaaccgtgatggatttgtcatgggtgaaggggctggagttttgcttttagaggaactggagcatgctaaggaaagaggtgcaaccatatatgctgaattccttggtggaagtttcacctgtgatgcatatcatgtgactgagccgcgtcctgatggggctggtgttatactgtgcattgaaaaggcattagctcagtctggagtatcaaaagaggatgtgaattacataaatgcacatgccacatccacaccagctggagatcttaaggagtaccaagctctaatgcattgttttggtcaaaaccccgagttaagagtgaattctacaaaatctatgattggtcatctactaggggcagctggcggtgtggaagctgtggccacaatacaggcaattaggacagggtgggttcatcccaatatcaacctagaaaacccagataacggagtggatgctaaagtgcttgttggctcaaagaaagagagactggatgtcaaggcagccttgtcgaattcatttggttttgggggtcacaattcttcaatcatatttgcaccatactag

SEQ ID NO: 20047 - protein, 488 aa, Glycine max
MASTTTSSLCTWLVAACMSVTCHADRTKTPHAMFRSSKKSRYSQFNVCRSTHSGKTMAVALQPTQEITTIKKPPTKQRRVVVTGLGVVTPLGHEPDIFYNNLLDGASGISEIETFDCAEYPTRIAGEIKSFSTDGWVAPKLSKRMDKFMLYMLTAGKKALVDGGITDDVMDELNKEKCGVLIGSAMGGMKVFNDAIEALRISYKKMNPFCVPFATTNMGSAMLAMDLGWMGPNYSISTACATSNFCILNAANHIIRGEADVMLCGGSDAAIIPIGLGGFVACRALSQRNTDPTKASRPWDINRDGFVMGEGAGVLLLEELEHAKERGATIYAEFLGGSFTCDAYHVTEPRPDGAGVILCIEKALAQSGVSKEDVNYINAHATSTPAGDLKEYQALMHCFGQNPELRVNSTKSMIGHLLGAAGGVEAVATIQAIRTGWVHPNINLENPDNGVDAKVLVGSKKERLDVKAALSNSFGFGGHNSSIIFAPY

SEQ ID NO: 20048 - DNA, 1470 bp, Glycine max
  CDS (1)..(1470)
atggcttcgaccaccacctcctccctctgcacgtggctcgtcgctgcttgcatgtcagtcacgtgcgacgccgaccgcaccagaacccctcacgcaatcttccgctcctccaaaaagtctcgcaagtctcaattcaacgtctctcgatccactcattctggtaaaacaatggctgtagctttgcaacctacccaagaggtcacaacaataaaaaaacctcctacaaagcaaaggcgagtagttgtgacaggattgggtgtggttacaccacttgggcatgagccagatatcttctacaataatttgcttgatggtgttagtggcataagtgagattgaaacatttgactgtgcagaatatccaacaaggattgctggtgaaatcaagtctttctcaactgatggctgggtagcaccaaaactttctaagagaatggataaatttatgctctatatgctgacagctggcaaaaaagccttggttgatggtggaattactgatgatgtaatggatgagttaaataaagataagtgtggagttctgattggctcagcaatgggtggcatgaaggttttcaatgatgccattgaagctttacgaatctcatataagaagatgaatcctttttgtgtaccttttgcaacaacaaatatgggttctgccatgcttgcaatggatctgggatggatgggccctaattattctatctctacagcttgtgctacaagtaacttttgtatattgaatgcagcaaaccatatcattagaggtgaagctgatgtgatgctttgtggtggctcagatgctgctattataccaattggtttgggaggctttgtggcatgcagggcactctcacaaaggaatactgatcctaccaaagcttcacgcccttgggacattaaccgtgatggatttgtcatgggagaaggggctggagttttgcttttagaagaactggagcatgctaagaaaagaggtgcaaccatatatgctgaattccttggtggaagtttcacctgtgatgcatatcatgtgactgagccgcgtcctgatggggctggtgttattctttgcattgaaaaggcattagctcagtctggagtatcaaaagaggatgtgaattacataaatgcacatgccacatccacaccagctggagatcttaaggagtaccaagctctaatgcattgttttggtcaaaaccccaagttacgagtgaattctacaaaatctatgattggtcatctactaggggcagctggcgctgtggaagctgtggccacaatacaggcaattaggacagggtgggttcatcccaatatcaacctagaaaagccagataatggagtggatgctaaagtgcttgttggctcaaagaaagagagactggatgtcaaggcagccttgtcgaattcatttggttttgggggtcacaattcttcaatcatatttgcaccttacaagtga

SEQ ID NO: 20049 - protein, 489 aa, Glycine max
MASTTTSSLCTWLVAACMSVTCDADRTRTPHAIFRSSKKSRKSQFNVSRSTHSGKTMAVALQPTQEVTTIKKPPTKQRRVVVTGLGVVTPLGHEPDIFYNNLLDGVSGISEIETFDCAEYPTRIAGEIKSFSTDGWVAPKLSKRMDKFMLYMLTAGKKALVDGGITDDVMDELNKDKCGVLIGSAMGGMKVFNDAIEALRISYKKMNPFCVPFATTNMGSAMLAMDLGWMGPNYSISTACATSNFCILNAANHIIRGEADVMLCGGSDAAIIPIGLGGFVACRALSQRNTDPTKASRPWDINRDGFVMGEGAGVLLLEELEHAKKRGATIYAEFLGGSFTCDAYHVTEPRPDGAGVILCIEKALAQSGVSKEDVNYINAHATSTPAGDLKEYQALMHCFGQNPKLRVNSTKSMIGHLLGAAGAVEAVATIQAIRTGWVHPNINLEKPDNGVDAKVLVGSKKERLDVKAALSNSFGFGGHNSSIIFAPYK

SEQ ID NO: 20050 - DNA, 1299 bp, Streptomyces spiramyceticus
  CDS (1)..(1299): transl_table=11
atgtcagcgacggactcagctgtgggcgcccagcgccgggtggtcatcaccggcataggtgtcgtggcgcccggaggcacgggcaccaaagcgttctgggacctcatcacgtcgggtcgcaccgcgaccggacgcatctcctacttcgaccccgcgccgttccgctcccaggtggcggccgagtgcaccttcgaccccgccctccagggcctgacgccccgcgagatccggcgcatggaccgggcggcccagttcgcggtcgtatcggcccgggaagcggtgcaggacagcggcctcgacttcggcagccccgacccggcacgcatcggagtgaccatcggcagcgcggtcggcgccacgatgggcctcgaagaggagtacgtcgtcctgagcgacagcggacgcaagtggctcgtcgacaactcctacggagtgccgcatctgtacggacacttcgtgcccagcagcatggccgccgaggtcgcctgggccgtcggcgccgaaggccccgccgccgtcgtctcggccggctgcacctccggcatcgactcggtcggctacgcccgggaactcatcgccgagggcagcgtggacatcatggtcgccggcgccaccgacgccccgatctcacccatcgcggtcgcctgcttcgacgccatcaaggcgaccaccccgcgcaacgaggacgcggaacacgcctcccggccgttcgacaagagccgcaacggcttcgtactcggcgaagggtccgccgtcttcgtcctggaggaatacgggcacgcacgccggcgcggcgcccacatctacgccgagatcgccgggttcgggtcccgctgcaacgccttccacatgaccggactgcgcccggacggccgcgagatggccgtcgccatcgacaccgccctggccgaggcccggatgaacgccgaggaggtgtcgtacatcaacgcgcacggctccgggaccaagcagaacgaccggcacgagaccgccgccttcaagcgcagcctcgggcaccacgcgtacgacgtgccggtcagctcgatcaagtcgatggtcggccactccctcggagcgatcggctccatcgagatcgcggcctgtgcgctggccatcgaacacggtgtggtgccgcccaccgccaacctgcacacgcccgaccctgagtgcgacctggactacgtacccctggtggcccgcgaacagcgcgtggacaccgccctcacagtcggcagcggcttcggcggattccagagcgccatggtgctgacccgtcccgaggagaggaccggggcatga

SEQ ID NO: 20051 - protein, 432 aa, Streptomyces spiramyceticus
MSATDSAVGAQRRVVITGIGVVAPGGTGTKAFWDLITSGRTATGRISYFDPAPFRSQVAAECTFDPALQGLTPREIRRMDRAAQFAVVSAREAVQDSGLDFGSPDPARIGVTIGSAVGATMGLEEEYVVLSDSGRKWLVDNSYGVPHLYGHFVPSSMAAEVAWAVGAEGPAAVVSAGCTSGIDSVGYARELIAEGSVDIMVAGATDAPISPIAVACFDAIKATTPRNEDAEHASRPFDKSRNGFVLGEGSAVFVLEEYGHARRRGAHIYAEIAGFGSRCNAFHMTGLRPDGREMAVAIDTALAEARMNAEEVSYINAHGSGTKQNDRHETAAFKRSLGHHAYDVPVSSIKSMVGHSLGAIGSIEIAACALAIEHGVVPPTANLHTPDPECDLDYVPLVAREQRVDTALTVGSGFGGFQSAMVLTRPEERTGA

SEQ ID NO: 20052 - DNA, 1218 bp, Saccharopolyspora erythraea
  CDS (1)..(1218): transl_table=11
gtgaccggcatgggcgtggtcagcccgctgggggtcggcaccgagcagttccacgccaaccagcagctcggccgcagcgccgtccggcgcgtcaccgcctacgacccgggcgacgacccggtgcgcatcgcggccgaggtggacctgcccgagcagttccagttcacccggcgcgaccagctgcgcaccgaccggtgcacgcagctggcgatcgtcgccgcccggctgggcgtcgaggaggccaagctcgacctcgccgcgtccgacacctcgcgcatcggcgtggtcatcggctccggcatgggcggcgtggggacctgggagcgcaactgcctggccctgcacgagtcgggggtgcgggcgatgcgcaccaagaccgtcccgatgtcgatgatcaacgacccgtcggcgtccatcgcgatccgctacggcaccaccggcccctgcacgacggtcaccaccgcctgcgcctcgggcgccgacgcactggtggcggcggcgcagatgatccgcctcggcgaggccgacgtggtgctggcgggcggcgccgaggcgccgctgtcgcgcagcgtcctggccggcttcgcgcgcctcggcgcgctgtcggaggacaacgacgcgcccgagagcgcgtgccgtccgttcagcgccgaccggacgggcttcgtcatgggcgaaggcgcggccgtgctggtcctggagtccgccgagcacgccaccgcgcgcggcgcgcaggtgcgggcgcggatggccggctacgggcgctccgccgacgcctaccacgtgacgatgccgcaccccgaggccgccggcgcgcgggccgccatcgtcgcggcgctgcgcgacgccggtgcccagccgtccgacgtcgacttcgtcaacgcccacggcaccggcaccgccctcaacgaccacgccgaagccctcgccatgcgcgcggtgttcggcaccggcgtggagcggatcccggtcaccgcgaccaagtcgctcaccgggcactcgctcggcgcggcgggggcggtcgaggccgtggccaccgtgcaggcggtgtccagcggggtcatcccgcccacggccaacctccgggtgcccgatcccgagctcggcatcgacgtggtccacggcgggccgcgcgaggcgcgcatcaacctggcgctgtcgaactcgttcgccttcggcgggcacaacgtcgtgctcgccttcgccccacccctgtag

SEQ ID NO: 20053 - protein, 405 aa, Saccharopolyspora erythraea
MTGMGVVSPLGVGTEQFHANQQLGRSAVRRVTAYDPGDDPVRIAAEVDLPEQFQFTRRDQLRTDRCTQLAIVAARLGVEEAKLDLAASDTSRIGVVIGSGMGGVGTWERNCLALHESGVRAMRTKTVPMSMINDPSASIAIRYGTTGPCTTVTTACASGADALVAAAQMIRLGEADVVLAGGAEAPLSRSVLAGFARLGALSEDNDAPESACRPFSADRTGFVMGEGAAVLVLESAEHATARGAQVRARMAGYGRSADAYHVTMPHPEAAGARAAIVAALRDAGAQPSDVDFVNAHGTGTALNDHAEALAMRAVFGTGVERIPVTATKSLTGHSLGAAGAVEAVATVQAVSSGVIPPTANLRVPDPELGIDVVHGGPREARINLALSNSFAFGGHNVVLAFAPPL

SEQ ID NO: 20054 - DNA, 1269 bp, Streptomyces griseoruber
  CDS (1)..(1269): transl_table=11
atggtccgagacacgccccgcagggcagtgatcaccggcatcggcgtgaccgcaccggggggcatcggggccgacgcgttctggcagcgactggtcagcggcaggcccgcgacccggacgatcagccggttcgacgcgagcggccatcggtgccgggtcgccgccgagtgcgacttcgacccgctggagcagggtctgacccgccagcaggcgcggcggaccgaccgcgtggtgcagctcgccctggccgccgcgcgggaggcgctggaggacagcggcctgaccgtcgacggcgagcgcaccggagtggcgctgggcagcgcggtcggcggaacgaccaccatggagcaggagtacgccgtgcagtccgccgagggccgcgactggctggtcgacccctcgtacgccgtaccgcacctgtacgactacttcgtgcccacctcgctggccgccgaggtggcgctgctgaccggggcgctgggcccggcctcggtgatctcgaccgggtgcacgtcgggcatcgactccgtcggctacgccgccgagatgatccgggagggaaccgccgacgtcatggtcaccggcgcctccgacgcgcccatctcaccgatcaccctgacctgcttcgacgtcatcaaggccacctccgcccgcaacgacgacccggagacggcctgccgccccttcgaccgcacccgcaccgggctggtgctgggcgagggcgcgagcgtgctggtactggaggagtacgagcacgccaagcggcgcggcgcccgcatctacggggagatcgccggctacgcctcccggtgcaacgcctaccacatgaccggtctgaaggcggacggtctggagatgtccgaggcgatcgacgcggcgctcgacgaggcccggctgaacccggtggacatcgactacgtcaacgcccacggctccggcacccggcagaacgaccggcacgagaccgccgcggtcaagcgcagcctgggcgagcacgcctaccgcacgccgatgagcggcatcaaggcgatcgtggggcactcgctcggcgcgatcggctcgatcgagatcgcggcgtgcgcgctgtccctgcggcacggggtggtggtgcccacggccaatctcgacgagcccgaccccgagtgcgacctggactacgtcccgcacaccgcgcgggagcggcgactggacgcggtgctcacggtgggcagcggtttcggcgggttccagagcgccatggtgctgacggctccgggacggcccgcatga

SEQ ID NO: 20055 - protein, 422 aa, Streptomyces griseoruber
MVRDTPRRAVITGIGVTAPGGIGADAFWQRLVSGRPATRTISRFDASGHRCRVAAECDFDPLEQGLTRQQARRTDRVVQLALAAAREALEDSGLTVDGERTGVALGSAVGGTTTMEQEYAVQSAEGRDWLVDPSYAVPHLYDYFVPTSLAAEVALLTGALGPASVISTGCTSGIDSVGYAAEMIREGTADVMVTGASDAPISPITLTCFDVIKATSARNDDPETACRPFDRTRTGLVLGEGASVLVLEEYEHAKRRGARIYGEIAGYASRCNAYHMTGLKADGLEMSEAIDAALDEARLNPVDIDYVNAHGSGTRQNDRHETAAVKRSLGEHAYRTPMSGIKAIVGHSLGAIGSIEIAACALSLRHGVVVPTANLDEPDPECDLDYVPHTARERRLDAVLTVGSGFGGFQSAMVLTAPGRPA

SEQ ID NO: 20056 - DNA, 1398 bp, Oryza sativa
  CDS (1)..(1398)
atgcagagcctcctcctccccaccttcgccgcggcctccgccgcccccccgcggagggggcgcgtgcctcccgccggtcgcgcctcggtctccgtgcgcgcgtccgcgtccgcggcggcggtggcgccgaggagggagacggatccgaggaagagggtggtgatcacggggatggggctggtgtccgtgttcgggaacgacgtcgacgcctactacgaccgcctcctcgccggggagagcgggattggccccatcgaccgcttcgacgcctccaacttccccacccgcttcgccggccagatccggggcttctcctccgagggctacatcgacggcaagaacgaccgccgcctcgacgactgcctccgctactgcatcgtcagcggcaagaaggccctcgagtccgccggcctcgccctcggctccaaatccatggacaagattgaaaagactcgggctggtgtacttgtgggcaccggtatgggtggtcttacagtgttctctgatggtgttcagaatcttattgagaaggggcacagaaagataactccattcttcattccgtatgccataacaaacatgggatctgcccttcttggaatggacattggtttcatgggtccaaactactccatctcaactgcatgtgctacctcgaactactgtttctatgctgcagcaaaccatattcgcagaggcgaagccgatgtgatgattgctggtggcactgaagccgcaattattccgattggtgtcggtgggtttgtcgcgtgtagagcactttcacagaggaacgatgaccccaaaacagcatcaagaccttgggaccaagaccgtgatggttttgtcatgggtgaaggagctggagtactggtcatggagagcctagaacatgcaatgaagcgtgacgcaccaataattgcggagtatttaggaggtgccgtgaactgtgatgcttaccatatgactgacccgagatctgatggccttggtgtttcgtcttgcattaagcaaagtcttgcagatgctggcgttgcaccggaggaggtcaactacataaatgctcatgcaacgtccaccctagctggtgatctggcagaggtgaacgccattaggcaagtcttcaaggatccatcagagattaaaataaatgcaaccaagtccatgattggacattgccttggtgcggctggtggcttggaagccattgcaactgttaaagctataaccactggatgggtccatccaagcataaaccagtttaacccggagccagctgttgaatttgacacggtacctaatgtaaaaaagcaacatgaagtgaatgttggtatctcgaattcctttggatttggtggacacaattcagttgtagtatttgcaccatttaagccttaa

SEQ ID NO: 20057 - protein, 465 aa, Oryza sativa
MQSLLLPTFAAASAAPPRRGRVPPAGRASVSVRASASAAAVAPRRETDPRKRVVITGMGLVSVFGNDVDAYYDRLLAGESGIGPIDRFDASNFPTRFAGQIRGFSSEGYIDGKNDRRLDDCLRYCIVSGKKALESAGLALGSKSMDKIEKTRAGVLVGTGMGGLTVFSDGVQNLIEKGHRKITPFFIPYAITNMGSALLGMDIGFMGPNYSISTACATSNYCFYAAANHIRRGEADVMIAGGTEAAIIPIGVGGFVACRALSQRNDDPKTASRPWDQDRDGFVMGEGAGVLVMESLEHAMKRDAPIIAEYLGGAVNCDAYHMTDPRSDGLGVSSCIKQSLADAGVAPEEVNYINAHATSTLAGDLAEVNAIRQVFKDPSEIKINATKSMIGHCLGAAGGLEAIATVKAITTGWVHPSINQFNPEPAVEFDTVPNVKKQHEVNVGISNSFGFGGHNSVVVFAPFKP

SEQ ID NO: 20058 - DNA, 1254 bp, Treponema hyodysenteriae
  CDS (1)..(1254): transl_table=11
atgagtgaacgtagagttgtaattacggggcttggaatagtaagttcgctaggaaatgatgtaaaaacattttgggataatttgcttaatggtgtttcaggtatcaaaacattaagtaaatatttcgatcctgaaaaagagcagcttattaccaaaatcggtgctgaagctttaccagttgagggcgactattattctgataaaaaaatgttaagaagattagacccttttattaattttggaatatatgccgctcatcatgcatttaagcaggctggtatagaaccgaaaacaggctttgatcctttaagagccggttgtgttcttggtagcggtattggcggtatgactactcttttatctaaccatcaagttttacttaatgacggacctggcagagtatcacctttctttgtacctatgcaaataatcaatatgacacctggtttaatatctatggaatatggtatgaacggacctaactacagtacagttactgcatgtgcttcttcaaaccactctataggtttaggttataaacatattaaagataatgaagctgatattatggtagttggaggttctgaagctactataaatcctcttactatagctggtttcaataatgctagagctttatctactagaaatgatgatcctgctaaagcatcaagaccttttgataaaggaagagacggatttgttatagctgaaggtgctggtatattaatacttgaagagtatgaacatgctaagaaaagaaatgctaatatacttgctgaagtttgcggttatggatttactgcagatgctaatcatatcactgcacctttagaggatggtgctatgggagcaagagctatgtctttagctattgaaagtgctaagatttcacctgataaaatcagctatgttaatactcatggtacttctactcctgttggagatattgctgaaatcaaagctattaaaaaggctttaggcgaagatcatgctaaaaaaataaaaattaattcaacaaaatctatgacaggacatgctttaggagctgcaggcggtatagaagctattgccactattatgagtatgattgaaggtaaagttcaccctactatcaatgtagaagaacaagatcctcaatgtgatttagatgttgttgctaacactgctcaggattataaaatagaatatgctataagcaattcttttggattcggcggtcataatgcttctatagtattcaaaagaatataa

SEQ ID NO: 20059 - protein, 417 aa, Treponema hyodysenteriae
MSERRVVITGLGIVSSLGNDVKTFWDNLLNGVSGIKTLSKYFDPEKEQLITKIGAEALPVEGDYYSDKKMLRRLDPFINFGIYAAHHAFKQAGIEPKTGFDPLRAGCVLGSGIGGMTTLLSNHQVLLNDGPGRVSPFFVPMQIINMTPGLISMEYGMNGPNYSTVTACASSNHSIGLGYKHIKDNEADIMVVGGSEATINPLTIAGFNNARALSTRNDDPAKASRPFDKGRDGFVIAEGAGILILEEYEHAKKRNANILAEVCGYGFTADANHITAPLEDGAMGARAMSLAIESAKISPDKISYVNTHGTSTPVGDIAEIKAIKKALGEDHAKKIKINSTKSMTGHALGAAGGIEAIATIMSMIEGKVHPTINVEEQDPQCDLDVVANTAQDYKIEYAISNSFGFGGHNASIVFKRI

SEQ ID NO: 20060 - DNA, 1269 bp, Rhizobium sp
  CDS (1)..(1269): transl_table=11
atgcgtcgtgtcgtcgtaacaggaatgggagcggtcagtccgctcggtgccaacgtcagcagcacttggagccgcctgctcgcgggcaagtctggcatccaccgtcttcctgacgaggtcgtcggcgatctgcccgccaaggtcggaggcgttgtccccttcctggaagaggatgccgaagctggcttcgatccggacagggtcttgccgccgaaggatcagcgcaaggtcgaccgattcatcctcttcgcaatggcggcggcagacgaagcccttgcgcaagcccggtggagacctgtctcggaagaggaccgcctcagaacggcgacgatcatagcctccgggatcggaggctttccagcgatcacggatgcggtgcgcaccgtcgatcagaaagggccgcggcgcctttcacccttcaccattccatcgttcctggtgaacctcgcggcaggccaggtatccatccgacatggtctcaagggaccgctgggagctcctgtgacagcatgtgcggccggcgtccaggcaatcggtgacgcggcccggatgatccgggcgaacgaggctgacattgccgtctgtggcggcacggaagcgtgcatgaacaccgtaagcctcgggggcttcgccgccgcccgggctctttcaaccgggttcaatgaaagccctgccctcgcgtccagaccattcgacatgatgcgtgacggtttcgtaatgggtgaaggcgcgggagtcttggtgctcgaatccctgagccatgcgctggctcgcggggccgagccgctggctgaactggtgggctatggaacaacggcggatgcctatcatgttacctccggtcccgaggacggatccggcgccgcaagagcgatgcaaattgccatcgggcaggcaggtatttccccgcatgagatccaacatctcaacgctcacgccacatcgaccccgctcggcgatcgcggagaaatcggggctatcaagacagtgttcggttcgacagcagggatcgcagtcagtggcacgaagtccgcaaccgggcacctccttggcgccgcgggtgggctggaggcaatcttcacgatcctggcactcagggatcaggtcgcaccgcccacgctgaacctgaatgcgcccgatcccgctggcgacggaatcgacttcgtcgcgagcaagtcccggccactacagatggactatgcaatcaccaacggatttgggttcggaggcgtgaatgcgagtgccctgttccggcgttggagcgaatga

SEQ ID NO: 20061 - protein, 422 aa, Rhizobium sp
MRRVVVTGMGAVSPLGANVSSTWSRLLAGKSGIHRLPDEVVGDLPAKVGGVVPFLEEDAEAGFDPDRVLPPKDQRKVDRFILFAMAAADEALAQARWRPVSEEDRLRTATIIASGIGGFPAITDAVRTVDQKGPRRLSPFTIPSFLVNLAAGQVSIRHGLKGPLGAPVTACAAGVQAIGDAARMIRANEADIAVCGGTEACMNTVSLGGFAAARALSTGFNESPALASRPFDMMRDGFVMGEGAGVLVLESLSHALARGAEPLAELVGYGTTADAYHVTSGPEDGSGAARAMQIAIGQAGISPHEIQHLNAHATSTPLGDRGEIGAIKTVFGSTAGIAVSGTKSATGHLLGAAGGLEAIFTILALRDQVAPPTLNLNAPDPAGDGIDFVASKSRPLQMDYAITNGFGFGGVNASALFRRWSE

SEQ ID NO: 20062 - DNA, 1305 bp, Plasmodium yoelii yoelii
  CDS (1)..(1305)
atgaaaatttctttaaatttcctctttttctgctttttggttcaccaaacttccagagttgtatgcacaggtgttggtgttgtaaatggagttggaattggaataaatcaattttgggagaacatacttaatggctataattcgattgacaaagtaaccaaatttgatgtaacaggaatgtcatgcggaatagctagcacaatagataaaaaaaattttaacccacctgattattatacaaataaaaaggatgcaaatcgtaatgacgattgtacccattatgctatagctgcaactagattagcaatagatgatgctaaaatagatttaaacaaaattgatagtaataaaattggaacaattattggaagtggtattggtggattagattttttagaaagagaaatgaaaataatgtatgaaaagggtcataaaagggtaagtccatatttaatacccgcaatgattgcaaatacaccatcagggcttgtatctattgaaaataatttaagaggaatttctattggtatgctaagtgcatgtgcaacatcaggaaatactattggtgaggcatatcgatatataaaatataaagaatatgacgttatgatatgtggaggaactgaagctagtgttactccgattagttttgctggatttaatgcattaagagcaatggctgttggatataatgataatcctaaaaaggcttgtagaccttttgatttaaaaagaagtggatttgttatgggtgaaggatcaggtgttttaatactagaatcatatgaacatgcaataaaaagaaatgcaaaaatttatggagaaattttagcatattcttcggaaagtgatgcatttcatataacatcccctgaacctaatggtttaggattaacaaattctataaataaggtaataaaaaatgccaacataagtggatccgatattaaatatataaatgcccatggaacatcaactaaattaaatgatcaaatagaaacaaaagtttttaagaatgtttttaaagatcatgcatacaagttacatatatcatcaacgaaaagtatgacaggtcattgtataggagcagcaggagcgattgaatctattatatgcttaaaaactatgcaaacaaatattatacctccaacaattaattatgaacataaagatgatgagtgtgatctaaattatacacctaataaatgtatatcctcaaaacaaaatattgatttttcattaaatactaatttagggtttgggggacataatacagcactattattcaaaaaaattacaaaataa

SEQ ID NO: 20063 - protein, 434 aa, Plasmodium yoelii yoelii
MKISLNFLFFCFLVHQTSRVVCTGVGVVNGVGIGINQFWENILNGYNSIDKVTKFDVTGMSCGIASTIDKKNFNPPDYYTNKKDANRNDDCTHYAIAATRLAIDDAKIDLNKIDSNKIGTIIGSGIGGLDFLEREMKIMYEKGHKRVSPYLIPAMIANTPSGLVSIENNLRGISIGMLSACATSGNTIGEAYRYIKYKEYDVMICGGTEASVTPISFAGFNALRAMAVGYNDNPKKACRPFDLKRSGFVMGEGSGVLILESYEHAIKRNAKIYGEILAYSSESDAFHITSPEPNGLGLTNSINKVIKNANISGSDIKYINAHGTSTKLNDQIETKVFKNVFKDHAYKLHISSTKSMTGHCIGAAGAIESIICLKTMQTNIIPPTINYEHKDDECDLNYTPNKCISSKQNIDFSLNTNLGFGGHNTALLFKKITK

SEQ ID NO: 20064 - DNA, 1275 bp, Streptomyces murayamaensis
  CDS (1)..(1275): transl_table=11
gtgacaacgcctcgcagggtggtcatcaccgggatggaggtcctcgcccccggtggcatcggcaccaagaacttctggagcctcctcagcgagggccgcacggcgacccgggggatcacgttcttcgaccccacgccgttccgctcgcgggtggccgccgagatcgacttcgacccgtacgagcacggtctgagcccgcaggaggtccgccgcatggaccgggccggccagttcgcggtcgtcgcctcgcgcggcgcggtcgccgacagcggtctggagctcgccggcctcgacccgtaccgggtcggtgtcacggtcggcagcgcggtcggcgccaccatgggcctggacgaggagtaccgggtcgtcagcgacggcggccggctcgacctcgtggaccaccagtacgcggccccgcacctctacaaccacctggtgccgagctcgttcgcggccgaggtggcctgggcggtcggcgccgagggccccagcaccgtggtctccacgggctgcacctccggcatcgactcggtcggctacgccgtcgagctgatccgcgagggctccgccgacgtcatgatcgccggatcctcggacgcgccgatctcgccgatcaccatggcgtgcttcgacgcgatcaaggccacgacgaaccgttacgacgagcccgagacggcctcgcggccgttcgacaactcgcgcaacggcttcgtcctgggcgagggcaccgcgttcttcgtcctggaggagctggagagcgccgtcaagcgaggcgcccacatctacgcggagatcgccggctacgccacgcgctccaacgcgtaccacatgaccggactgcgccccgacggcgcggagatggccgaggcgatccgcgtggcgctggacgaggcgcggatgaacggcgacgagatcgactacatcaacgcccacggctccggcaccaagcagaacgaccgccacgagacggcggcggtcaagcggatcctcggtgaccacgcctaccggacgccgatgagctccatcaagtcgatggtggggcactcgctcggcgcgatcggctccatcgagatcgccgcgtccgcgctcgccatggagtacaacgtcgtaccgcccacggccaacctgcacacgcccgaccccgagtgcgacctggactacgtcccgttgaccgcccgcgaccgcaagaccgacgcggtcctctcggtcggcagcggcttcggtggattccagagtgccgtggtgctcgcccgtcccgagaggaagctcgcatga

SEQ ID NO: 20065 - protein, 424 aa, Streptomyces murayamaensis
MTTPRRVVITGMEVLAPGGIGTKNFWSLLSEGRTATRGITFFDPTPFRSRVAAEIDFDPYEHGLSPQEVRRMDRAGQFAVVASRGAVADSGLELAGLDPYRVGVTVGSAVGATMGLDEEYRVVSDGGRLDLVDHQYAAPHLYNHLVPSSFAAEVAWAVGAEGPSTVVSTGCTSGIDSVGYAVELIREGSADVMIAGSSDAPISPITMACFDAIKATTNRYDEPETASRPFDNSRNGFVLGEGTAFFVLEELESAVKRGAHIYAEIAGYATRSNAYHMTGLRPDGAEMAEAIRVALDEARMNGDEIDYINAHGSGTKQNDRHETAAVKRILGDHAYRTPMSSIKSMVGHSLGAIGSIEIAASALAMEYNVVPPTANLHTPDPECDLDYVPLTARDRKTDAVLSVGSGFGGFQSAVVLARPERKLA

SEQ ID NO: 20066 - DNA, 1446 bp, Dictyostelium discoideum
  CDS (1)..(1446)
atgagcaataataataacagtttaaatgacaattttattaataacaatataaaaaataatgaatatttaaaattaaaaagagttgttgtaactgggatgggtattgtatctccattaggtgtaggaataaaatataattgggataaattaataaatggtgagagtggaattaaaagatttgaaggatttgaagatagtagaattgattgcccatcaaaagttgtagcaagagtaccaaaaggtgaaggtataggtgagtttaattcaaatactatgataccatcacaagtgaaattggcaagctctgatttcataaaatatgcaatcgttgcaactgatgaagctattaaagattcaaaactagataaattcattgaatcaaatgaaaaacttcaagaaagaattggagtatgtattggttctggtacaggttcaatggaagaaattatctcagcaaatgaaaagatttcaaataaattaaataacaataacaataacagtgatagtggtagtggtagtggtagtggtggtggtggtggtaaagtttcagcatattttataccaaaaattttaattaatgaagcatctggtataattagtattttacataaagcgaaaggacctaatatgtcaattgttagtgcatgtgcaactgggtctcattgtattggcgaatcatttagaaagataaaatatggtgaagtggacgcaatgatatgtggtggtactgaagcgagtataaattcagtttcaatgattggtttctcacgtatgaaagcattatcaaccaaatataataatcatattaatccatcatcaagtagtagaccattcgatgaaggtagggatggatttgtaatgggtgaaggctctggaatattaatattggaagagtatgaacatgctttaaaaagaggtgcaaatatttattgtgaaatcactggttatggttcaactggcgatgcccatcatatttcagctccaaattctgatggaaacggtccgttaaggtcaatgaatttagcattactagaatctggtttaccaaattcctctcatatcgattatataaatgctcatgcaacttcaacgccattaggtgatggtattgaatgtactgctgttaaaaacttttataataataataataataataataataataataataataataataataaagaaattataatgagctcaaataaaggttcaattggtcatttgttgggtgctgctggaagtgttgaatcaatattttcaattttatcattatataataatattataccaccaactttaaatttagaaaatccatcaaaagattgtcagggtataaatttagtacaatttaaatctcaatcaaaaccaattagaaatgttttaaaaaattcatttggatttggtggaacaaattgttctttaattttttcaaaaataaattaa

SEQ ID NO: 20067 - protein, 481 aa, Dictyostelium discoideum
MSNNNNSLNDNFINNNIKNNEYLKLKRVVVTGMGIVSPLGVGIKYNWDKLINGESGIKRFEGFEDSRIDCPSKVVARVPKGEGIGEFNSNTMIPSQVKLASSDFIKYAIVATDEAIKDSKLDKFIESNEKLQERIGVCIGSGTGSMEEIISANEKISNKLNNNNNNSDSGSGSGSGGGGGKVSAYFIPKILINEASGIISILHKAKGPNMSIVSACATGSHCIGESFRKIKYGEVDAMICGGTEASINSVSMIGFSRMKALSTKYNNHINPSSSSRPFDEGRDGFVMGEGSGILILEEYEHALKRGANIYCEITGYGSTGDAHHISAPNSDGNGPLRSMNLALLESGLPNSSHIDYINAHATSTPLGDGIECTAVKNFYNNNNNNNNNNNNNNNKEIIMSSNKGSIGHLLGAAGSVESIFSILSLYNNIIPPTLNLENPSKDCQGINLVQFKSQSKPIRNVLKNSFGFGGTNCSLIFSKIN

SEQ ID NO: 20068 - DNA, 1248 bp, Heliobacillus mobilis
  CDS (1)..(1248): transl_table=11
atgaaaaaacgcgtggtcattacgggcgtcggtgtcgtgtcacccgtagggacaggcaaggaaaagttttgggactccttgacctccggtgtttccggcatcggccctgtgacccgttttgacgccaccgacctcccgacgcgagttgcggcggaagtaaaggattttgatccgaccaagtttttggaccggaaagaagctcgtcgtatggaccggtttgcccagtacgccgtagcggcgtcgaaaatggccatggaagattccggtctcgatatggagaaggccgaccgcgaacgggctggtgtcatcttaggttgcggtatcggcggcatggagaccttcgaagatcaagccaaggtgatgatcaacaaagggaacggtcgtatcagtcccttttttgtcccgatgatgatctccaacatggctgccggccatatatccatgcaattgaacttgaagggaccgagtgaaacggtggtcaccgcctgtgcttcggcaacgaacgcttgtggcagcgctctccgccttctacagcatggtgattgtgatgtggtccttacgggggggaccgaggcttccatcatccagttgtcttttgccggcttctgcgccatgaaagccatgtccacactgaatgacgacccagcaaaagccagccgcccctttgaccgcgatcgcagcggctttgtcatgggcgaaggcgccgggattctcgtctttgaggaactggaacatgctctagcccggggtgctcatatctatgcggaagtcgtcggttacggctcttcctgtgacgcttatcatatcaccgatccggcgcccaatggagaaggagctgcccgagctatgcagggcgctttaaaggatgctggtctaaagccggaagatatcgattacatcaatgctcacggtacagcgactgaaaagaacgattattacgaaacactggcgatcaaatcagtttttggcgatcatgcccagaaagtggctatcagctcgaccaaatcgatgacaggccacctgcttggcgctgccggaggcatcgaactgatcgctactgccttagccattcatgatggtatcattcccccgacgatcaacttggataaccctggtgagggctgtgatttggattatgttccccatgaagcgcgcaaaataccggtagaagccgcaatctccaacactttcggttttgggggacataacgccaccgtcgctctttgcaaataccggcctggggaatag

SEQ ID NO: 20069 - protein, 415 aa, Heliobacillus mobilis
MKKRVVITGVGVVSPVGTGKEKFWDSLTSGVSGIGPVTRFDATDLPTRVAAEVKDFDPTKFLDRKEARRMDRFAQYAVAASKMAMEDSGLDMEKADRERAGVILGCGIGGMETFEDQAKVMINKGNGRISPFFVPMMISNMAAGHISMQLNLKGPSETVVTACASATNACGSALRLLQHGDCDVVLTGGTEASIIQLSFAGFCAMKAMSTLNDDPAKASRPFDRDRSGFVMGEGAGILVFEELEHALARGAHIYAEVVGYGSSCDAYHITDPAPNGEGAARAMQGALKDAGLKPEDIDYINAHGTATEKNDYYETLAIKSVFGDHAQKVAISSTKSMTGHLLGAAGGIELIATALAIHDGIIPPTINLDNPGEGCDLDYVPHEARKIPVEAAISNTFGFGGHNATVALCKYRPGE

SEQ ID NO: 20070 - DNA, 1626 bp, Arabidopsis thaliana
  CDS (1)..(1626)
atggtgggtgcgtcttcctcttacgcatctccgttatgtacctggtttgttgctgcttgcatgtccgtctctcacggtggaggagatagccgtcaggctgttgctcttcaatctggtgggcggagtcggcgaaggaggcagcttagcaaatgctctgtcgcttctggatccgctagcattcaggctctcgtgacttcttgtttggattttggtccttgtactcactacaacaacaacaatgcattgtcttctctctttggatcgaatagtgtttctttgaatcgaaaccagaggagattgaatcgtgctgctagctccggtggagccatggcagtgatggagatggaaaaggaagctgcggttaacaagaaaccacctacggagcagcgtcgagttgtagtgacaggcatgggagttgaaacatcattgggtcatgacccacataccttctatgagaatttgctacaaggcaacagtggtattagccagattgaaaattttgattgttctgaatttcctacgcgaattgcgggagagatcaaaagcttctcgactgaaggatgggttgctccaaaactttctaaaaggatggacaaattcatgctctatcttctcacagctggtaagaaagctttggctgatggtggggttactgatgaagtaatggcagagtttgacaaaaccaaatgtggagttttgattggctcggcaatgggaggaatgaaggtcttttacgatgctattgaagctctgagaatctcttacaagaagatgaatcctttttgtgtaccttttgcgacaacaaacatgggttctgctatgcttgccatggatctgggatggatggggccaaactattctatttcaactgcttgtgccacaagcaacttttgcattctgaattcagcaaaccacattattaaaggtgaagctgatgtaatgctctgtggtggctcagatgcagttattattccaatagggttgggaggttttgttgcatgccgggctctttcacaaaggaataatgatcccacaaaagcttcacgtccttgggataccaatcgagatggtttcgtgatgggagagggagctggagttctacttttggaagaactcgagcatgctaagaaaagaggtgcaactatctacgcagagttcctcggtgggagtttcacatgtgatgcctatcacatgaccgagcctcaccctgatggggctggtgttattctctgtattgagagagcgttagctagtgctgggatttccaaggaacaaataaattacataaatgcacatgcaacctcaacgcatgctggagatattaaggaataccaagcccttgctcactgttttggccaaaatcctgagcttaaggtaaattccacaaaatctatgattggacacttgctgggagttgctggggccgtggaggctgttgcaactgtgcaggcgatacggaccggatgggttcatccaaatatcaacctcgagaatccagacagtggagtggatacaaagctgctggtgggtcctaagaaggagagactggacattaaagcagccttgtcaaattcattcgggtttggtggtcataactccagcatcatttttgctccttacaagtga

SEQ ID NO: 20071 - protein, 541 aa, Arabidopsis thaliana
MVGASSSYASPLCTWFVAACMSVSHGGGDSRQAVALQSGGRSRRRRQLSKCSVASGSASIQALVTSCLDFGPCTHYNNNNALSSLFGSNSVSLNRNQRRLNRAASSGGAMAVMEMEKEAAVNKKPPTEQRRVVVTGMGVETSLGHDPHTFYENLLQGNSGISQIENFDCSEFPTRIAGEIKSFSTEGWVAPKLSKRMDKFMLYLLTAGKKALADGGVTDEVMAEFDKTKCGVLIGSAMGGMKVFYDAIEALRISYKKMNPFCVPFATTNMGSAMLAMDLGWMGPNYSISTACATSNFCILNSANHIIKGEADVMLCGGSDAVIIPIGLGGFVACRALSQRNNDPTKASRPWDTNRDGFVMGEGAGVLLLEELEHAKKRGATIYAEFLGGSFTCDAYHMTEPHPDGAGVILCIERALASAGISKEQINYINAHATSTHAGDIKEYQALAHCFGQNPELKVNSTKSMIGHLLGVAGAVEAVATVQAIRTGWVHPNINLENPDSGVDTKLLVGPKKERLDIKAALSNSFGFGGHNSSIIFAPYK

SEQ ID NO: 20072 - DNA, 1272 bp, Streptomyces galilaeus
  CDS (1)..(1272): transl_table=11
atgaccgcccgccgggtggtgatcaccgggctgggagtgatcgctccgggcggcatcggcaccaaggccttctgggaacgcatcgtctccggtgtctccgcgaccaggaccatcacggccttcgacgcctccgagttccgctcccggatggccgcggagtgcgacttcgacggcgtccgctcgggcctgaccgtccgtgacaccgcacggctggaccgtgccacccagttcgcggtggtcgccgcgcgcgaggcgctcgccgacagcggtatcgagatcgacgagaggaacgcccaccgcaccggggtcagcctcggctccgccgtggggtgcacccagaagctggaggaggagtacgtcgcgcgcagtgacggcgggcagcggtggctggtcgatcacgccgcgggcaccccgtacctgtacgactacttcgtaccgagttcgatggcggccgaagtggcgtgggaggccggcgccgagggccccgcggcgctcgtctcggcgggctgcacctccggtctcgactccctcgggcacgcgctcgacctcatcagggagggcgccgtcgacatcatgatcgccggtggcagcgacgcgcccatcgcacccatcaccgtggcctgtttcgacgccatcaaggcgacctcgccgcgcaacgacaccccggagcacgcctcgcggcccttcgacaggacccgcagcggcttcgtgctcggcgagggcgcggccgtactcgtcctggaggagcgggagtcggccctgcggcgcggagcacagatctacgccgagatcgcgggctacgccggtcgggccaacgcccaccacatgaccggactgcgccccgacggactggagatgtccgccgccatcaccggcgccctcgacgacgcccgcatcgaccgcgaagccgtcggttacgtcaacgcccacggcacggcgacccggcagaacgacatccacgagacggccgcgatcaagcacagcctgggcgagcacgcccgccgggtcccggtcagctccatcaaggcggtcatcggtcactcgctgggcgccgtcggctccatcgaggccgtcgcctccgccctggtgatccggcacggagtggtgccgcccacggcgggactgcacgagcccgatccccagctcgacctcgactacgttccgctgatcgcgcgcgaccaggccaccgacaccgtgctgacggtgggcagcggtttcggcggattccagagcgcgatggtgctcaccagcgccgaagggggccgctcatga

SEQ ID NO: 20073 - protein, 423 aa, Streptomyces galilaeus
MTARRVVITGLGVIAPGGIGTKAFWERIVSGVSATRTITAFDASEFRSRMAAECDFDGVRSGLTVRDTARLDRATQFAVVAAREALADSGIEIDERNAHRTGVSLGSAVGCTQKLEEEYVARSDGGQRWLVDHAAGTPYLYDYFVPSSMAAEVAWEAGAEGPAALVSAGCTSGLDSLGHALDLIREGAVDIMIAGGSDAPIAPITVACFDAIKATSPRNDTPEHASRPFDRTRSGFVLGEGAAVLVLEERESALRRGAQIYAEIAGYAGRANAHHMTGLRPDGLEMSAAITGALDDARIDREAVGYVNAHGTATRQNDIHETAAIKHSLGEHARRVPVSSIKAVIGHSLGAVGSIEAVASALVIRHGVVPPTAGLHEPDPQLDLDYVPLIARDQATDTVLTVGSGFGGFQSAMVLTSAEGGRS

SEQ ID NO: 20074 - DNA, 1617 bp, Cuphea lanceolata
  CDS (1)..(1617)
atggcggcggcctcttccatggctgcgtcaccgttctgtacgtggctcgtagctgcttgcatgtccacttccttcgaaaacaacccacgttcgccctccatcaagcgtctcccccgccggaggagggttctctcccattgctccctccgtggatccaccttccaatgcctcgtcacctcacacatcgacccttgcaatcagaactgctcctccgactcccttagcttcatcggggttaacggattcggatccaagccattccggtccaatcgcggccaccggaggctcggccgtgcttcccattccggggaggccatggctgtggctctgcaacctgcacaggaagtcgccacgaagaagaaacctgctatcaagcaaaggcgagtagttgttacaggaatgggtgtggtgactcctctaggccatgaacctgatgttttctacaacaatctcctagatggagtaagcggcataagtgagatagagaacttcgacagcactcagtttcccacgagaattgccggagagatcaagtctttttccacagatggctgggtggccccaaagctctccaagaggatggacaagctcatgctttacttgttgactgctggcaagaaagcattagcagatgctggaatcaccgatgatgtgatgaaagagcttgataaaagaaagtgtggagttctcattggctccggaatgggcggcatgaagttgttctacgatgcgcttgaagccctgaaaatctcttacaggaagatgaaccctttttgtgtaccttttgccaccacaaatatgggatcagctatgcttgcaatggatctgggatggatgggtccaaactactctatttcaactgcctgtgcaacaagtaatttctgtatactgaatgctgcaaaccacataatcagaggcgaagctgacatgatgctttgtggtggctcggatgcggtcattatacctatcggtttgggaggttttgtggcgtgccgagctttgtcacagaggaataatgaccctaccaaagcttcgagaccatgggatagtaatcgtgatggatttgtaatgggcgaaggagctggagtgttacttctcgaggagttagagcatgcaaagaaaagaggtgcaaccatttatgcagaatttttagggggcagtttcacttgcgatgcctaccacatgaccgagcctcaccctgaaggagctggagtgatcctctgcatagagaaggccatggctcaggccggagtctctagagaagatgtaaattacataaatgcccatgcaacttccactcctgctggagatatcaaagaataccaagctctcgcccactgtttcggccaaaacagcgagctgagagtgaattccactaaatcgatgatcggtcatcttcttggagcagctggtggcgtagaagcagttactgtaattcaggcgataaggactgggtggatccatccaaatcttaatttggaagacccggacaaagccgtggatgcaaaatttctcgtgggacctgagaaggagagactgaatgtcaaggtcggtttgtccaattcatttgggttcggtgggcataactcgtctatactcttcgccccttacaattag

SEQ ID NO: 20075 - protein, 538 aa, Cuphea lanceolata
MAAASSMAASPFCTWLVAACMSTSFENNPRSPSIKRLPRRRRVLSHCSLRGSTFQCLVTSHIDPCNQNCSSDSLSFIGVNGFGSKPFRSNRGHRRLGRASHSGEAMAVALQPAQEVATKKKPAIKQRRVVVTGMGVVTPLGHEPDVFYNNLLDGVSGISEIENFDSTQFPTRIAGEIKSFSTDGWVAPKLSKRMDKLMLYLLTAGKKALADAGITDDVMKELDKRKCGVLIGSGMGGMKLFYDALEALKISYRKMNPFCVPFATTNMGSAMLAMDLGWMGPNYSISTACATSNFCILNAANHIIRGEADMMLCGGSDAVIIPIGLGGFVACRALSQRNNDPTKASRPWDSNRDGFVMGEGAGVLLLEELEHAKKRGATIYAEFLGGSFTCDAYHMTEPHPEGAGVILCIEKAMAQAGVSREDVNYINAHATSTPAGDIKEYQALAHCFGQNSELRVNSTKSMIGHLLGAAGGVEAVTVIQAIRTGWIHPNLNLEDPDKAVDAKFLVGPEKERLNVKVGLSNSFGFGGHNSSILFAPYN

SEQ ID NO: 20076 - DNA, 1371 bp, Coriandrum sativum
  CDS (1)..(1371)
atgcaatctcttcttcaatcttccttcactccaacattccgcctcccgaaaccctgccatcacatccctagaccacctcgaaagttgtcggttttcgcaacctcagcctctccgaaacgcgaaaaagatcctaagaaacgagttgtcgtaaccggtctcggtgtggtttcggtgtttggaaatgacgtggatacttattatgacaagcttcttgcaggcgaatccggtgtggattttattgatagatttgatgcatccgaatttccgacacgattcgcagcacagatccgagcattttcatccgaagggtacatagatagcaagaatgatcggagacttgacaattgtttgcgttacaacatcgttgctggtaaaaaagcacttgaaaatgctggtcttggtgaagacatgcggtccaagattgacaaggagcgtgctggtgtgctcgttggaagtggtatggggggtattactgcattttgtgatggtgtggagaatctgatcacaaaaggttacaagaaaatatctccatttttcataccgtatactataaccaacatgggctctgcattgcttgctattgatcttggcttcatgggaccaaactattctattgttgctgcttgtgccacctcaaattatgcgttttatgctgctgcgaatcacattcgtagtggtgaggctgatttgatgcttgctggtggagccgaagctgctattgtccctgttggactgggcgggttcacttcgtgcagagcaatgtctcagagaaatgataatcccaaggcggcttctaggccttgggacaaagatagagatggtttagttatgggtgaaggcgctggagtcttggtgatggagagtttggttcatgcaatgaagcgaggtgcaccgataattgctgaatacttagggggtgcagtcacctgtgatgctcatcatatgactgatcccagacctgatgggggaggggtttcgatgtgcattcaaagtggccttcaagaagctggggtggtttcgcctgaggaggtcaattacatcaatgcacatgcaacttcaactttagctggagatcttaaagaggttactgctatcaaacaagttttgggccagattaaagcaaatgcaaccaagtctatgaatgcccactgcttgggggctgcttctggcttggaagccgtggcaacagtgaaggccatagctacagggtggctgcaccctactatcaatcaagtgaaccttgaacctgaagttgattttgacacagttgcaaataagaaacagcagcatgaagtgaatgttggcatctcaaattcatttggatttggtggacacaactcagtggtggtattttctgcattcaacccatga

SEQ ID NO: 20077 - protein, 456 aa, Coriandrum sativum
MQSLLQSSFTPTFRLPKPCHHIPRPPRKLSVFATSASPKREKDPKKRVVVTGLGVVSVFGNDVDTYYDKLLAGESGVDFIDRFDASEFPTRFAAQIRAFSSEGYIDSKNDRRLDNCLRYNIVAGKKALENAGLGEDMRSKIDKERAGVLVGSGMGGITAFCDGVENLITKGYKKISPFFIPYTITNMGSALLAIDLGFMGPNYSIVAACATSNYAFYAAANHIRSGEADLMLAGGAEAAIVPVGLGGFTSCRAMSQRNDNPKAASRPWDKDRDGLVMGEGAGVLVMESLVHAMKRGAPIIAEYLGGAVTCDAHHMTDPRPDGGGVSMCIQSGLQEAGVVSPEEVNYINAHATSTLAGDLKEVTAIKQVLGQIKANATKSMNAHCLGAASGLEAVATVKAIATGWLHPTINQVNLEPEVDFDTVANKKQQHEVNVGISNSFGFGGHNSVVVFSAFNP

SEQ ID NO: 20078 - DNA, 1236 bp, Xanthomonas albilineans
  CDS (1)..(1236): transl_table=11
atgagccgtcgcgtcgtggtaaccggcatgggtctggtgtcgccgttgggcaatgatctggccagcagctgggacgggatcgtcaatgggcgttcgggcatcggtccgattacccttatcgatgcatctcagttcgccacccgcatcgtcggtgaaatcaaggatttcgatccgaccaagttcctgtctgccaaagacgtcagaaagatggattcgttcatccactacggcgtcgccgcctcgttcatggcactggacgatgccggccttgagatcaccgatgccaatgccgaacgcatcggcgccatcctcggttcgggcatcggcggcgtgctcggcatcgaagagcagaccctcaagttgcaggagggtggcccgcgcaaggtctcgcctttctatgtgcccagtaccatcatcaacatgctgccgggccaggtaagcattatgaagggactgaaggggccgaccttctcggcggtttccgcctgcgccacctccaatcattccattggcaccgcgatgcgcatgattcagtacggcgatgccgacgtgatgctggctggcggtgccgagcggggatcctcgccgactgcgatcgccggcttttcctcgatgcgggcgatgtccacccgcaacgatgatcccgctgcggcctcgcggccatgggataaggaccgcgacggtttcgtgatgggggatggcgccggcgtgctggtgctggaagagtacgagcatgccaaggcgcgtggcgcgcgcatctatgccgaattggctggcttcggcgccagctccgatgctttccacatgacctcgccgagcgaagacggtgaaggcgctgcgcgcagcatgcgcgcggcgatgcgcgatgccgggctcaatccagaccagatcgattatctcaatgcgcacggcacctctacgcctgcgggcgatctggccgagaccatcgcgatgaagcgcgcgctcggcgatcatgcctacaagctcatgattagttccaccaagtcgatgattgggcatctgctcggcgcggctggtggtgccgaggcgatcttctcggtgatggcactccacacgggcatcatcccgccgaccatcaacctggacgaaccgggcgagggttgcgatctggactacgtgccgaacgtggcgcgcgagaagaagatcgacgtggcgatgtccaatgggttcggcttcggcgggaccaacgggactttggtgttcaagcggatctga

SEQ ID NO: 20079 - protein, 411 aa, Xanthomonas albilineans
MSRRVVVTGMGLVSPLGNDLASSWDGIVNGRSGIGPITLIDASQFATRIVGEIKDFDPTKFLSAKDVRKMDSFIHYGVAASFMALDDAGLEITDANAERIGAILGSGIGGVLGIEEQTLKLQEGGPRKVSPFYVPSTIINMLPGQVSIMKGLKGPTFSAVSACATSNHSIGTAMRMIQYGDADVMLAGGAERGSSPTAIAGFSSMRAMSTRNDDPAAASRPWDKDRDGFVMGDGAGVLVLEEYEHAKARGARIYAELAGFGASSDAFHMTSPSEDGEGAARSMRAAMRDAGLNPDQIDYLNAHGTSTPAGDLAETIAMKRALGDHAYKLMISSTKSMIGHLLGAAGGAEAIFSVMALHTGIIPPTINLDEPGEGCDLDYVPNVAREKKIDVAMSNGFGFGGTNGTLVFKRI

SEQ ID NO: 20080 - DNA, 1272 bp, Streptomyces maritimus
  CDS (1)..(1272): transl_table=11
gtgagccgacacgtagtcataactggcctgagcgtcctcgcacccggttcgacggatacagagggcttctggaagatgatcacagcggggcgcagcgcgatccgcaggatcacggcattcgaccccacgccgttccgttcccaggtggcgggagaggtcgatctcgatccgctggcctgtgggttcagccgccgcgaggtccggcgtctggaccgggccagcctgctggccgtggcctgcgccagacgggcggtggcggaagccgggatcacctccggtacgagtatcgaccctggccgcatcggtgtgagcgtgggcaacgcggtgggatccgccacaagtatcgagaacgagtacgtcgtgctgtccgacgagggacgccagtggctggtcgaccagaagtaccagtccccccacctgttcgactacttcgtcccgggttccctcgcccgcgagaccgcctgggcggccggtgccgaaggaccggtgtcggtcatctcggccggctgcacctctggcatcgacgccctcggccatgcctgccagctcatccaggagggcagtgccgacgtgatggtcgccggcgccaccgatgctcccgtcaccccgatcgcggtggcctgcttcgatgcgatcaaggccaccacgcgccgtaacgacgatcccgaacacgcgccgcggcccttcgaccgcacccgggacggattcgccatcgccgagggcgcggccatgctggtcctggaggacagcgaacacgcccggcggcgcggagccgacatttacggcaccatcaccggatacgccgcgcactcgaacgcgtaccacatgacgggcctgtcccgggacggcaatgagatggcccgcgccatcacgaccgccctggacgaggcccgcaccgaccccacggccgtcgggtacatcaacgcccacggctctggcacgaaacagaacgacctgcatgaaaccgaggcgttcaagaaggccctgggcgagcacgcttacaacgtcccggtcagctccatcaagtcgatgatcgggcattccctgggcgcgatcggcgcgatcgaggttgcaacctgcgcgctggccatccgcaacggagtggtgccccccaccgcgaacctccatgagcccgacccggactgcgacctggactacgtcccccttgaggcgcgtgatgtggaccttgacgtcgtcctgaccgtgggcagcgggttcggggggttccagagcgccatgatcgtggagaagtggcgaggaggccacgtatga

SEQ ID NO: 20081 - protein, 423 aa, Streptomyces maritimus
MSRHVVITGLSVLAPGSTDTEGFWKMITAGRSAIRRITAFDPTPFRSQVAGEVDLDPLACGFSRREVRRLDRASLLAVACARRAVAEAGITSGTSIDPGRIGVSVGNAVGSATSIENEYVVLSDEGRQWLVDQKYQSPHLFDYFVPGSLARETAWAAGAEGPVSVISAGCTSGIDALGHACQLIQEGSADVMVAGATDAPVTPIAVACFDAIKATTRRNDDPEHAPRPFDRTRDGFAIAEGAAMLVLEDSEHARRRGADIYGTITGYAAHSNAYHMTGLSRDGNEMARAITTALDEARTDPTAVGYINAHGSGTKQNDLHETEAFKKALGEHAYNVPVSSIKSMIGHSLGAIGAIEVATCALAIRNGVVPPTANLHEPDPDCDLDYVPLEARDVDLDVVLTVGSGFGGFQSAMIVEKWRGGHV

SEQ ID NO: 20082 - DNA, 1272 bp, Streptomyces galilaeus
  CDS (1)..(1272): transl_table=11
atgacggcccgccgggtggtgatcaccggcctgggagtgatcgccccgggtggcatcggcaccaaggcgttctgggaacgcgtcgtctccggcgtctccgcgaccaggaccatcacggccttcgacgcgtccgggttccgctcccggatggccgcggagtgcgacttcgacggcgtccgctcgggcctgaccgtccgtgacaccgcacggctggaccgtgccacccagttcgcggtggtcgccgcgcgcgaggcgctcgccgacagcggcatcgagatcgacgagaggaacgcccaccgcaccggggtcagcctcggctccgccgtggggtgcacccagaagctcgaggaggagtacgtcgcgcgcagtgacggcgggcagcggtggctggtcgatcacgccgccggcacaccgtacctgtacgactacttcgtgccgagttcgatggcggccgaagtggcgtgggaggccggcgccgagggccccgccgcgctcgtctcggcgggctgcacctccggtctcgactccctcgggcacgcgctcgacctcatcagggagggcaccgtcgacatcatgatcgccggtggcagcgacgcgcccatcgcacccatcaccgtggcctgtttcgacgccatcaaggcgacctcgccgcgcaacgacaccccggagcacgcctcgcggcccttcgacaggacccgcagcggcttcgtgctcggcgagggtgcggccgtactcgtcctggaggagcgggagtccgccctgcggcgcggagcacagatctacgccgagatcgcgggctacgccgggcgtggcaacgcccaccacatgaccggactgcgccccgacggactggagatgtccgccgccatcaccggcgccctcgacgacgcccgcatcgaccgcgaagccgtcggttacgtcaacgcgcacggtacggccacccggcagaacgacatccacgagacggccgcgatcaagcacagcctgggcgagcacgcccaccgggtcccggtcagctccatcaaggcggtcatcggtcactcgctcggcgccgtcggctccatcgaggccgtcgcctccgccctggtgatccggcacggagtggtgccgcccacggcgggactgcacgagcccgatccccagctcgacctcgactacgttccgctgaccgcgcgcgatcaggccaccgacaccgtgctgacggtgggcagcggattcggcggattccagagcgccatggtgctcaccagcgccgaagggagccgctcatga

SEQ ID NO: 20083 - protein, 423 aa, Streptomyces galilaeus
MTARRVVITGLGVIAPGGIGTKAFWERVVSGVSATRTITAFDASGFRSRMAAECDFDGVRSGLTVRDTARLDRATQFAVVAAREALADSGIEIDERNAHRTGVSLGSAVGCTQKLEEEYVARSDGGQRWLVDHAAGTPYLYDYFVPSSMAAEVAWEAGAEGPAALVSAGCTSGLDSLGHALDLIREGTVDIMIAGGSDAPIAPITVACFDAIKATSPRNDTPEHASRPFDRTRSGFVLGEGAAVLVLEERESALRRGAQIYAEIAGYAGRGNAHHMTGLRPDGLEMSAAITGALDDARIDREAVGYVNAHGTATRQNDIHETAAIKHSLGEHAHRVPVSSIKAVIGHSLGAVGSIEAVASALVIRHGVVPPTAGLHEPDPQLDLDYVPLTARDQATDTVLTVGSGFGGFQSAMVLTSAEGSRS

SEQ ID NO: 20084 - DNA, 1635 bp, Brassica napus
  CDS (1)..(1635)
atgccgacgcgtccaaacactcaagtgagagagagagagagatcagataatctttctcgttttctccaccttcatccgagtatgacgatgggtggtgcgtctttatgcgattcgctagtggctgcttgcatgtcctccgcctcgcactcaagcgtagagcgactgactcaattcgacactaggagtagtagcatctggcctcgccggagtagactggttaacaactgctcgctccatggatcccaggcgagttcccgtaacaacaatgcctcgtcttccctcttcgaatcgaataacacttccttcaatccaaagcagaggagattcaatcgagcatcaacctctgggcaagtcactacactagagatggagaaggacgcaatggtaaacaagccacgccgagttgttgtcactggcatgggagttgaaacaccactaggtcacgaccctcatactttttatgacaacttgctacaaggcaaaagtggtataagccatatagagagtttcgactgttctgcatttcccactagaatcgctggggagattaaatctttttcgaccgaaggattggttgctcctaaactttccaaaaggatggacaagtttatgctttaccttctaacagccggcaagaaggcgttggaggatggtggggtgactgaggatgtgatggcagagttcgacaaatcaagatgtggtgttttgattggctcagcaatgggaggcatgaaggtcttttacgatgcacttgaagctttgaaaatctcttacaggaagatgaatcctttttgtgtaccttttgccaccacaaacatgggttccgctatgcttgccttggatctgggatggatgggtccaaactactctatttcaaccgcatgtgccacgggaaacttctgtattctcaatgcggcaaaccacattactagaggtgaagctgatgtaatgctctgtggtggctctgactcagttattattccaatagggttgggaggttttgttgcctgccgggctctttcagaaaataatgatgatcccaccaaagcttctcgtccttgggatagtaaccgagatggttttgttatgggagagggagccggagttctacttttagaagaacttgagcatgccaagaaaagaggagcaactatatacgcagagttccttgggggtagtttcacatgtgatgcatatcatattaccgaaccacgtcctgatggtgctggtgtcattctcgctatcgagaaagcgttagctcatgccgggatttctaaggaagacataaattacgtgaatgctcatgctacctctacaccagctggagaccttaaggagtaccacgccctttctcactgttttggccaaaatcctgagctaagggtaaactcaacaaaatctatgattggacacttgctgggagcttctggggccgtggaggctgttgcaaccgttcaggcaataaagacaggatgggttcatccaaatatcaacctcgagaatccagacaaagcagtggatacaaagcttctggtgggtcttaagaaggagagactggatatcaaagcagctttgtcaaactctttcggctttggtggccagaactctagcatcattttcgctccttacaaatga

SEQ ID NO: 20085 - protein, 544 aa, Brassica napus
MPTRPNTQVRERERSDNLSRFLHLHPSMTMGGASLCDSLVAACMSSASHSSVERLTQFDTRSSSIWPRRSRLVNNCSLHGSQASSRNNNASSSLFESNNTSFNPKQRRFNRASTSGQVTTLEMEKDAMVNKPRRVVVTGMGVETPLGHDPHTFYDNLLQGKSGISHIESFDCSAFPTRIAGEIKSFSTEGLVAPKLSKRMDKFMLYLLTAGKKALEDGGVTEDVMAEFDKSRCGVLIGSAMGGMKVFYDALEALKISYRKMNPFCVPFATTNMGSAMLALDLGWMGPNYSISTACATGNFCILNAANHITRGEADVMLCGGSDSVIIPIGLGGFVACRALSENNDDPTKASRPWDSNRDGFVMGEGAGVLLLEELEHAKKRGATIYAEFLGGSFTCDAYHITEPRPDGAGVILAIEKALAHAGISKEDINYVNAHATSTPAGDLKEYHALSHCFGQNPELRVNSTKSMIGHLLGASGAVEAVATVQAIKTGWVHPNINLENPDKAVDTKLLVGLKKERLDIKAALSNSFGFGGQNSSIIFAPYK

SEQ ID NO: 20086 - DNA, 1302 bp, Brassica napus
  CDS (1)..(1302)
atggctgttgcgatggatatggaaaaggaagccaaggttgacaacaaacctcctacggagcagcgccgggttgttgtgacaggcatgggagttgaaacatcactaggtcatgaccctgacaccttttatgagaatctcctacaaggcaacagtggtattagccagattgagaattttgattgttctgcttttcctacgagaattgctggagagatcaagtcattctcgactgaagggtgggttgctccaaaactctcaaagaggatggacaagttcatgctctatcttctcactgctggcaagaaggctttggttgatggtggggtaaccgaagaagtcatggcagagtttgacaaagccaaatgcggagtcttgattggctctgcaatgggaggcatgaaggtctttcaagatgctattgaagctatgaagatctcttacaagaagatgaatcctttctgtgtgcctttcgcgacaacgaacatgggttctgctatgcttgctttggatctgggatggatggggccaaactattctatctcaactgcttgtgcaacaagcaacttttgcattctcaattcagcaaaccacattatcaaaggagaagctgatgtaatgctctgtggtggctcggattcagttattattccaatagggttgggaggttttgttgcatgccgtgctctttctcaaaggaataatgatcccacaaaagcttcacgcccttgggatagcaaccgagatggtttcgtgatgggagagggagctggagttttgcttttggaagagcttgaacatgctaagaaaagaggagcaacaatctatgcagagttccttggtgggagtttcacatgtgatgcctatcacatgaccgagcctcgccctgatggtgctggtgtgattctgtgtattgagagagcattggctgatgctgggatttccaaagaacagataaactatataaatgcacatgcaacctctacaccagctggagaccttaaggagtaccaagcccttgctcactgctttggccaaaatcctgagataaaagttaattccacaaaatctatgattggacacttgctgggagctgctggggccgttgaagctgtcgcaactgtgcaggccataaggaccggatgggttcatccaaatatcaaccttgagagtccagacaatggagtggatacaaatttgctggtgggtcctgagaaggagagattggacattaaagcagccttgtcaaattcattcgggtttggtggccacaactccagcatcatttttgctccttacaagtga

SEQ ID NO: 20087 - protein, 433 aa, Brassica napus
MAVAMDMEKEAKVDNKPPTEQRRVVVTGMGVETSLGHDPDTFYENLLQGNSGISQIENFDCSAFPTRIAGEIKSFSTEGWVAPKLSKRMDKFMLYLLTAGKKALVDGGVTEEVMAEFDKAKCGVLIGSAMGGMKVFQDAIEAMKISYKKMNPFCVPFATTNMGSAMLALDLGWMGPNYSISTACATSNFCILNSANHIIKGEADVMLCGGSDSVIIPIGLGGFVACRALSQRNNDPTKASRPWDSNRDGFVMGEGAGVLLLEELEHAKKRGATIYAEFLGGSFTCDAYHMTEPRPDGAGVILCIERALADAGISKEQINYINAHATSTPAGDLKEYQALAHCFGQNPEIKVNSTKSMIGHLLGAAGAVEAVATVQAIRTGWVHPNINLESPDNGVDTNLLVGPEKERLDIKAALSNSFGFGGHNSSIIFAPYK

SEQ ID NO: 20088 - DNA, 1467 bp, Glycine max
  CDS (1)..(1467)
atggcttcgaccaccacctcctccctctgcacgtggctcgttgctgcttgcatgtcagtcacgtgccacgccgaccgcaccaaaacccctcacgcaatgttccgctcctccaaaaagtctcgctactctcaattcaacgtttgtcgatccactcattctggtaaaacaatggctgtagctttgcaacctacccaagggatcacgacaataaaaaaacctcccacgaagcaaaggcgagtggttgtgacaggattgggtgtggttacaccacttgggcatgagccagatatcttctacaataatttgcttgatggtgctagtggcataagcgagattgaaacatttgattgtgcagatatcccaacaaggattgctggtgaaatcaagtctttctcaactgatggctgggtagcaccaaaactttctaagagaatggataaatttatgctctatatgctgacagctggcaaaaaagccttggttgatggtggaattactgatgatgtaatggatgagttatataaagacaagcgtggagttctgattgggtcagcaatgggtggcatgaaggttttcaatgatgccatcgaagctttacgaatctcatataagaagatgaatcctttttgtgtaccttttgcaacaacacatatgggttctgccatgcttgcaatggatctgggatggatgggccctaattattctatctctacagcttgtgctacaagtaacttttgtatattgaatgcagcaaaccatatcattagaggtgaagctgatgtgatgctttgtggaggctcagatgctgctattataccaattggtttgggaggctttgtggcatgcagggcactctcacaaaggaatactgatcctaccaaagcttcacgcccttgggacattaaccgtgatggatttgtcatgggtgaaggggctggagttttgcttttagaggaactggagcatgctaaggaaagaggtgcaacaatattggctgaattccttggtggaagtttcacctgtgatgcatatgatgtgactgagccgcgtcctgatggggctggtgttatactgtgcattgaaaaggcattagctcagtctggagtatcaaaagaggatgtgaattacataaatgcacatgccacatccacaccagctggagatcttaaggagtaccaagctctaatgcattgttttggtcaaaaccccgagttaagagtgaatctaacaaaatctatgattggtcatctactaggggcagctggcggtgtggaagctgtggccacaatacaggcaattaggacagggtgggttcatcccaatatcaacctagaaaacccagataacggagtggatgctaaagtgcttgttggctcaaagaaagagagactggatgtcaaggcagccttgtcgaattcatttggttttgggggtcacaattcttcaatcatatttgcaccatactag

SEQ ID NO: 20089 - protein, 488 aa, Glycine max
MASTTTSSLCTWLVAACMSVTCHADRTKTPHAMFRSSKKSRYSQFNVCRSTHSGKTMAVALQPTQGITTIKKPPTKQRRVVVTGLGVVTPLGHEPDIFYNNLLDGASGISEIETFDCADIPTRIAGEIKSFSTDGWVAPKLSKRMDKFMLYMLTAGKKALVDGGITDDVMDELYKDKRGVLIGSAMGGMKVFNDAIEALRISYKKMNPFCVPFATTHMGSAMLAMDLGWMGPNYSISTACATSNFCILNAANHIIRGEADVMLCGGSDAAIIPIGLGGFVACRALSQRNTDPTKASRPWDINRDGFVMGEGAGVLLLEELEHAKERGATILAEFLGGSFTCDAYDVTEPRPDGAGVILCIEKALAQSGVSKEDVNYINAHATSTPAGDLKEYQALMHCFGQNPELRVNLTKSMIGHLLGAAGGVEAVATIQAIRTGWVHPNINLENPDNGVDAKVLVGSKKERLDVKAALSNSFGFGGHNSSIIFAPY

SEQ ID NO: 20090 - DNA, 1410 bp, Glycine max
  CDS (1)..(1410)
atgcaagcgcttcattcccccaccctccgcacttctcccttggaccctcttcggggccccaacaatgccgccgccaagcgacgcgcctcctctgccaagcgcgtgttcttcgtgtccgccacggtggcgccgaaggtgtccgccccgcagcggcagaaggactcgaagaagcgcgtggttatcacgggaatggggctcgcgtcggtgttcgggaacgacgtggaggggtactacgagaagcttctcgccggcgagagcggcatcacccccatcgaccgcttcgacgcctccaagtttcccacgcgcttcggcggccagatccgcggcttctccgccgagggctacatcgacggcaagaacgaccgccgcctcgacgactgcctccgctactgcattgtcgccggcaaaaaggccctcgaaaacgccgaccttgccccagacaaccactccaagattgataaggagcgtgctggtgttcttgtaggctccggaatgggaggtttaacggtgttttctgacggtgttcaggctctgattgagaaggggcacaggaagataacgccgttttttattccgtatgccattactaacatgggttcggctttgcttgggatagaccttgggttcatgggtcccaactattctatatccacggcttgtgctacctccaactattgcttttatgctgcggcgaaccatattcggagaggggaggctgatttgatgattgcgggtgggactgaggctgccattattccaattgggttagggggtttcgttgcttgcagggcgctttcgcagaggaatgatgaccccaaaactgcttccaggccgtgggataaggaccgtgatggctttgttatgggcgaaggtgctggagttttggtaatggagagcttggaacatgccatgaagcgaggcgcacctattattgctgaatacttgggaggtgctgttaactgtgatgcttatcacatgactgatccaaggtctgatggacttggtgtgtctacatgcattcagagcagccttgaagatgcgggtgtgtcaccagaggaggtcaactacataaatgcacatgcaacttccactcttgctggagacttggcagagatcaatgctattaaaaaggttttcaaggacacttctggaatcaaaattaatgcaaccaagtctatgatagggcactgccttggtgcagctgggggtttggaagccattgccacagtgaaagccataacaacaggatggctgcatccaacaatcaatcaatttaacccagaacctgcagttgattttgatacagtggcaaatgtcaagcagcagcatgaaatcaacgttgccatttcaaattcatttggattcggtggacacaactctgtggtagcattttctgctttcaggccttga

SEQ ID NO: 20091 - protein, 469 aa, Glycine max
MQALHSPTLRTSPLDPLRGPNNAAAKRRASSAKRVFFVSATVAPKVSAPQRQKDSKKRVVITGMGLASVFGNDVEGYYEKLLAGESGITPIDRFDASKFPTRFGGQIRGFSAEGYIDGKNDRRLDDCLRYCIVAGKKALENADLAPDNHSKIDKERAGVLVGSGMGGLTVFSDGVQALIEKGHRKITPFFIPYAITNMGSALLGIDLGFMGPNYSISTACATSNYCFYAAANHIRRGEADLMIAGGTEAAIIPIGLGGFVACRALSQRNDDPKTASRPWDKDRDGFVMGEGAGVLVMESLEHAMKRGAPIIAEYLGGAVNCDAYHMTDPRSDGLGVSTCIQSSLEDAGVSPEEVNYINAHATSTLAGDLAEINAIKKVFKDTSGIKINATKSMIGHCLGAAGGLEAIATVKAITTGWLHPTINQFNPEPAVDFDTVANVKQQHEINVAISNSFGFGGHNSVVAFSAFRP

SEQ ID NO: 20092 - DNA, 1410 bp, Glycine max
  CDS (1)..(1410)
atgcaagcgcttcactctcccaccctccgcgcttctcccttggaccctcttcgtggccccaacaatgccgccgccaaccgccgctcctccagcgccaagcgcgtgttcttcgtctccgccacggtggcgccgaaggtgtccgccccgcagcgacagaaggaccccaagaagcgcgttgtgatcaccggaatgggcctcgcgtcggtgttcggtaacgacgtggagggttactacgagaagctcctcgccggcgagagcggcatcaccgccatcgaccgcttcgacgcctccaagttccccacgcgtttcggcggccagatccgcggcttctctgccgagggctacatcgacggcaagaacgaccgccgcctcgacgactgcctccgctactgcattgtcgccggcaaaaaggccctcgaaaacgccgaccttgcccccgacaaccactccaagattgataaggagcgtgctggtgttcttgtaggctctggaatgggaggcttaacggtgttttctgacggtgttcaggctctgattgagaaggggcacaggaagataacgccgtttttcattccttatgcaattactaacatgggttcggctttgcttgggatagaccttggattcatgggtcccaactactctatatccacggcttgtgctacttccaattattgcttttatgctgcggcgaaccatattcggagaggggaggctgatttgatgatagccggtgggactgaggctgccattattcctattgggttagggggttttgttgcttgcagagcgctttctcagaggaacgacgaccctaaaaccgcttccaggccatgggataaggaacgtgatggctttgttatgggtgaaggtgctggagttttggtaatggagagcttggagcatgctatgaagcgaggcgcacctattattgctgaatatttgggaggagctgttaactgtgatgcttatcacatgactgatccaaggtctgatggacttggtgtgtctacatgcattcagagcagccttgaagatgccggtgtgtcaccagaggaggtcaactacataaatgcacatgcaacttccactcttgctggagacttggcagaaattaatgctattaaaaaggttttcaaggacacttctggcatcaaaattaatgccaccaagtctatgatagggcactgccttggtgcagctgggggtttagaagccattgccacagtgaaagccataacaacaggatggctgcatccaacaatcaatcaatttaacccagaacctgcagttgattttgatacagtggcaaatgtcaagcagcagcatgaaatcaacgttgccatttcaaattcatttggattcggtggacacaactctgtggtggcattttctgctttcaagccttga

SEQ ID NO: 20093 - protein, 469 aa, Glycine max
MQALHSPTLRASPLDPLRGPNNAAANRRSSSAKRVFFVSATVAPKVSAPQRQKDPKKRVVITGMGLASVFGNDVEGYYEKLLAGESGITAIDRFDASKFPTRFGGQIRGFSAEGYIDGKNDRRLDDCLRYCIVAGKKALENADLAPDNHSKIDKERAGVLVGSGMGGLTVFSDGVQALIEKGHRKITPFFIPYAITNMGSALLGIDLGFMGPNYSISTACATSNYCFYAAANHIRRGEADLMIAGGTEAAIIPIGLGGFVACRALSQRNDDPKTASRPWDKERDGFVMGEGAGVLVMESLEHAMKRGAPIIAEYLGGAVNCDAYHMTDPRSDGLGVSTCIQSSLEDAGVSPEEVNYINAHATSTLAGDLAEINAIKKVFKDTSGIKINATKSMIGHCLGAAGGLEAIATVKAITTGWLHPTINQFNPEPAVDFDTVANVKQQHEINVAISNSFGFGGHNSVVAFSAFKP

SEQ ID NO: 20094 - DNA, 1722 bp, Elaeis guineensis var
  CDS (1)..(1722)
atggcgggatactcggtggcggcgccgctgtgcacgtggttggtggcagcgtgcgtgacggcgtcgggtggaaaggaggggcctttggcggcgccggcgccggcggtcggggaggcgaggcggttgagccggtcggcgaggaggcggagggcggcggcgctccgcctcgacgcccgggattcctctggaggactgatgtcggcgctccgtggatcggggatccaggggctgatgagctcctgcctcgccttcgagccctgcgcggagttctacggctctaagggcgcgtcggctttcttcggagagagtggcttctccctctttgggacgtcgaaggcggagactacgagaaggcagcgaagggccgcgcgcgcctcttgcgtctcgggcaaagcaatggcagtagctgtgcagcctgctaaggaaattgcagaaaagaagagaacccatacaaagaagaggagagtggtcgtgacagggatgggtgtggtgactccactgggcgttgatcctggtatcttctacaataaccttcttgatggtgtcagtggtataagtcaaattgaaacatttgactgtaccaactatccaacaagaattgcaggagaaattaaatctttttcaacagatggattggtggcacctaaattatctaaacgaatggacaaattcatgctctatttacttattgctggaaagaaagcattagccaatggtggggttactgaagaggtcatgagtcagcttgacaaggcaaaatgcggagtgctcataggctctgcgatgggtggaatgaaggtttttaatgatgccatcgaagctttaagggtctcatataagaagatgaatccattttgtgttccatttgcaacgacaaacatgggttctgcaatccttgccatggatctgggttggatgggcccaaattactctatttcaactgcttgtgctacaagcaatttctctatcctgaatgcagcaaaccatataataagaggggaagctgatgtgatgctttgtggtggatcagatgctgctattataccaattggactggggggttttgttgcttgcagagcactctcgcagagaaatagtgatccgactaaagcgtcacggccttgggacattgatcgtgatggattcgtgatgggggagggggctggcgtgcttctactggaagaattagagcatgctaagcaaagaggagcaaatatctatgctgaatttcttgggggaagcttcacatgtgatgcttaccacatgactgagccacatcctgagggggcaggcattgctctttgcattgagaacgcattagcacaagcaggggtagccaaagaagatgttaattatgtaaatgctcatgcaacttcaacacctgctggtgacctaaaagagtatcaagctctcattcgttgttttgggcagaatcctgagctgagagtgaactctacaaaatcaatgattggtcacctactaggagcttctggtgcggtggaagctgttgctgcaattcaggcaattcgaacagggtgggtccatccaaatgtcaatctcgaaaacccagaaaaaagtgtggatataaatgtgctggtgggctcgagaaaggaaaggttggatgtgaaggtggcattatcaaactcattcgggtttggtggtcacaactcgtctatcttgtttgcacctacaaatagtcatggaaagaacttcagatgttaa

SEQ ID NO: 20095 - protein, 573 aa, Elaeis guineensis var
MAGYSVAAPLCTWLVAACVTASGGKEGPLAAPAPAVGEARRLSRSARRRRAAALRLDARDSSGGLMSALRGSGIQGLMSSCLAFEPCAEFYGSKGASAFFGESGFSLFGTSKAETTRRQRRAARASCVSGKAMAVAVQPAKEIAEKKRTHTKKRRVVVTGMGVVTPLGVDPGIFYNNLLDGVSGISQIETFDCTNYPTRIAGEIKSFSTDGLVAPKLSKRMDKFMLYLLIAGKKALANGGVTEEVMSQLDKAKCGVLIGSAMGGMKVFNDAIEALRVSYKKMNPFCVPFATTNMGSAILAMDLGWMGPNYSISTACATSNFSILNAANHIIRGEADVMLCGGSDAAIIPIGLGGFVACRALSQRNSDPTKASRPWDIDRDGFVMGEGAGVLLLEELEHAKQRGANIYAEFLGGSFTCDAYHMTEPHPEGAGIALCIENALAQAGVAKEDVNYVNAHATSTPAGDLKEYQALIRCFGQNPELRVNSTKSMIGHLLGASGAVEAVAAIQAIRTGWVHPNVNLENPEKSVDINVLVGSRKERLDVKVALSNSFGFGGHNSSILFAPTNSHGKNFRC

SEQ ID NO: 20096 - DNA, 1248 bp, Vibrio marinus
  CDS (1)..(1248): transl_table=11
gtggctaataatagaagagttgtaattacaggattaggaattgtttcaccggttggcaacacagttgcaactgcatgggaagcgattaaatctggtatcagcggcattgaaaatattgagcactttgataccactaatttttcaacaaagtttgctggcttagttaatgactttgacgcagaatctgtcggaattaatcgtaaagactgccgtaaaatggatttattcattcagtatggtattgcagctgcagagcaagctttaacagactctggcttagagattactgaacagaatgcaacacgtattggtaccgctatcggctctggtatcggtggtttaggtcttattgaacaaaacgtacatagttttggtaaaggcggggcaccgaaagtaagcccattttttgtccctgctacaatcgtgaatatggttgcagggcatgtttcaattcgtaataatcttaaaggcccaaatattgccattgcgacagcatgtacgtctggtacgcactgtattggccaatctgcacgtatgatcgcatatggtgatgcagatgtaatggttgccggtggtgccgagaaagcatcgactgaaatgggcttggctggttttggttctgctaaggcactttcaacccgtaatgacgacccgcagaaagcaagtcgaccttgggacaaagaccgcgatggctttgtactaggtgatggcgccggtgtattagtgatggaagagtatgaacacgccgttgctcgtggtgctactatttatgctgaattagctggttttggtatgagtggcgatgcatttcacatgacatcaccacctgaagacggtgcaggcgctgcattatcaatgaataatgcgattgctgacgcaggtattaccgcagataaagtgggttatgtgaacgctcatggtacatcaacacctgctggtgataaagctgaaacagccgctgtaaaatcagtgtttggtgaacatgcctatacacttgcagttagctctacaaaatcaatgaccggtcatctattaggtgctgctggtgcaattgaagctatcttcactattttggcattgaaagatcaaatattaccgccaacaattaacttggaaaatccaagcgaaggttgtgatcttgattatgtaactgacggtgctcgccccgtgaatatggaatacgcattatccaattcatttggtttcggcggtactaacggttctctgctatttaaaaaagcagactaa

SEQ ID NO: 20097 - protein, 415 aa, Vibrio marinus
MANNRRVVITGLGIVSPVGNTVATAWEAIKSGISGIENIEHFDTTNFSTKFAGLVNDFDAESVGINRKDCRKMDLFIQYGIAAAEQALTDSGLEITEQNATRIGTAIGSGIGGLGLIEQNVHSFGKGGAPKVSPFFVPATIVNMVAGHVSIRNNLKGPNIAIATACTSGTHCIGQSARMIAYGDADVMVAGGAEKASTEMGLAGFGSAKALSTRNDDPQKASRPWDKDRDGFVLGDGAGVLVMEEYEHAVARGATIYAELAGFGMSGDAFHMTSPPEDGAGAALSMNNAIADAGITADKVGYVNAHGTSTPAGDKAETAAVKSVFGEHAYTLAVSSTKSMTGHLLGAAGAIEAIFTILALKDQILPPTINLENPSEGCDLDYVTDGARPVNMEYALSNSFGFGGTNGSLLFKKAD

SEQ ID NO: 20098 - DNA, 1260 bp, Streptomyces rochei
  CDS (1)..(1260): transl_table=11
atgagacgggtcgtcatcaccgggatcggggtggtcgcgccgggcggcgtcggcaccgcggacttctgggcgctgctgaccgaggggcgtaccgccacccgccgtatcaccctcttcgacgcctcctcgttccgctcccggatcgccgccgaggccgacttcgaccccgccgggcacggtttcgctcccgacgaggcgcgccgcctggaccgcgtcgcgcagttcgccctggtcgcggcgcgggaggcggtcgccgacagcgggctcgtgctcgccgccgagggggagcgcaccggggtgagcctgggcaccgcggtcggatgcagcagcggcctcgacgagacctacgcacacgtcagcgagtcgggcagccgctggctgctggatccgcacggccgaggccggctcggggactacctcgtgcccagctcggtcgccgccgaggtcgcccgcgacagcgcgctgggctcggtcgccgtcgtgtccacgggctgcacctcgggactcgacgcgctcggccacgcgaccgagctgatccgcgagggcagcgccgacatcatggtggcgggcggcgcggaagcccccatcacccccatcaccctcgcctcgttcgacgccatccgcgccacctcggcgcgcaacgacgagcccgagaccgcctcccgcccctacgaccgcacccgcgacgggttcgtgctcggcgagggcagcgcggtgctcgtcctggaggagcacgaccgggcggtacggcgcggcgcccgcatctacccggaggtgagcgggttcgccactcgctccaacgcctatcacatgaccggactgcgcccggacggcggggagatggccgaggccatccgggtcgccctggacgaggcccgcctgaaccccgcggacgtccactacgtcaacgcccacggttcggggaccaagcagaacgaccggcacgagacggccgcgttcaaggcgagcctcgggcagcacgcccaccgggtgccggtcagctccgtcaagtcgatgatcgggcactcgctcggcgccatcggcgcgctcgaaatcgccgccagcgcgctggccatcgcccatgacacggtgccgcccaccgccaacctgcacgaggccgacccggcctgcgacctcgactacacgccgctgaccgcacgcgagcagcgcaccgacacggtgctcagcgtcggcagcggcttcggcggtttccagagcgcgatggtgctcaccagccggcacacgggggcggccgcgtga

SEQ ID NO: 20099 - protein, 419 aa, Streptomyces rochei
MRRVVITGIGVVAPGGVGTADFWALLTEGRTATRRITLFDASSFRSRIAAEADFDPAGHGFAPDEARRLDRVAQFALVAAREAVADSGLVLAAEGERTGVSLGTAVGCSSGLDETYAHVSESGSRWLLDPHGRGRLGDYLVPSSVAAEVARDSALGSVAVVSTGCTSGLDALGHATELIREGSADIMVAGGAEAPITPITLASFDAIRATSARNDEPETASRPYDRTRDGFVLGEGSAVLVLEEHDRAVRRGARIYPEVSGFATRSNAYHMTGLRPDGGEMAEAIRVALDEARLNPADVHYVNAHGSGTKQNDRHETAAFKASLGQHAHRVPVSSVKSMIGHSLGAIGALEIAASALAIAHDTVPPTANLHEADPACDLDYTPLTAREQRTDTVLSVGSGFGGFQSAMVLTSRHTGAAA

SEQ ID NO: 20100 - DNA, 1689 bp, Arabidopsis thaliana
  CDS (1)..(1689)
atggtgggtgcgtcttcctcttacgcatctccgttatgtacctggtttgttgctgcttgcatgtccgtctctcacggtggaggagatagccgtcaggctgttgctcttcaatctggtgggcggagtcggcgaaggaggcagcttagcaaatgctctgtcgcttctggatccgctagcattcaggctctcgtcacttcttgtttggattttggtccttgtactcactacaacaacaacaatgcattgtcttctctctttggatcgaatagtgtttctttgaatcgaaaccagaggagattgaatcgtgctgctagctccggtggagccatggcagtgatggagatggaaaaggaagctgcggttaacaagaaaccacctacggagcagcgtcgagttgtagtgacaggcatgggagttgaaacatcattgggtcatgacccacataccttctatgagaatttgctacaaggcaacagtggtattagccagattgaaaattttgattgttctgaatttcctacgaatatctttctttgttttacctttgtcaagcgaattgcgggagagatcaaaagcttctcgactgaaggatgggttgctccaaaactttctaaaaggatggacaaattcatgctctatcttctcacagctggtaagaaagctttggctgatggtggggttactgatgaagtaatggcagagtttgacaaaaccaaatgtggagttttgattggctcggcaatgggaggaatgaaggtcttttacgatgctattgaagctctgagaatctcttacaagaagatgaatcctttttgtgtaccttttgcgacaacaaacatgggttctgctatgcttgccatggatctgggatggatggggccaaactattctatttcaactgcttgtgccacaagcaacttttgcattctgaattcagcaaaccacattattaaaggtgaagctgtaagtatcctccatacacttggaaattcgacagatgtaatgctctgtggtggctcagatgcagttattattccaatagggttgggaggttttgttgcatgccgggctctttcacaaaggaataatgatcccacaaaagcttcacgtccttgggataccaatcgagatggtttcgtgatgggagagggagctggagttctacttttggaagaactcgagcatgctaagaaaagaggtgcaactatctacgcagagttcctcggtgggagtttcacatgtgatgcctatcacatgaccgagcctcaccctgatggggctggtgttattctctgtattgagagagcgttagctagtgctgggatttccaaggaacaaataaattacataaatgcacatgcaacctcaacgcatgctggagatattaaggaataccaagcccttgctcactgttttggccaaaatcctgagcttaaggtaaattccacaaaatctatgattggacacttgctgggagctgctggggccgtggaggctgttgcaactgtgcaggcgatacggaccggatgggttcatccaaatatcaacctcgagaatccagacagtggagtggatacaaagctgctggtgggtcctaagaaggagagactggacattaaagcagccttgtcaaattcattcgggtttggtggtcataactccagcatcatttttgctccttacaagtga

SEQ ID NO: 20101 - protein, 562 aa, Arabidopsis thaliana
MVGASSSYASPLCTWFVAACMSVSHGGGDSRQAVALQSGGRSRRRRQLSKCSVASGSASIQALVTSCLDFGPCTHYNNNNALSSLFGSNSVSLNRNQRRLNRAASSGGAMAVMEMEKEAAVNKKPPTEQRRVVVTGMGVETSLGHDPHTFYENLLQGNSGISQIENFDCSEFPTNIFLCFTFVKRIAGEIKSFSTEGWVAPKLSKRMDKFMLYLLTAGKKALADGGVTDEVMAEFDKTKCGVLIGSAMGGMKVFYDAIEALRISYKKMNPFCVPFATTNMGSAMLAMDLGWMGPNYSISTACATSNFCILNSANHIIKGEAVSILHTLGNSTDVMLCGGSDAVIIPIGLGGFVACRALSQRNNDPTKASRPWDTNRDGFVMGEGAGVLLLEELEHAKKRGATIYAEFLGGSFTCDAYHMTEPHPDGAGVILCIERALASAGISKEQINYINAHATSTHAGDIKEYQALAHCFGQNPELKVNSTKSMIGHLLGAAGAVEAVATVQAIRTGWVHPNINLENPDSGVDTKLLVGPKKERLDIKAALSNSFGFGGHNSSIIFAPYK

SEQ ID NO: 20102 - DNA, 1605 bp, Cuphea hookeriana
  CDS (1)..(1605)
atggcgaccgcttcttgcatggttgcgtcccctttctgtacgtggctcgtagctgcatgcatgcccacttcatccgacaacgacccacgttccctttcccacaagcggctccgcctctcccgtcgccggaggactctctcctcccattgctccctccgcggatccaccttccaatgcctcgatccttgcaaccagcaacgcttcctcggggataacggattcgcttccctcttcggatccaagcctcttcgttcaaatcgcggccacctgaggctcggccgcacttcccattccggggaggtcatggctgtggctatgcaacctgcacaggaagtctccacaaataagaaacctgctaccaagcaaaggcgagtagttgtgacaggtatgggcgtggtgactcctctaggccatgaccccgatgtttactacaacaatctcctagacggaataagtggcataagtgagatagagaacttcgactgctctcagtttcccacgagaattgccggagagatcaagtctttttccacagatggctgggtggccccaaagttctccgagaggatggacaagttcatgctttacatgctgactgcaggcaagaaagcattagcagatggtggaatcactgaagatgcgatgaaagagctcaataaaagaaagtgtggagttctcattggctccggattgggcggtatgaaggtattcagcgattccattgaagctctgaggacttcatataagaagatcagtcccttttgtgtacctttttctaccacaaatatgggatccgctattcttgcaatggacttgggatggatgggccctaactattcgatatcaactgcctgtgcaacaagtaacttctgtatactgaatgctgcgaaccacataatcaaaggcgaagcagacatgatgctttgtggtggctcggatgcggccgttttacctgttggtttgggaggtttcgtagcatgccgagctttgtcacagaggaataatgaccctaccaaagcttcgagaccatgggacagtaatcgtgatggatttgtgatgggagaaggagctggagttttacttcttgaggagttagagcatgcaaagaaaagaggtgcaaccatttatgcggaatttctaggtgggagtttcacttgcgacgcctaccacatgaccgagcctcaccctgaaggagctggtgtgatcctctgcatagagaaggccttggctcagtccggagtctcgagggaagacgtaaattacataaatgcgcatgcaacttccactcctgctggagatatcaaggaataccaagctctcgcccactgtttcggccaaaacagtgagctgagagtgaattccaccaaatcgatgatcggtcaccttcttggaggagctggtggcgtagaagcagttgcagtagttcaggcaataaggacaggatggatccatccaaatattaatttggaagacccggacgaaggcgtggatgcaaaactgctcgtcggccctaagaaggagaaactgaaggtcaaggtcggtttgtccaattcatttgggttcggcggccataactcatccatactatttgccccctgcaactag

SEQ ID NO: 20103 - protein, 534 aa, Cuphea hookeriana
MATASCMVASPFCTWLVAACMPTSSDNDPRSLSHKRLRLSRRRRTLSSHCSLRGSTFQCLDPCNQQRFLGDNGFASLFGSKPLRSNRGHLRLGRTSHSGEVMAVAMQPAQEVSTNKKPATKQRRVVVTGMGVVTPLGHDPDVYYNNLLDGISGISEIENFDCSQFPTRIAGEIKSFSTDGWVAPKFSERMDKFMLYMLTAGKKALADGGITEDAMKELNKRKCGVLIGSGLGGMKVFSDSIEALRTSYKKISPFCVPFSTTNMGSAILAMDLGWMGPNYSISTACATSNFCILNAANHIIKGEADMMLCGGSDAAVLPVGLGGFVACRALSQRNNDPTKASRPWDSNRDGFVMGEGAGVLLLEELEHAKKRGATIYAEFLGGSFTCDAYHMTEPHPEGAGVILCIEKALAQSGVSREDVNYINAHATSTPAGDIKEYQALAHCFGQNSELRVNSTKSMIGHLLGGAGGVEAVAVVQAIRTGWIHPNINLEDPDEGVDAKLLVGPKKEKLKVKVGLSNSFGFGGHNSSILFAPCN

SEQ ID NO: 20104 - DNA, 1641 bp, Cuphea pulcherrima
  CDS (1)..(1641)
atgcctgccgcctcttccctgctcgcttcccctctctgtacgtggctccttgccgcctgcatgtctacctccttccacccctccgaccctcttccgccttccatctcctctcctcgccgacgcctctcccgccgccggattctctcccaatgcgccccactaccttctgcttcctccgccctccgcggatccagtttccataccctcgtcacctcttacctcgcctgcttcgagccctgccatgactactatacatccgcatccttgttcggatccagacccattcgcaccacccgcaggcaccggaggctcaatcgagcttccccttccagggaggcaatggccgtggctctgcaacctgaacaggaagttaccacaaagaagaagccaagtatcaaacagcggcgagtagttgtgactggaatgggtgtggtgactcctctaggccatgaccctgatgttttctacaataatctgcttgatggaacgagtggcataagcgagatagagacctttgattgtgctcaatttcctacgagaattgctggagagatcaagtctttctccacagatggttgggtggccccgaagctctctaagaggatggacaagttcatgctatacatgctgaccgctggcaagaaagcattaacagatggtggaatcaccgaagatgtgatgaaagagctagataaaagaaaatgcggagttctcattggctcagcaatgggtggaatgaaggtattcaatgatgccattgaagccctaaggatttcatataagaagatgaatcccttttgtgtacctttcgctaccacaaatatgggatcagctatgcttgcaatggacttgggatggatggggcccaactactcgatatctactgcttgtgcaacgagtaacttttgtataatgaatgctgcgaaccatataatcagaggcgaagcagatgtgatgctttgcgggggctcagatgcggtaatcatacctattggtatgggaggttttgttgcatgccgagctttgtcccagagaaattccgaccctactaaagcttcaagaccatgggacagtaatcgtgatggatttgttatgggggaaggagctggagtgctactactagaggagttggagcatgcaaagaaaagaggtgcgactatttacgcagaatttctaggtgggagtttcacttgcgatgcctaccacatgaccgagcctcaccctgatggagctggagtgattctctgcatagagaaggctttggctcagtcaggagtctctagggaagacgtaaattacataaatgcccatgccacatccactccggctggagatatcaaagagtaccaagctcttatccactgtttcggccaaaacagagagttaaaagttaattcaaccaaatcaatgattggtcaccttctcggagcagccggtggtgtggaagcagtttcagtagttcaggcaataaggactgggtggatccatccgaatattaatttggaaaacccagatgaaggcgtggatacaaaattgctcgtgggtcctaagaaggagagactgaacgttaaggtcggtttgtctaattcatttgggtttggtgggcacaactcgtccatactcttcgccccttacatctag

SEQ ID NO: 20105 - protein, 546 aa, Cuphea pulcherrima
MPAASSLLASPLCTWLLAACMSTSFHPSDPLPPSISSPRRRLSRRRILSQCAPLPSASSALRGSSFHTLVTSYLACFEPCHDYYTSASLFGSRPIRTTRRHRRLNRASPSREAMAVALQPEQEVTTKKKPSIKQRRVVVTGMGVVTPLGHDPDVFYNNLLDGTSGISEIETFDCAQFPTRIAGEIKSFSTDGWVAPKLSKRMDKFMLYMLTAGKKALTDGGITEDVMKELDKRKCGVLIGSAMGGMKVFNDAIEALRISYKKMNPFCVPFATTNMGSAMLAMDLGWMGPNYSISTACATSNFCIMNAANHIIRGEADVMLCGGSDAVIIPIGMGGFVACRALSQRNSDPTKASRPWDSNRDGFVMGEGAGVLLLEELEHAKKRGATIYAEFLGGSFTCDAYHMTEPHPDGAGVILCIEKALAQSGVSREDVNYINAHATSTPAGDIKEYQALIHCFGQNRELKVNSTKSMIGHLLGAAGGVEAVSVVQAIRTGWIHPNINLENPDEGVDTKLLVGPKKERLNVKVGLSNSFGFGGHNSSILFAPYI

SEQ ID NO: 20106 - DNA, 1329 bp, Saccharomyces cerevisiae
  CDS (1)..(1329)
atgtcaagaagagtggttatcacaggattgggctgtgtaacgccgttgggaagatcattaagtgagtcatgggggaatctgctctcttccaaaaatggactcacaccaatcacatctttgcccaactataatgaggactacaaactcagagaaaaaagtatcccatcaacgataacagtggggaagattccagagaattttcaaaacgaaaattcagccatcaataaactgctgttcactagccaggatgagagaagaacctcaagctttatcaagctagcactacgtacaacttatgaagcgcttcacaatgctggtctcttgaacccaaatgatataaccatcaatacatctctgtgcaatctggatcactttggttgcctgataggttctggtataggatccattcaagacatataccaaacttctctacaattccataacgacaataaaagaataaatccatatttcgtccctaaaatccttacaaatatggcagctggtaatgtttccatcaagtttaaccttagaggattatcccatagtgtttccacagcatgcgcaacaggtaataactccattggcgatgcattcaattttattcggttaggcatgcaagacatctgtgtcgccggtgcaagtgaaacgagtttgcatccgttaagtttagcaggtttcatcagagcaaagtcgattactacaaacgggatctctagaccctttgatacacaacgttctggattcgtacttggtgaaggatgcggaatgattgtcatggaatcgctagaacatgctcaaaagagaaatgcaaacataatttctgagctcgtgggctatggtttaagcagtgatgcctgccatattacctcccctcctgctgatggaaatggtgccaaaagagcaatagagatggctctaaaaatggctagattagaaccaactgatgttgactacgtcaatgcacatgctacatcaactttactaggcgataaagcagagtgtctggcagtagcctcagcactcttaccaggaagatccaaaagcaagccactgtacatatccagtaacaaaggtgcaattggccatcttttaggtgcagctggcgccgtagaaagtatatttacaatttgttccttgaaggatgataagatgccgcataccttaaacctggacaatgttctgactctagaaaataacgaggccgataagctacatttcataagagacaaacctattgtgggagctaatccgaagtacgcattatgcaacagcttcggatttggaggagttaacacatctcttctcttcaagaaatgggaagggagttaa

SEQ ID NO: 20107 - protein, 442 aa, Saccharomyces cerevisiae
MSRRVVITGLGCVTPLGRSLSESWGNLLSSKNGLTPITSLPNYNEDYKLREKSIPSTITVGKIPENFQNENSAINKLLFTSQDERRTSSFIKLALRTTYEALHNAGLLNPNDITINTSLCNLDHFGCLIGSGIGSIQDIYQTSLQFHNDNKRINPYFVPKILTNMAAGNVSIKFNLRGLSHSVSTACATGNNSIGDAFNFIRLGMQDICVAGASETSLHPLSLAGFIRAKSITTNGISRPFDTQRSGFVLGEGCGMIVMESLEHAQKRNANIISELVGYGLSSDACHITSPPADGNGAKRAIEMALKMARLEPTDVDYVNAHATSTLLGDKAECLAVASALLPGRSKSKPLYISSNKGAIGHLLGAAGAVESIFTICSLKDDKMPHTLNLDNVLTLENNEADKLHFIRDKPIVGANPKYALCNSFGFGGVNTSLLFKKWEGS

SEQ ID NO: 20108 - DNA, 1251 bp, Mycobacterium leprae
  CDS (1)..(1251): transl_table=11
gtgaccatgccttccactgctaatggcggtttccccagtgttgtggtgaccgctgtcacagcaacgacgtcaatctcgccggacatcgaaagcacgtggaagggtctgttggccggcgagagcggcatccacgtactcgaagacgagtacatcaccaagtgggacctgccagtcaagatcggcggccacctcaaggagccagtcgatagccacatgagccgcctggacctgcggcgcatgtcgtacgtccagcggatgagcaagctgctcagcggtcgactatgggagtccaccggcagcccggaggtcgatcccgaccggttcaccgtcgtggtcggcaccggtctgggcggcgccgagcgaatcgtggaaagctacgacctgatgaacgcgggcggaccccgtaaggtgtccccgctcgccgttcagatgatcatgcccaacggcgccgcagcgaccgtcgggctacagcttggggcatgcgccggggtgatgacaccggtgtcggcctgctcgtcgggctctgaggcaatcgcacacgcctggcgccagatcatcatgggagatgcagatgtcgccgtctgtggcggtgtcgagggcccgatcgaggcgctgcctatcgcggcgttctcgatgatgcgagccatgtcgacccgtaacgacgaccccgagggggcatctcggccattcgacaaaaatcgtgacgggtttgtgttcggcgaagccggagccctgatgctcatcgagactgaggagcacgccaaggctcgcggcgccaagccgctggctcggttgcttggtgcaggcatcacctcggacgcctttcatatggtggcacccgcggccgacggcgtgcgagcagggcgggcaatgacccggtcgctggagctggcgggtttgtcggcgaaggacgtggaccacgtcaacgcgcacgggacagcaacgccgatcggcgacagcgcggaggccaacgccatcagggtcgccggttgcgaacaggctgcggtgtatgcgccaaagtcagcactgggccactccatcggcgcggtcggcgcgcttgagtctgtcctgacggtgctggcccttcgcgacggtgtcatcccacccacactgaactaccaaaccccagatcccgagatcgacctagacattgtcgcaggtgaacctcgctacggcgactaccgttacgcgatcaataactccttcgggttcggtggccacaacgtggcgctcgcttttgggcgctactaa

SEQ ID NO: 20109 - protein, 416 aa, Mycobacterium leprae
MTMPSTANGGFPSVVVTAVTATTSISPDIESTWKGLLAGESGIHVLEDEYITKWDLPVKIGGHLKEPVDSHMSRLDLRRMSYVQRMSKLLSGRLWESTGSPEVDPDRFTVVVGTGLGGAERIVESYDLMNAGGPRKVSPLAVQMIMPNGAAATVGLQLGACAGVMTPVSACSSGSEAIAHAWRQIIMGDADVAVCGGVEGPIEALPIAAFSMMRAMSTRNDDPEGASRPFDKNRDGFVFGEAGALMLIETEEHAKARGAKPLARLLGAGITSDAFHMVAPAADGVRAGRAMTRSLELAGLSAKDVDHVNAHGTATPIGDSAEANAIRVAGCEQAAVYAPKSALGHSIGAVGALESVLTVLALRDGVIPPTLNYQTPDPEIDLDIVAGEPRYGDYRYAINNSFGFGGHNVALAFGRY

SEQ ID NO: 20110 - DNA, 1221 bp, Haemophilus influenzae
  CDS (1)..(1221): transl_table=11
atgagaagaactgtaattacaggctttgggattatttcaagtatcggtaacaacaaagaagaagtattggcttcattaaaagcagggaaatcaggtattgaagttgtgcctgagtttgtagaaatgaatatgcgtagccatgttgccggaacaatcaaattaaacccaagcgagcacattgatcgtaaagtgttccgttttatgggtgatgcagcggcttatgcttatctttctatgcgtgaagcgattgaggatgctggcttaacagaagatcaagtttctaatgatcgtactggtttagtgattggtgcgggtacgggttctgcacataaccagttagtggcttgtgatgcggtgcgtggtcctagaggtgtaaaggcgattggtccttacgcagtaacgaaaacaatggcatcaagtgtttctgcctgtttagctactccttataaaatccgtggtgtgaactattcaatgagttctgcttgtgcaacctctgcacattgtatcggtcatgcggttgagttaattcaattaggcaaacaagatgtggtttttgcaggtggtgcggaagaattatcttgggaatgtgcaactgaatttgatgcgatgggtgccgtttcaactaaatacaatgaaacgccagaaaaagcatctcgtgcttatgacgcaaatcgtgacggtttcgttattgcaggtggtggtgctgttgtggttgtggaagaattagaacatgcacttgctcgtggtgcaaaaatttacgctgaaattgtaggttatggcgcaacttctgatggttacgatatggttgcaccaagtggtgaaggtgcagagcgttgtatgaaacaagcaatggcaactgtcgataccccaattgattacattaatgtacatggcacatctacaccagtaggtgacgtgaaagaattaggtgcaatcaaaaatgtatttggtgacaaaatcccagcgatttcttcaactaaatcaatgactggtcactctttaggtgcggcgggtgcacacgaagcaatttacacgttattaatgttggataatgattttattgcaccaagtattaatatcgaaaccttagatgaagccgctgaaggttgcaacatcgttactgagacgaaagaaaatgcaggattacaaactgtcatgtcaaacagctttggttttggtggtacaaatgcgacattaatttttaaacgttataacggttaa

SEQ ID NO: 20111 - protein, 406 aa, Haemophilus influenzae
MRRTVITGFGIISSIGNNKEEVLASLKAGKSGIEVVPEFVEMNMRSHVAGTIKLNPSEHIDRKVFRFMGDAAAYAYLSMREAIEDAGLTEDQVSNDRTGLVIGAGTGSAHNQLVACDAVRGPRGVKAIGPYAVTKTMASSVSACLATPYKIRGVNYSMSSACATSAHCIGHAVELIQLGKQDVVFAGGAEELSWECATEFDAMGAVSTKYNETPEKASRAYDANRDGFVIAGGGAVVVVEELEHALARGAKIYAEIVGYGATSDGYDMVAPSGEGAERCMKQAMATVDTPIDYINVHGTSTPVGDVKELGAIKNVFGDKIPAISSTKSMTGHSLGAAGAHEAIYTLLMLDNDFIAPSINIETLDEAAEGCNIVTETKENAGLQTVMSNSFGFGGTNATLIFKRYNG

SEQ ID NO: 20112 - DNA, 1266 bp, Rhizobium meliloti
  CDS (1)..(1266): transl_table=11
atgagacgtgtcgttatcaccggtaccggcatggtatctcctctgggttgcggaaccgaagtcagctgggcgcgtcttctgaccggcgacaacgcggcccgcaaggtcaccgagttcgaggtcgaggaccttcccgccaagattgcctgccgcattcccttcggcgatggcagcgacggcacgttcaatgccgacgactggatggagcccaaggaacagcgcaaggtcgatcctttcatcgtctatgcgatggccgctgccgacatggcgctggcggatgccggctggaaacccgaaagcgacgaagaccagatttcgaccggcgtcctgatcggctccggcatcggcgggctggaaggtatcgtcgatgcgggttacaccctgcgcgacaagggcccgcggcgtatttccccgttcttcattcccggccggctgatcaatctcgcagccggtcaggtttccatccgccacaagctgcggggtcccaaccattccgtcgtgacggcctgctcgaccggcgcgcatgcgatcggcgacgccagccggctgatcgcgctcggggatgcggacgtgatggtggccggtggtacggaatctccgatctgccggatatcgctcgcaggattcgccgcctgcaaggcgctctcgacacagcacaacgacaatcccgagaaggcctcgcggccctatgacgccgatcgtgacggcttcgtcatgggcgagggtgcgggcatcgtcgttctggaagaactggagcacgcaagggcgcgcggtgccaagatctacgcagaagtgatcggttacggcctgtccggcgacgccttccacatcactgctccgtccgaagacggcgaaggcgcttaccgctgcatgcagatggcgctgaagcgcgcgggcgtcacggctgcggacatcgactatatcaacgctcacggaacatcgacgatggccgacacgatcgagctcggcgcggtcgaacggctggtcggcgacagcgcgtcgaggatctccatgtcctcgacgaagtcggccatcggacatttgctcggcgcagccggcgcggtcgaagccatcttctcggcgctcgcaattcgcgacaatatagccccgccgacgctcaacctggacaacccttccgtcgagacgaagatcgatctcgtgccgcatgtcgcgcgcaagcgcgagatcaatgtggccctgtcgaactcgttcggtttcggcggcaccaacgcgtcgttgattctgcgccgttacaccggccattga

SEQ ID NO: 20113 - protein, 421 aa, Rhizobium meliloti
MRRVVITGTGMVSPLGCGTEVSWARLLTGDNAARKVTEFEVEDLPAKIACRIPFGDGSDGTFNADDWMEPKEQRKVDPFIVYAMAAADMALADAGWKPESDEDQISTGVLIGSGIGGLEGIVDAGYTLRDKGPRRISPFFIPGRLINLAAGQVSIRHKLRGPNHSVVTACSTGAHAIGDASRLIALGDADVMVAGGTESPICRISLAGFAACKALSTQHNDNPEKASRPYDADRDGFVMGEGAGIVVLEELEHARARGAKIYAEVIGYGLSGDAFHITAPSEDGEGAYRCMQMALKRAGVTAADIDYINAHGTSTMADTIELGAVERLVGDSASRISMSSTKSAIGHLLGAAGAVEAIFSALAIRDNIAPPTLNLDNPSVETKIDLVPHVARKREINVALSNSFGFGGTNASLILRRYTGH

SEQ ID NO: 20114 - DNA, 1251 bp, Synechocystis sp
  CDS (1)..(1251): transl_table=11
atggcaaatttggaaaagaaacgtgttgttgtaacgggattgggagccatcacccccatcggtaatactctccaagactattggcaaggcttaatggagggtcgtaacggcattggccccattacccgtttcgatgctagtgaccaagcctgccgttttggaggggaagtaaaggattttgatgctacccagtttcttgaccgcaaagaagctaaacggatggaccggttttgccattttgctgtttgtgccagtcaacaggcaattaacgatgctaagttggtgattaacgaactcaatgccgatgaaatcggggtattgattggcacgggcattggtggtttgaaagtactggaagatcaacaaaccattctgttggataagggtcctagccgttgcagtccttttatgatcccgatgatgatcgccaacatggcctctgggttaaccgccatcaacttaggggccaagggtcccaataactgtacggtgacggcctgtgcggcgggttccaatgccattggagatgcgtttcgtttggtgcaaaatggctatgctaaggcaatgatttgcggtggcacggaagcggccattaccccgctgagctatgcaggttttgcttcggcccgggctttatctttccgcaatgatgatcccctccatgccagtcgtcccttcgataaggaccgggatggttttgtgatgggggaaggatcgggcattttgatcctagaagaattggaatccgccttggcccggggagcaaaaatttatggggaaatggtgggctatgccatgacctgtgatgcctatcacattaccgccccagtgccggatggtcggggagccaccagggcgatcgcctgggccttaaaagacagcggattgaaaccggaaatggtcagttacatcaatgcccatggtaccagcacccctgctaacgatgtgacggaaacccgtgccattaaacaggcgttgggaaatcatgcctacaatattgcggttagttctactaagtctatgaccggtcacttgttgggcggctccggaggtatcgaagcggtggccaccgtaatggcgatcgccgaagataaggtaccccccaccattaatttggagaaccccgaccctgagtgtgatttggattatgtgccggggcagagtcgggctttaatagtggatgtagccctatccaactcctttggttttggtggccataacgtcaccttagctttcaaaaaatatcaatag

SEQ ID NO: 20115 - protein, 416 aa, Synechocystis sp
MANLEKKRVVVTGLGAITPIGNTLQDYWQGLMEGRNGIGPITRFDASDQACRFGGEVKDFDATQFLDRKEAKRMDRFCHFAVCASQQAINDAKLVINELNADEIGVLIGTGIGGLKVLEDQQTILLDKGPSRCSPFMIPMMIANMASGLTAINLGAKGPNNCTVTACAAGSNAIGDAFRLVQNGYAKAMICGGTEAAITPLSYAGFASARALSFRNDDPLHASRPFDKDRDGFVMGEGSGILILEELESALARGAKIYGEMVGYAMTCDAYHITAPVPDGRGATRAIAWALKDSGLKPEMVSYINAHGTSTPANDVTETRAIKQALGNHAYNIAVSSTKSMTGHLLGGSGGIEAVATVMAIAEDKVPPTINLENPDPECDLDYVPGQSRALIVDVALSNSFGFGGHNVTLAFKKYQ

SEQ ID NO: 20116 - DNA, 1245 bp, Vibrio cholerae
  CDS (1)..(1245)
atgtccaagcgtcgcgttgttgtcactggcatgggtatgttgtcaccggtaggcaacactgtagagtcatcttggaaagccttgttggccggccaaagcggcatcgtcaacattgagcacttcgacactaccaatttttctactcgtttcgcaggcctggtaaaaggttttgactgcgaacagtacatgtcaaaaaaagatgctcgcaaaatggatttgtttatccagtatggtatcgctgcgggcattcaggctttggaagattcaggcctagaagttaatgaagaaaatgctgcgcgtattggcgttgcgattggttcgggtatcggcggccttgagctgattgaaaccggacatcaagctttaatcgagaaaggcccacgtaaggttagccctttcttcgttccctcaactattgtcaacatgattgccggtaacttgtctatcatgcgtggcttacgtggtcccaatattgcgatctctaccgcctgtaccacgggcttgcacaatatcggccatgcagcacgtatgattgcttacggtgatgcggatgcgatggttgcaggtggtgcagaaaaagcgtcaacgccactgggcatggcgggttttggtgcggcgaaagcactctcaactcgtaatgatgaaccgcaaaaagcgtctcgtccttgggataaagaccgtgatggtttcgtgctcggtgacggtgccggcatcatggtgcttgaagagtacgaacacgcgaaagcgcgtggcgcgaaaatttacgcagaagtggttggcttcggtatgtcaggtgatgcttatcatatgacttcaccgagtgaagacggctctggcggtgcgctggcgatggaagcggccatgcgtgatgcaggcgtgactggtgagcagattggttatgttaatgctcacggtacatctacccctgcgggcgatgtggctgaagtgaaaggcattaaacgtgcgttgggtgaagcagggactaagcaagttctggtttcttctaccaagtccatgacgggtcacttattaggtgctgcaggttctgtcgaagcgatcatcactgtgatgtctttggtggatcaaatggttccaccgaccatcaatctggataatcctgaagaaggtttgggtgtcgatttagtaccgcatgttgcccgtaaagttgagagtatggaatacgccatgtgtaactcgtttggctttggtggtactaacggtagcttgattttcaagcgcatgtaa

SEQ ID NO: 20117 - protein, 414 aa, Vibrio cholerae; identical to SEQ ID NO: 19655

SEQ ID NO: 20118 - DNA, 1248 bp, Vibrio harveyi
  CDS (1)..(1248)
atgtccaagcgtcgtgtagttgtcactggcatgggtatgttgtcaccggtaggcaacacagtagaatcatcttggaaagccctgctagaaggtcaaagcggtatcgtaaacatcgagcacttcgatgcaacgaacttctcgactcgttttgctggtcttgtaaaagattttgattgcacagagtacatgtctaagaaagatgctcgtaaaatggatttgtttatccagtacggcattgctgcgggtatccaagcattggatgactctggcttagaaattaccgaagaaaacgcggctcgagttggtgtagcaatcggctcaggcattggcggtctagacctaatcgaagcaggtcactcagcgctagttgagaaaggtcctcgcaaagttagcccattttttgttccttcgaccatcgtaaacatggttgcgggtaatctatctatcatgcgtggtcttcgtggtcctaacatcgcgatctctactgcatgtactacaggtcttcacaacatcggtcacgcggctcgtatgattgcatacggtgatgcggaagctatggttgctggtggtgcagaaaaagcatctactccacttggtatggcaggcttcggtgctgcaaaagcactatcgactcgtaacgatgaaccgcaaaaagcatcacgtccttgggataaaggtcgtgacggcttcgttctaggtgacggtgcgggcgtgatggttcttgaagagtacgaacacgcaaaagcgcgcggtgctaagatctacgcagagcttgttggcttcggtatgtctggtgacgcttaccacatgacttctccaagtgaagatggctctggtggcgcactggcaatggaagcggcgatgcgtgacgcaaacatcacaggtactcaagttggttacgtgaacgctcacggtacatcaacaccagcaggtgatgtggctgaaatcaagggtgtgaaacgcgcacttggtgaagaaggctctaagcaggttcttgtctcttctactaaatctatgactggtcaccttttaggtgcagcaggctcagtagaagcaattatcacggttctttcattggtagatcaaattgttccaccaacgattaacctagatgatccagaagaaggtttagatatcgaccttgtgccgcatactgcgcgcaaagttgatatggaatacgcaatctgtaactcgttcggcttcggcggtactaacggttcgcttgtattcaaaaaaatcgctgagtaa

SEQ ID NO: 20119 - protein, 415 aa, Vibrio harveyi
MSKRRVVVTGMGMLSPVGNTVESSWKALLEGQSGIVNIEHFDATNFSTRFAGLVKDFDCTEYMSKKDARKMDLFIQYGIAAGIQALDDSGLEITEENAARVGVAIGSGIGGLDLIEAGHSALVEKGPRKVSPFFVPSTIVNMVAGNLSIMRGLRGPNIAISTACTTGLHNIGHAARMIAYGDAEAMVAGGAEKASTPLGMAGFGAAKALSTRNDEPQKASRPWDKGRDGFVLGDGAGVMVLEEYEHAKARGAKIYAELVGFGMSGDAYHMTSPSEDGSGGALAMEAAMRDANITGTQVGYVNAHGTSTPAGDVAEIKGVKRALGEEGSKQVLVSSTKSMTGHLLGAAGSVEAIITVLSLVDQIVPPTINLDDPEEGLDIDLVPHTARKVDMEYAICNSFGFGGTNGSLVFKKIAE

SEQ ID NO: 20120 - DNA, 1272 bp, Streptomyces coelicolor
  CDS (1)..(1272): transl_table=11
atgacccggcgccgggtcgccgtcacgggcataggcgtcgtcgccccgggcgggatcggcacgccccagttctggaggctgctgtccgagggccgtacggcgacgcgccgcatctccctgttcgacccgtccgggctgcgctcgcagatcgccgccgagtgcgacttcgagccgtccgaccacgggctcggcctcgccaccgcccagcgctgcgacaggtacgtgcagttcgcgctggtggccgcctcggaggcggtccgggacgcgaacctcgacatgaaccgcgaggacccctggcgggccggtgccacgctcggcacggcggtcggcggcaccacccggctggagcacgactacgtcctggtcagcgagcgcggctcgcgctgggacgtcgacgaccggcgctccgaaccgcacctggagcgcgcgttcaccccggccaccctctcctccgcggtcgccgaggagttcggggtgcgcgggccggtgcagaccgtctccaccgggtgcacgtccggcctcgacgccgtcgggtacgcctaccacgcggtcgccgagggacgcgtcgacgtgtgcctggcgggcgcggcggactcgccgatatcgccgatcaccatggcctgcttcgacgccatcaaggcgacctcgccgaacaacgacgaccccgcgcacgcctcccggcccttcgacgcggaccgcaacggcttcgtgatgggcgagggcgcggcggtgctggtcctggaggacctggagcacgcccgggcccggggcgcggacgtgtactgcgaggtctccggctacgccaccttcggcaacgcctaccacatgaccgggctcaccaaggagggcctggagatggcgcgggccatcgacacggcgctggacatggcggaactcgacgggtcggcgatcgactacgtcaacgcgcacggctccggcacccagcagaacgaccggcacgagaccgcggccgtcaaacgctcgctgggcgagcacgcctacgcgacgccgatgagctccatcaagtccatggtgggccactcgctcggcgcgatcggctccatcgaactggccgcgtgcgtcctggcgatggcccaccaggtggtgccgcccaccgccaactacacgacccccgaccccgagtgcgacctggactacgtgccgcgcgaggcacgggagcggacgctgcggcacgtgctgtcggtgggcagcggcttcggcggcttccagtccgcggtcgtactgagcggcagtgaaggagggctgcgatga

SEQ ID NO: 20121 - protein, 423 aa, Streptomyces coelicolor
MTRRRVAVTGIGVVAPGGIGTPQFWRLLSEGRTATRRISLFDPSGLRSQIAAECDFEPSDHGLGLATAQRCDRYVQFALVAASEAVRDANLDMNREDPWRAGATLGTAVGGTTRLEHDYVLVSERGSRWDVDDRRSEPHLERAFTPATLSSAVAEEFGVRGPVQTVSTGCTSGLDAVGYAYHAVAEGRVDVCLAGAADSPISPITMACFDAIKATSPNNDDPAHASRPFDADRNGFVMGEGAAVLVLEDLEHARARGADVYCEVSGYATFGNAYHMTGLTKEGLEMARAIDTALDMAELDGSAIDYVNAHGSGTQQNDRHETAAVKRSLGEHAYATPMSSIKSMVGHSLGAIGSIELAACVLAMAHQVVPPTANYTTPDPECDLDYVPREARERTLRHVLSVGSGFGGFQSAVVLSGSEGGLR

SEQ ID NO: 20122 - DNA, 1269 bp, Streptomyces halstedii
  CDS (1)..(1269): transl_table=11
atgagccgccgggtcgtcgtcaccggcataggcgtcgtcgccccgggcggcatcggcgcggcccggttctgggacctgctggccggcgggcgtacggcgacgcgccggatctccctgttcgacccggcgcgcctgcgctcgcagatcgccgccgagtgcgacttcgacccgtccgcgcacggcctggacgacgagacggtccggcggtgcgaccggtacgtgcagttcgcgctggtcgccaccgccgaggcggtccgcgacgcgggcctggacaccacgcgcgaggacccctggcgcatgggggccgtcctcggcacggcggtcggcggcaccacccgcctggagcacgactacgtcctggtcagcgagggcggctcgcgctgggacgtggaccaccggcgggccgagccgcacctgcaccgcgccttcgcccccagcacgctcgcctccaccgtcgccgagaccttcggcgcgcagggcccggtgcagaccgtctccaccggctgcacgtccgggctggacgcggtggggtacgcctaccacgccatcgccgagggccgtgccgacgtgtgcctggcgggcgcctcggactcgccgatatcgccgatcaccatggcgtgcttcgacgccatcaaggcgacctcgcccagcaacgacgacccggagcacgcctcccgccccttcgacgcccgccgcaacgggttcgtgatgggcgagggcggcgcggtgctcgtgctggaggagctggagcacgcccgggcccgcggcgcggacgtctactgcgagctcgccggctacgccaccttcggcaacgcccaccacatgaccgggctcacccgggagggcctggagatggcgcgggccatcgacaccgcgctggacatggcccgcctggacggcacggacatcgactacgtcaacgcgcacggctccggcacccagcagaacgaccggcacgagaccgcggcggtcaagcggtcgctgggcgagcacgcgtaccggaccccgatgagctcgatcaagtcgatggtgggccactcgctcggcgcgatcggctcgatcgaggtcgtcgcctgcgtcctcgccctggcgcaccaggtggtgccgcccacggccaactacgagacaccggaccccgagtgcgacctggactacgtgccgcgcgaggcacgcgagcgggagctgcgcagcgtgctgtcggtgggcagcggcttcggcggcttccagtccgcggtcgtgctgaccggaccggagaggaggctgagatga

SEQ ID NO: 20123 - protein, 422 aa, Streptomyces halstedii
MSRRVVVTGIGVVAPGGIGAARFWDLLAGGRTATRRISLFDPARLRSQIAAECDFDPSAHGLDDETVRRCDRYVQFALVATAEAVRDAGLDTTREDPWRMGAVLGTAVGGTTRLEHDYVLVSEGGSRWDVDHRRAEPHLHRAFAPSTLASTVAETFGAQGPVQTVSTGCTSGLDAVGYAYHAIAEGRADVCLAGASDSPISPITMACFDAIKATSPSNDDPEHASRPFDARRNGFVMGEGGAVLVLEELEHARARGADVYCELAGYATFGNAHHMTGLTREGLEMARAIDTALDMARLDGTDIDYVNAHGSGTQQNDRHETAAVKRSLGEHAYRTPMSSIKSMVGHSLGAIGSIEVVACVLALAHQVVPPTANYETPDPECDLDYVPREARERELRSVLSVGSGFGGFQSAVVLTGPERRLR

SEQ ID NO: 20124 - DNA, 1422 bp, Arabidopsis thaliana
  CDS (1)..(1422)
atgcaagctcttcaatcttcatctctccgtgcttctcctccaaacccacttcgcttaccatcaaatcgtcaatcacatcagctaattaccaatgcgagacctttgcgaagacaacaacgttccttcatctccgcatcagcatccactgtctccgctcctaaacgcgaaacagatccgaagaaacgagttgtcattactggtatgggtctcgtctctgtgtttggtaacgatgttgatgcttactacgagaaattgttgtctggtgagagtggaatcagtttgattgatcgtttcgatgcttccaagttccctactcgattcggtggtcagatccgtgggtttagctctgaaggttatattgatggcaagaatgagcgtaggcttgatgattgtttgaaatattgcattgttgctggtaaaaaagctcttgaaagtgccaatcttggtggtgataagcttaacacgattgataagaggaaagctggagtactagttgggactggaatgggaggtttaactgtgttttcagaaggtgttcagaatttgattgagaagggtcataggaggattagtccattttttataccttatgctataacaaatatgggttctgctttgttggcgattgatcttggtcttatgggtcctaactattcgatttcaactgcttgtgctacttcgaattactgcttttacgctgctgcgaatcacattcgtcgtggtgaagctgatatgatgattgctggtgggactgaggctgctattattcctattgggttgggaggttttgttgcttgtagggcattgtcccagagaaatgatgaccctcaaactgcttccaggccgtgggataaagcaagagatgggtttgttatgggtgaaggagctggtgttctggtgatggaaagcttggaacatgcaatgaaacgtggtgctccaattgtagcagaatatcttggaggtgctgttaattgtgatgctcaccatatgactgatccaagagctgatggtcttggggtttcttcatgcattgaaagatgcctggaagatgctggtgtatcacctgaggaggtaaattacatcaatgcacatgcaacttccactcttgctggtgatcttgctgagattaatgccattaaaaaggtattcaagagcacttcagggatcaaaatcaacgccaccaagtctatgataggtcactgcctcggtgcagctggaggtctagaagccatcgccaccgtgaaggctatcaacactggatggctgcatccttccatcaaccaatttaacccagaacaagctgtggactttgacacggtcccaaacgagaagaagcaacacgaggttgatgttgccatatcaaactcgttcgggttcggtggacacaactcggtagtcgccttctctgccttcaaaccctga

SEQ ID NO: 20125 - protein, 473 aa, Arabidopsis thaliana
MQALQSSSLRASPPNPLRLPSNRQSHQLITNARPLRRQQRSFISASASTVSAPKRETDPKKRVVITGMGLVSVFGNDVDAYYEKLLSGESGISLIDRFDASKFPTRFGGQIRGFSSEGYIDGKNERRLDDCLKYCIVAGKKALESANLGGDKLNTIDKRKAGVLVGTGMGGLTVFSEGVQNLIEKGHRRISPFFIPYAITNMGSALLAIDLGLMGPNYSISTACATSNYCFYAAANHIRRGEADMMIAGGTEAAIIPIGLGGFVACRALSQRNDDPQTASRPWDKARDGFVMGEGAGVLVMESLEHAMKRGAPIVAEYLGGAVNCDAHHMTDPRADGLGVSSCIERCLEDAGVSPEEVNYINAHATSTLAGDLAEINAIKKVFKSTSGIKINATKSMIGHCLGAAGGLEAIATVKAINTGWLHPSINQFNPEQAVDFDTVPNEKKQHEVDVAISNSFGFGGHNSVVAFSAFKP

SEQ ID NO: 20126 - DNA, 1389 bp, Hordeum vulgare
  CDS (1)..(1389)
atgcacgcccacgccgcccacgccctcggcctccgcgtccctccccccgcgttcccccgccgccgcgctcgcccgcgccggcgccccgccgcggccgtccttgccacctcggcggcgcctcagagggagacggaccccaggaagcgggtggtgatcacggggatggggctggcgtcggtgttcgggagcgacgtggacacattctacgaccggctcctggccggggagagcggcgtcgggccgatcgaccggttcgacgccagcagtttccccacgaggttcgccgggcagatacgggggttctcgtcggaggggtacatcgacggcaagaacgaccggaggctcgacgactgcatccggtactgcatcctcagcggcaagaaggcgctcgagagtgccgggctgggcgcaggctccgacgcgcacgtcaagcttgatgtggggcgggctggtgttcttgtggggactggcatgggtggcctttcagtattctccgatggtgttcagaaccttattgagaagggatacagaaaaatttcacctttctttatcccatatgctataactaatatgggttcagccttgcttgccatagatgttggtttcatgggccccaactactcaatttcaactgcgtgtgcaacctccaactactgcttttatgctgccgcaaaccatattcgtcgtggtgaagctgatatcatcgtcgctggtggaactgaagctgccatcattccaattggccttggaggttttgtagcgtgtagagcactatcacaaaggaatgatgacccaataactgcatgtaggccatgggataaagagcgagatggctttgttatgggtgaaggtgccggtgtactggttatggagagcctggagcacgcaatgaagcgcgatgcaccgataatagctgaatacttgggaggtgcggtcaactgtgatgcttaccatatgactgatcctagagcagatggactgggtgtatcatcttgtatcacaatgagtctcagagatgcaggtgttgcaccagaggaggtgaactacatcaatgcacacgcaacttcgacacttgctggtgacttggctgaagtaagagccatcaaacaagtcttcaagaatccatctgagattaagatcaattctacaaagtccatgataggccattgcctgggtgcggcgggtgggctagaagctattgccactatcaagtccataactacaggatgggtgcatcctaccattaaccaatttaacccggagcctgaagttgattttgatacagtagctaacgaaaagaagcagcatgaagtgaatgttggtatttctaactcattcggatttggagggcacaattccgtggtagtattcgcgccattcaagccgtga

SEQ ID NO: 20127 - protein, 462 aa, Hordeum vulgare
MHAHAAHALGLRVPPPAFPRRRARPRRRPAAAVLATSAAPQRETDPRKRVVITGMGLASVFGSDVDTFYDRLLAGESGVGPIDRFDASSFPTRFAGQIRGFSSEGYIDGKNDRRLDDCIRYCILSGKKALESAGLGAGSDAHVKLDVGRAGVLVGTGMGGLSVFSDGVQNLIEKGYRKISPFFIPYAITNMGSALLAIDVGFMGPNYSISTACATSNYCFYAAANHIRRGEADIIVAGGTEAAIIPIGLGGFVACRALSQRNDDPITACRPWDKERDGFVMGEGAGVLVMESLEHAMKRDAPIIAEYLGGAVNCDAYHMTDPRADGLGVSSCITMSLRDAGVAPEEVNYINAHATSTLAGDLAEVRAIKQVFKNPSEIKINSTKSMIGHCLGAAGGLEAIATIKSITTGWVHPTINQFNPEPEVDFDTVANEKKQHEVNVGISNSFGFGGHNSVVVFAPFKP

SEQ ID NO: 20128 - DNA, 1386 bp, Arabidopsis thaliana
  CDS (1)..(1386)
atggcgacatctaatctccgtagacacttgagcgcaagtcgcctccgcttaaaccgcttcatctctacttcttcttcttatcattcacatcgccgtgttgttgtcactggtctaggcatggtgactccacttggtagaggcgttgaaacaacgtggaggcgtttaattgatggagaatgtgggattagaggattgactcttgatgatctcaagatgaagtcttttgatgaagagacaaagttatatacttttgatcagctttcttctaaagttgctgcttttgtgccttatggatcaaaccctggtgaatttgatgaagccctttggctaaactctaaggcagttgcgaattttatcggatatgctgtatgtgctgccgatgaagctttgagagatgcagagtggttaccaactgaagaagaagaaaaagagagaacaggagtctctattggtggtggaattggaagtatatgtgatattgtggaggcagcgcagctgatttgtgaaaagaggctgcggcggcttagtccgtttttcattccaaaaatattggtaaacatggcatctggtcatgtgagcatgaagtatggatttcaggggccaaatcatgctgctgtgacagcttgcgcaactggtgcacattctataggcgatgccactaggatgattcaatttggagatgcagatgttatggtggctggtggaactgagtctagcattgatgctctgtccgtagctggattctctagatcaagggctttgtcaactaaattcaattcttctccacaagaagcttcacggccttttgattgtgaccgggatggttttgtgataggggaaggttcaggggttatagtattagaggaatatgagcatgcaaaaagacgaggagcaaaaatttatgctgagctttgtggatatgggatgtcaggcgatgcacaccatattactcaacctcctgaagatggaaaaggagctgttttggccatgacgcgtgccttaagacagtctggtctgtgtccaaaccaaattgattatgtaaacgcacatgcaacatcaaccccaataggcgatgccgtggaagcgagagctatcaagacggtattctctgaacatgctacttcaggcaccttggcattctcctccaccaagggggctactggtcatcttcttggagcagctggagcagtggaagctattttcagtatccttgctatacatcacggggttgctcctatgacgctgaatgtcaagaatccagatcccatcttcgacaagaggttcatgcctttaaccacttcgaaaaagatgttagttaggacagcaatgtcgaattcgtttggctttggaggaacaaatgcatctttgctctttgcctctatctaa

SEQ ID NO: 20129 - protein, 461 aa, Arabidopsis thaliana
MATSNLRRHLSASRLRLNRFISTSSSYHSHRRVVVTGLGMVTPLGRGVETTWRRLIDGECGIRGLTLDDLKMKSFDEETKLYTFDQLSSKVAAFVPYGSNPGEFDEALWLNSKAVANFIGYAVCAADEALRDAEWLPTEEEEKERTGVSIGGGIGSICDIVEAAQLICEKRLRRLSPFFIPKILVNMASGHVSMKYGFQGPNHAAVTACATGAHSIGDATRMIQFGDADVMVAGGTESSIDALSVAGFSRSRALSTKFNSSPQEASRPFDCDRDGFVIGEGSGVIVLEEYEHAKRRGAKIYAELCGYGMSGDAHHITQPPEDGKGAVLAMTRALRQSGLCPNQIDYVNAHATSTPIGDAVEARAIKTVFSEHATSGTLAFSSTKGATGHLLGAAGAVEAIFSILAIHHGVAPMTLNVKNPDPIFDKRFMPLTTSKKMLVRTAMSNSFGFGGTNASLLFASI

SEQ ID NO: 20130 - DNA, 24 bp, Artificial sequence
  Primer sequence
atgtctaagcgtcgtgtagttgtg

SEQ ID NO: 20131 - DNA, 27 bp, Artificial sequence
  Primer sequence
ttagatctttttaaagatcaaagaacc

SEQ ID NO: 20132 - protein, 494 aa, Artificial sequence
  Consensus
  Variant (10)..(10): Xaa in position 10 is any amino acid
  Variant (16)..(21): Xaa in position 16 to 21 is any amino acid
  Variant (23)..(24): Xaa in position 23 to 24 is any amino acid
  Variant (26)..(27): Xaa in position 26 to 27 is any amino acid
  Variant (29)..(30): Xaa in position 29 to 30 is any amino acid
  Variant (33)..(34): Xaa in position 33 to 34 is any amino acid
  Variant (36)..(45): Xaa in position 36 to 45 is any amino acid
  Variant (46)..(57): Xaa in position 46 to 57 is any or no amino acid
  Variant (60)..(60): Xaa in position 60 is any amino acid
  Variant (62)..(69): Xaa in position 62 to 69 is any amino acid
  Variant (70)..(86): Xaa in position 70 to 86 is any or no amino acid
  Variant (88)..(89): Xaa in position 88 to 89 is any amino acid
  Variant (94)..(97): Xaa in position 94 to 97 is any amino acid
  Variant (101)..(101): Xaa in position 101 is any amino acid
  Variant (104)..(105): Xaa in position 104 to 105 is any amino acid
  Variant (108)..(109): Xaa in position 108 to 109 is any amino acid
  Variant (111)..(117): Xaa in position 111 to 117 is any amino acid
  Variant (118)..(131): Xaa in position 118 to 131 is any or no amino acid
  Variant (133)..(133): Xaa in position 133 is any amino acid
  Variant (136)..(136): Xaa in position 136 is any amino acid
  Variant (145)..(157): Xaa in position 145 to 157 is any amino acid
  Variant (158)..(172): Xaa in position 158 to 172 is any or no amino acid
  Variant (174)..(179): Xaa in position 174 to 179 is any or no amino acid
  Variant (181)..(181): Xaa in position 181 is any amino acid
  Variant (183)..(184): Xaa in position 183 to 184 is any amino acid
  Variant (187)..(188): Xaa in position 187 to 188 is any amino acid
  Variant (190)..(191): Xaa in position 190 to 191 is any amino acid
  Variant (193)..(193): Xaa in position 193 is any amino acid
  Variant (196)..(196): Xaa in position 196 is any amino acid
  Variant (200)..(201): Xaa in position 200 to 201 is any amino acid
  Variant (203)..(204): Xaa in position 203 to 204 is any amino acid
  Variant (206)..(211): Xaa in position 206 to 211 is any amino acid
  Variant (215)..(215): Xaa in position 215 is any amino acid
  Variant (217)..(220): Xaa in position 217 to 220 is any amino acid
  Variant (223)..(223): Xaa in position 223 is any amino acid
  Variant (225)..(227): Xaa in position 225 to 227 is any amino acid
  Variant (229)..(230): Xaa in position 229 to 230 is any amino acid
  Variant (232)..(232): Xaa in position 232 is any amino acid
  Variant (234)..(244): Xaa in position 234 to 244 is any or no amino acid
  Variant (246)..(246): Xaa in position 246 is any amino acid
  Variant (249)..(249): Xaa in position 249 is any amino acid
  Variant (252)..(252): Xaa in position 252 is any amino acid
  Variant (254)..(254): Xaa in position 254 is any amino acid
  Variant (255)..(255): Xaa in position 255 is any or no amino acid
  Variant (257)..(258): Xaa in position 257 to 258 is any amino acid
  Variant (260)..(260): Xaa in position 260 is any amino acid
  Variant (265)..(265): Xaa in position 265 is any amino acid
  Variant (267)..(267): Xaa in position 267 is any amino acid
  Variant (272)..(272): Xaa in position 272 is any amino acid
  Variant (273)..(274): Xaa in position 273 to 274 is any or no amino acid
  Variant (276)..(277): Xaa in position 276 to 277 is any or no amino acid
  Variant (279)..(279): Xaa in position 279 is any or no amino acid
  Variant (281)..(282): Xaa in position 281 to 282 is any or no amino acid
  Variant (289)..(290): Xaa in position 289 to 290 is any amino acid
  Variant (292)..(292): Xaa in position 292 is any amino acid
  Variant (307)..(308): Xaa in position 307 to 308 is any amino acid
  Variant (312)..(313): Xaa in position 312 to 313 is any amino acid
  Variant (317)..(317): Xaa in position 317 is any amino acid
  Variant (319)..(319): Xaa in position 319 is any amino acid
  Variant (323)..(323): Xaa in position 323 is any amino acid
  Variant (325)..(325): Xaa in position 325 is any amino acid
  Variant (327)..(327): Xaa in position 327 is any amino acid
  Variant (329)..(329): Xaa in position 329 is any amino acid
  Variant (332)..(332): Xaa in position 332 is any amino acid
  Variant (336)..(336): Xaa in position 336 is any amino acid
  Variant (338)..(338): Xaa in position 338 is any amino acid
  Variant (339)..(340): Xaa in position 339 to 340 is any or no amino acid
  Variant (342)..(342): Xaa in position 342 is any amino acid
  Variant (344)..(346): Xaa in position 344 to 346 is any amino acid
  Variant (347)..(347): Xaa in position 347 is any or no amino acid
  Variant (349)..(350): Xaa in position 349 to 350 is any amino acid
  Variant (353)..(354): Xaa in position 353 to 354 is any amino acid
  Variant (356)..(356): Xaa in position 356 is any amino acid
  Variant (358)..(363): Xaa in position 358 to 363 is any or no amino acid
  Variant (365)..(365): Xaa in position 365 is any amino acid
  Variant (375)..(376): Xaa in position 375 to 376 is any amino acid
  Variant (377)..(377): Xaa in position 377 is any or no amino acid
  Variant (379)..(380): Xaa in position 379 to 380 is any amino acid
  Variant (382)..(383): Xaa in position 382 to 383 is any amino acid
  Variant (386)..(389): Xaa in position 386 to 389 is any amino acid
  Variant (391)..(392): Xaa in position 391 to 392 is any amino acid
  Variant (393)..(406): Xaa in position 393 to 406 is any or no amino acid
  Variant (408)..(408): Xaa in position 408 is any or no amino acid
  Variant (410)..(410): Xaa in position 410 is any amino acid
  Variant (415)..(416): Xaa in position 415 to 416 is any amino acid
  Variant (419)..(419): Xaa in position 419 is any amino acid
  Variant (430)..(431): Xaa in position 430 to 431 is any amino acid
  Variant (433)..(433): Xaa in position 433 is any amino acid
  Variant (436)..(441): Xaa in position 436 to 441 is any amino acid
  Variant (446)..(452): Xaa in position 446 to 452 is any amino acid
  Variant (453)..(459): Xaa in position 453 to 459 is any or no amino acid
  Variant (461)..(462): Xaa in position 461 to 462 is any amino acid
  Variant (464)..(473): Xaa in position 464 to 473 is any amino acid
  Variant (474)..(480): Xaa in position 474 to 480 is any or no amino acid
  Variant (484)..(484): Xaa in position 484 is any amino acid
  Variant (490)..(490): Xaa in position 490 is any amino acid
  Variant (492)..(493): Xaa in position 492 to 493 is any amino acid
RRVVVTGLGXVSPLGXXXXXXWXXLXXGXXGIXXIXXXXXXXXXXXXXXXXXXXXXXAGXVXXXXXXXXXXXXXXXXXXXXXXXXXKXXRRMDXXXXYALXAAXXALXXAXXXXXXXXXXXXXXXXXXXXXRXGVXIGSGIGGLXXXXXXXXXXXXXXXXXXXXXXXXXXXXRXXXXXXVXPXXVPXXIXXMXAGXVSIXXGXXGXXXXXXTACXTXXXXIGXAXXXIXXGXAXXXXXXXXXXXDXMVXGGXEXXIXXLXLAGFXAXRALSXXXNXXDXPXXASRPFDXXRXGFVMGEGAGVLVLEXXEHAXXRGAXIXAELXGXGXSXDAXHMTXPXXXGXGXXXXMXXALXXAXIXXXXXXVXYINAHGTSTXXXDXXEXXAIXXXXGXXXXXXXXXXXXXXXXLXVXSTKSXXGHXLGAAGAVEAIXXVXAIXXXXXXPTINXXXXXXXXXXXXXXLXXVXXXXXXXXXXXXXXXXXLSNXFGFGGXNXXL

SEQ ID NO: 20133 - protein, 31 aa, Artificial sequence
  Consensus
  Variant (2)..(2): Xaa in position 2 is any amino acid
  Variant (3)..(3): Xaa in position 3 is any or no amino acid
  Variant (5)..(5): Xaa in position 5 is Ile or Val
  Variant (8)..(8): Xaa in position 8 is any amino acid
  Variant (10)..(11): Xaa in position 10 to 11 is any amino acid
  Variant (12)..(12): Xaa in position 12 is Ala, Ser or Thr
  Variant (13)..(14): Xaa in position 13 to 14 is any amino acid
  Variant (15)..(15): Xaa in position 15 is Ala or Gly
  Variant (16)..(16): Xaa in position 16 is any amino acid
  Variant (17)..(17): Xaa in position 17 is Asp, Glu, Gly, Asn, Ser or Thr
  Variant (18)..(27): Xaa in position 18 to 27 is any amino acid
  Variant (29)..(30): Xaa in position 29 to 30 is any amino acid
  Variant (31)..(31): Xaa in position 31 is Ala or Gly
RXXVXTGXGXXXXXXXXXXXXXXXXXXGXXX

SEQ ID NO: 20134 - protein, 10 aa, Artificial sequence
  Consensus
  Variant (2)..(4): Xaa in position 2 to 4 is any amino acid
  Variant (6)..(6): Xaa in position 6 is Ala, Cys, Asn, Ser, Thr or Val
  Variant (7)..(8): Xaa in position 7 to 8 is any amino acid
  Variant (10)..(10): Xaa in position 10 is Ala, Cys, Asp, Gly, Asn or Ser
GXXXGXXXGX

SEQ ID NO: 20135 - protein, 45 aa, Artificial sequence
  Consensus
  Variant (2)..(5): Xaa in position 2 to 5 is any amino acid
  Variant (6)..(6): Xaa in position 6 is Asp or Asn
  Variant (7)..(7): Xaa in position 7 is any amino acid
  Variant (8)..(8): Xaa in position 8 is Ala, Gly, Ile, Leu, Pro or Val
  Variant (9)..(9): Xaa in position 9 is Ala, Gly, Pro, Ser or Thr
  Variant (10)..(10): Xaa in position 10 is Ala or Gly
  Variant (11)..(12): Xaa in position 11 to 12 is any amino acid
  Variant (13)..(13): Xaa in position 13 is Ala, Gly, Ser or Thr
  Variant (14)..(14): Xaa in position 14 is Ile, Leu, Met or Val
  Variant (15)..(19): Xaa in position 15 to 19 is any amino acid
  Variant (21)..(25): Xaa in position 21 to 25 is any amino acid
  Variant (26)..(27): Xaa in position 26 to 27 is any or no amino acid
  Variant (29)..(30): Xaa in position 29 to 30 is any or no amino acid
  Variant (32)..(33): Xaa in position 32 to 33 is Ala, Ser or Thr
  Variant (34)..(34): Xaa in position 34 is Ala, Gly or Ser
  Variant (35)..(36): Xaa in position 35 to 36 is any amino acid
  Variant (37)..(37): Xaa in position 37 is Ala, Cys, Asn, Ser or Thr
  Variant (38)..(38): Xaa in position 38 is Phe, Ile, Leu, Met or Val
  Variant (39)..(40): Xaa in position 39 to 40 is any amino acid
  Variant (41)..(41): Xaa in position 41 is Ala, Gly or Ser
  Variant (42)..(44): Xaa in position 42 to 44 is any amino acid
  Variant (45)..(45): Xaa in position 45 is Ile, Leu or Val
PXXXXXXXXXXXXXXXXXXGXXXXXXXAXXCXXXXXXXXXXXXXX

SEQ ID NO: 20136 - protein, 37 aa, Artificial sequence
  Consensus
  Variant (2)..(6): Xaa in position 2 to 6 is any amino acid
  Variant (8)..(8): Xaa in position 8 is Asp, Asn or Ser
  Variant (12)..(12): Xaa in position 12 is Ile, Leu or Met
  Variant (13)..(13): Xaa in position 13 is Ala, Gly or Ser
  Variant (14)..(14): Xaa in position 14 is Asp, Glu or Gly
  Variant (16)..(16): Xaa in position 16 is Ala, Cys, Gly or Ser
  Variant (17)..(17): Xaa in position 17 is Ala or Gly
  Variant (18)..(18): Xaa in position 18 is any amino acid
  Variant (19)..(19): Xaa in position 19 is Phe, Ile, Leu, Met or Val
  Variant (20)..(20): Xaa in position 20 is Ile, Leu, Met or Val
  Variant (21)..(21): Xaa in position 21 is Phe, Ile, Leu, Met or Val
  Variant (23)..(23): Xaa in position 23 is Ala, Asp, Glu, Ser or Thr
  Variant (24)..(26): Xaa in position 24 to 26 is any amino acid
  Variant (28)..(29): Xaa in position 28 to 29 is any amino acid
  Variant (31)..(31): Xaa in position 31 is any amino acid
  Variant (33)..(33): Xaa in position 33 is any amino acid
  Variant (34)..(34): Xaa in position 34 is Ile, Pro or Val
  Variant (35)..(36): Xaa in position 35 to 36 is any amino acid
RXXXXXRXGFVXXXGXXXXXXEXXXXAXXRXAXXXXE

SEQ ID NO: 20137 - protein, 23 aa, Artificial sequence
  Consensus
  Variant (2)..(2): Xaa in position 2 is Ile, Leu or Val
  Variant (3)..(3): Xaa in position 3 is Asn or Ser
  Variant (4)..(4): Xaa in position 4 is Ala, Cys, Thr or Val
  Variant (6)..(6): Xaa in position 6 is Ala or Gly
  Variant (7)..(7): Xaa in position 7 is Ser or Thr
  Variant (8)..(8): Xaa in position 8 is Ala, Gly or Ser
  Variant (10)..(11): Xaa in position 10 to 11 is any amino acid
  Variant (12)..(12): Xaa in position 12 is any or no amino acid
  Variant (14)..(15): Xaa in position 14 to 15 is any amino acid
  Variant (17)..(18): Xaa in position 17 to 18 is any amino acid
  Variant (19)..(22): Xaa in position 19 to 22 is any or no amino acid
YXXXHXXXTXXXDXXEXXXXXXA

SEQ ID NO: 20138 - protein, 32 aa, Artificial sequence
  Consensus
  Variant (3)..(3): Xaa in position 3 is Gly or Ser
  Variant (4)..(5): Xaa in position 4 to 5 is any amino acid
  Variant (8)..(8): Xaa in position 8 is any or no amino acid
  Variant (10)..(10): Xaa in position 10 is any or no amino acid
  Variant (12)..(12): Xaa in position 12 is Ala or Gly
  Variant (13)..(13): Xaa in position 13 is Ala, Ser or Thr
  Variant (15)..(15): Xaa in position 15 is Ala, Gly, Asn, Ser or Val
  Variant (16)..(16): Xaa in position 16 is any amino acid
  Variant (18)..(30): Xaa in position 18 to 30 is any amino acid
  Variant (31)..(31): Xaa in position 31 is any or no amino acid
TKXXXGHXLXGXXGXXEXXXXXXXXXXXXXXP

SEQ ID NO: 20139 - DNA, 1758 bp, Escherichia coli K12
  CDS (1)..(1758): transl_table=11
atggaaaattcacgcatccctggggaacatttttttaccaccagtgataatacagcgttgttttatcggcactggcccgctttacagcccggggcgaaaaaggtcatcgtcttatttcatcgcgggcatgaacattctggtcgtctacaacatctcgttgatgaactggcgatgccagatactgctttttatgcctgggatgcccgagggcatggaaaaagttcggggccgcgtggttatagcccatctcttgcgcgttcagtgcgggatgtcgatgaatttgtccgttttgctgccagcgacagccaggttggactggaagaggtggtagtgatcgcgcaaagcgtcggcgcagtgctggttgccacatggattcatgattatgcacctgcaattcgcgggctggtgctggcttctccggcctttaaggttaaattgtatgtgccgctggcacgtcctgcgctggcgttatggcatcgtctgcgtggtctgttttttattaattcctatgtgaaaggacgctatttgacccacgatcggcaacggggggcgagtttcaataatgatccgctgatcacacgggcgattgccgttaatatcttgctcgatctctacaaaacgtctgaacgtattattagagatgcggcggcgattacgctccccacgcaacttctgatatcaggcgatgactatgtggtgcatcgccaaccgcagattgatttttatcagagattacgtagccctctgaaagagctgcatctgctgccaggcttttatcacgacacgttgggtgaagagaacagggcgctggcatttgaaaaaatgcaaagctttattagtcgtttatatgctaacaaatcgcaaaaatttgattatcagcatgaagactgcacaggaccatcagcggatcgatggcggctactttctggtggacccgtgccattatcgccggttgatttagcgtatcgctttatgcgaaaggcgatgaaattgttcgggacgcactcttcgggcctgcatctcggaatgagcaccggctttgattcaggcagttcgctggattatgtctatcaaaatcaaccgcaaggtagtaacgcattcgggcgtttagtcgacaaaatctacctgaacagtgttggctggcgcggtattcgccagcgcaaaacccatttacaaatactgattaaacaagccgttgccgatctccacgccaaaggtttagccgtccgcgtggttgacattgccgcagggcatgggcgctatgtactggatgcgctggcaaacgagcctgccgtaagcgatattttgttacgtgattacagcgagttaaatgttgcacaggggcaagagatgattgctcaacggggaatgtctgggcgggtgcgttttgaacagggcgatgcgtttaacccggaggaactcagcgcgttaactccgcggcctacgctggcgattgtctctggcctgtatgagctttttcccgaaaatgagcaggtaaaaaactcactcgcaggtcttgccaatgccatcgaaccgggcggcattctcatctacaccgggcagccgtggcaccctcaactggagatgattgccggggtgttaaccagtcataaagatggtaaaccgtgggtaatgcgcgtgcgttcgcaaggggagatggattcactcgtgcgtgatgccggatttgataaatgcacacaacggattgatgagtggggtatttttacggtttcgatggcggtgcgtcgtgataactga

SEQ ID NO: 20140 - protein, 585 aa, Escherichia coli K12
MENSRIPGEHFFTTSDNTALFYRHWPALQPGAKKVIVLFHRGHEHSGRLQHLVDELAMPDTAFYAWDARGHGKSSGPRGYSPSLARSVRDVDEFVRFAASDSQVGLEEVVVIAQSVGAVLVATWIHDYAPAIRGLVLASPAFKVKLYVPLARPALALWHRLRGLFFINSYVKGRYLTHDRQRGASFNNDPLITRAIAVNILLDLYKTSERIIRDAAAITLPTQLLISGDDYVVHRQPQIDFYQRLRSPLKELHLLPGFYHDTLGEENRALAFEKMQSFISRLYANKSQKFDYQHEDCTGPSADRWRLLSGGPVPLSPVDLAYRFMRKAMKLFGTHSSGLHLGMSTGFDSGSSLDYVYQNQPQGSNAFGRLVDKIYLNSVGWRGIRQRKTHLQILIKQAVADLHAKGLAVRVVDIAAGHGRYVLDALANEPAVSDILLRDYSELNVAQGQEMIAQRGMSGRVRFEQGDAFNPEELSALTPRPTLAIVSGLYELFPENEQVKNSLAGLANAIEPGGILIYTGQPWHPQLEMIAGVLTSHKDGKPWVMRVRSQGEMDSLVRDAGFDKCTQRIDEWGIFTVSMAVRRDN

SEQ ID NO: 20141 - DNA, 1761 bp, Pseudomonas aeruginosa PAO1
  CDS (1)..(1761): transl_table=11
atgcgcgacgtacaggaattgcgtttcaccacccacgacggggtagagctcttctaccgccactggccggccagccgcccggcgccggacggcacgcgccaggcggtgctgctgttccaccgcggccatgagcactccgggcggatcgcccacctggtcgacgaactcgacctgccggaacacgacttcttcgcctgggacgcccgtggccacggcctctcgccaggcgcccgcggcgacagcccgagctttgccaccagcgtgcgcgacgtacagaccttcgtcgaccatatccaggccgtccacggtatcgccgaagagcggatggcggtggtggcgcagagcgtcggcgcggtgctggtttccacctgggcccacgactacgcgccgaaggtgcgcgcactggtgctggcttcgccggcgttccaggtcaagctctacgtgccgttcgcccgcagcgggctgaaactgatgcgcctgtggcgcggcaatttcttcgtcaacagctatgtcaaggcacgcttcctcagtcacgacccggagcggatcgcctcctacgacagcgacccgctgatcgccaaggcgatctcggtgaacgtcctgctcggcctctacgaagctgccgagcgggtggtagcggacgcacaggcgatccagattcccacccaactgctgatttccggggccgacttcgtcgtccatcgtgcgccgcaggagcgcttcttcgagcgtctcggcagcctgcgcaaggaaaagcacatcctgcccggcttcttccacgacacccttggcgagcgcgatcgtcacctggccgtcggccgtgcccggcgcttcctcctcgaggcattcgccacggcacctgaacgaccgagcctgcttgatgccgaccgcctgggtcatacctgcgccgaggccgaggcgctggccgcgccgttgccgaagaactcgccgcgcgatctctactggcgcgccacccgtgccgggctgcgcctgggcagcctgtggtcggacggggtcaagctgggcttcgacaccggcttcgattccggcagcaccctcgactatgtctaccgcaaccagccctgcggcagcggcccgctgggtcgcctgatcgaccgcaactacctggactccatcggctggcgcggcatccgccagcgcaagctgcacgtcgaggaactgctgcgcctggccatgcagcggttgcgcgaggagcagcgcgaggtgcgcatcgtcgacatcgccgccggccacggccgctacatcctcgaagccctgcaaggcgtcgagccgctgccggaaagcatcctcctgcgcgactacagcgagatcaacgtgcgtgacggcagcgccctgatcgaaagcaagggcctcgccggcatcgcccgcttcgtcaagggcgatgccttcgatcgcgccgacctggcggcgctgcaaccgaagccgagcctcggggtggtttccgggctctacgagctgttcgccgacaaccgcatggtcggcgactccctcgccggcctcggcgaggcgctggaggagggcggctacctggtctacaccggacagccctggcacccgcagctggaactgatcgcccgcgcgctgaccagccaccgccagggccaggcctgggtgatgcggcgccggacccaggcggaaatggaccagctggtggccgccgccggcttccgcaagatcacccagcgggtcgaccagtggggcatcttcagcgtatcgctggcgcagaaggtcgcccgctga

SEQ ID NO: 20142 - protein, 586 aa, Pseudomonas aeruginosa PAO1
MRDVQELRFTTHDGVELFYRHWPASRPAPDGTRQAVLLFHRGHEHSGRIAHLVDELDLPEHDFFAWDARGHGLSPGARGDSPSFATSVRDVQTFVDHIQAVHGIAEERMAVVAQSVGAVLVSTWAHDYAPKVRALVLASPAFQVKLYVPFARSGLKLMRLWRGNFFVNSYVKARFLSHDPERIASYDSDPLIAKAISVNVLLGLYEAAERVVADAQAIQIPTQLLISGADFVVHRAPQERFFERLGSLRKEKHILPGFFHDTLGERDRHLAVGRARRFLLEAFATAPERPSLLDADRLGHTCAEAEALAAPLPKNSPRDLYWRATRAGLRLGSLWSDGVKLGFDTGFDSGSTLDYVYRNQPCGSGPLGRLIDRNYLDSIGWRGIRQRKLHVEELLRLAMQRLREEQREVRIVDIAAGHGRYILEALQGVEPLPESILLRDYSEINVRDGSALIESKGLAGIARFVKGDAFDRADLAALQPKPSLGVVSGLYELFADNRMVGDSLAGLGEALEEGGYLVYTGQPWHPQLELIARALTSHRQGQAWVMRRRTQAEMDQLVAAAGFRKITQRVDQWGIFSVSLAQKVAR

SEQ ID NO: 20143 - DNA, 1764 bp, Yersinia pestis CO92
  CDS (1)..(1764): transl_table=11
atgagtcaggaagtgcgtttatttcaagaaggcatgttcaccgccagcgatgaaacatcgttgtattttcgccactggtctgccacggaaggtaacagcaagaaagttattgtgttgtttcatcgcgggcatgaacactcggggcgtctgcaacatattgtggatgaactgatgatgcccgatacccatttttacgcgtgggatgcgcgtggacacgggcagtcgccaggggctcgtggctacagccccagccttgctcgctcggttttagacgtggatgagtttgtgcgttttgtggcacaggatgcgcaggtcaacctcgacgatatcgtggtgattgcgcaaagcgtgggggccgtgctggtatcaacctgggttcatgactacgcgccgaaaatccgtggcatggtgctggcgtccccggcatttaaggtcaagctgtatgtgccgtttgcccgcctggggctgggattaatgcagcgtatacgtggcctgttttacgtgaattcctacgtgaaagggaaattcctcagccacgaccccgagcgcatcgccagctttgagcaggacaaattaatcacgcgccagatcgccgtcaatattttgctcgatctctacaaaacggctgaacgtattgtttcagactcgacggcgattactctcccgacccagttgcttatttccggcgatgattttgtggtgcatgagaaaccgcaaaaacaattttatgccggtcttcgcagcgcgataaaagagcaacatattctgccgggtttctatcacgacacgctgggtgaaaaagaccgctctattgcttttgataaaatgaaaaactttatcgaccgactctatgcaactgcgccttatgcctttgattatagccatgaagatcgctggagtccgagtgccgatgcgtatcgtgaattgcaggctccaccaaaatcacgctcgctggaagggatgttttatgctgcgctaagtttcggcatgaagaccatcgggcgacagtccaaagggatgctcctgggttatgaaacaggttttgactccggcagtacgctggattacgtctatcgtaatcagcctgaaggtaatggcattctggggcgtatgattgaccacaactatctgaacagcgttggctggcgtggtattcgcgtgcgtaaagtgaatatccagcagatgattgaacaggccgttgcgaagattcagctcagtcacatgccggtgcgagtggtcgatatcgccgccggacatggccgctatgtgctggatgcactggaaaaacagcagggtatcgaaagtatactgctgcgtgattacagcgatttgaatgtagaaaaaggtcaggcgatgatcgaagagcgtgggctaagccacgtcgctcagttcagaaaaggcaacgccttcgactatgattcccttgccacgctcgatcctgctccgacgctgggcattgtttccgggctgtatgagctcttcccggataacgacttaatcaaaacgtcgttggccgggctggctgcggctattccaccaggcggcatgctggtatacaccgggcaaccgtggcacccacagttaaaaaccatcgcgtataccttaaccagccatcaaaacgggatcccgtggatgatgcgtgtgcgcagccagaaagagatggacacgctggtggagcaggccggctttgaaaaatgccatcaggtgattgatgagtttggcattttcaccgtgtcgctggcggtgagaaagcagcatggttga

SEQ ID NO: 20144 - protein, 587 aa, Yersinia pestis CO92
MSQEVRLFQEGMFTASDETSLYFRHWSATEGNSKKVIVLFHRGHEHSGRLQHIVDELMMPDTHFYAWDARGHGQSPGARGYSPSLARSVLDVDEFVRFVAQDAQVNLDDIVVIAQSVGAVLVSTWVHDYAPKIRGMVLASPAFKVKLYVPFARLGLGLMQRIRGLFYVNSYVKGKFLSHDPERIASFEQDKLITRQIAVNILLDLYKTAERIVSDSTAITLPTQLLISGDDFVVHEKPQKQFYAGLRSAIKEQHILPGFYHDTLGEKDRSIAFDKMKNFIDRLYATAPYAFDYSHEDRWSPSADAYRELQAPPKSRSLEGMFYAALSFGMKTIGRQSKGMLLGYETGFDSGSTLDYVYRNQPEGNGILGRMIDHNYLNSVGWRGIRVRKVNIQQMIEQAVAKIQLSHMPVRVVDIAAGHGRYVLDALEKQQGIESILLRDYSDLNVEKGQAMIEERGLSHVAQFRKGNAFDYDSLATLDPAPTLGIVSGLYELFPDNDLIKTSLAGLAAAIPPGGMLVYTGQPWHPQLKTIAYTLTSHQNGIPWMMRVRSQKEMDTLVEQAGFEKCHQVIDEFGIFTVSLAVRKQHG

SEQ ID NO: 20145 - DNA, 1701 bp, Fusobacterium nucleatum subsp. nucleatum ATCC 25586
  CDS (1)..(1701): transl_table=11
atggaaaatttctattttaatacttttgatggaaataaaattttttatagaatatggaatttcgagaaaaacaaaaaaactttaattatcattcatagaggacatgaacattcagagagattaagtgaattaacacaaaatgaaaaatttttaaaatataatatttttgcctatgatttaagaggacatggctatacagaagttaaatcttctcctaatgctatggattatgttagggatttagattcttttataaaacatctaaaaaatgaataccaaataaaagaagaagatattttcattgttgcaaatagtataggtggagtaatactttctgcctatgttcatgattttgcaccaaatatagcaggtatggctttacttgcacctgcttttgaaataaaactttatattccttttgctaaacaacttgttacattgcttactaaaataaaaaaagatgctaaagttatgagttatgtaaaagcaaaagttttaactcatgatattgaagaacaaaataaatataattctgataaacttatcaataaagaaattaatgctaaactattaattgatttagctgatatgggaaaaagattggttgaagattcaatggcaatagaattacctacaataatattttctgctgaaaaagattatgttgtaaaaaattctgccgaaaaaagatttttcttaaatttatcatctaaaaaaagagagtttatagaacttgaaaatttttatcatggaataatctttgaaaaagaaagagaaaaagtatataaaatgttggatgattttatacaagatattttcaaaaatcaaaatacttcacttgatgtttctcctagagaattttcaagaaaggagtatgagaggataggcttggaagaatatcctctaagtgaaaaaatattttattctattcaaaaattctctatgaaaacttttgggtttttaagcaaaggaatgagtttaggcttaaaatatggctttgactctgggatttctcttgattatatttataaaaatcaagctgatggaaaattattactaggaaaatttatagatagattttatctaaatcaaatcggatgggcaggtgtaagagaaagaaaaaagaacttgcttactttaatagaagaaaagataaataatttaggtgaagaaaatgttaaaatcttagatgtagctggtggaactggaaattatttatttgatataaaagaaaaatatccaaatgtacagattttaataaatgagtttaaaaaatcaaatattgaagttggagaagaagttattaagaaaaacaattgggaaaatatatcttttgtaaactatgattgttttaataaggaaacttataaaaaaataaattacacacccaatatagttataatctcaggagtttttgaactctttgaagataataatatgcttgaaaatactatatcaggagtggcagaaatcttagataaaaatggtactgttatttacacaggtcaaccttggcaccctcaattaaagcaaatagctttagttcttaatagccataaaggacatggtaaatcttggcttatgagaagaagaagtgaaaaagagttagatagcttatttgaaaattataatttaaagaaagaaaaaatgctaattgataatgatggaatttttacagtttcattagcagaattgaggtaa

SEQ ID NO: 20146 - protein, 566 aa, Fusobacterium nucleatum subsp. nucleatum ATCC 25586
MENFYFNTFDGNKIFYRIWNFEKNKKTLIIIHRGHEHSERLSELTQNEKFLKYNIFAYDLRGHGYTEVKSSPNAMDYVRDLDSFIKHLKNEYQIKEEDIFIVANSIGGVILSAYVHDFAPNIAGMALLAPAFEIKLYIPFAKQLVTLLTKIKKDAKVMSYVKAKVLTHDIEEQNKYNSDKLINKEINAKLLIDLADMGKRLVEDSMAIELPTIIFSAEKDYVVKNSAEKRFFLNLSSKKREFIELENFYHGIIFEKEREKVYKMLDDFIQDIFKNQNTSLDVSPREFSRKEYERIGLEEYPLSEKIFYSIQKFSMKTFGFLSKGMSLGLKYGFDSGISLDYIYKNQADGKLLLGKFIDRFYLNQIGWAGVRERKKNLLTLIEEKINNLGEENVKILDVAGGTGNYLFDIKEKYPNVQILINEFKKSNIEVGEEVIKKNNWENISFVNYDCFNKETYKKINYTPNIVIISGVFELFEDNNMLENTISGVAEILDKNGTVIYTGQPWHPQLKQIALVLNSHKGHGKSWLMRRRSEKELDSLFENYNLKKEKMLIDNDGIFTVSLAELR

SEQ ID NO: 20147 - DNA, 1761 bp, Xanthomonas axonopodis pv. citri str. 306
  CDS (1)..(1761): transl_table=11
atgcgcacagtgctagagcgcgagttcgtcagtttcgatggtgtgccgctgttctaccggcactggccgttgcacgatgccgtcgcgaccggcacgcccagggcggtggtgctgctgcatcgtggccatgagcactccggccgtgtgatgcatcttgccgaagaactcgacatgcccgatgcgcagttctttgcctgggatgcacgcggcaacggtcgctcgcccggcgtgcgtggcgatgcgccgggcttcgaggcgctggtgcgcgatctggacagcttcatcgcgcatcttcgcgccacccacggcatcgccgtgcaggacatcgtggtgattgcgcagagtgtgggcgcggtggtggctgccacctgggtacacgattacgccccgccgctgcgcgcgctggtgctggcatcgccggcgttcaaggtgaagttgtatgtgccgttcgcacgcgccgggttggcgttgctgcatgcgctgcgcggtaacttcttcgtcaacagctacgtcaagccgcaatggctgacgcatgatccggcgcgcgtggaaagctatcgcaccgatccgttgatcacccgcccgatttcggtgcgcgtattgctcggtctgtacgcggccgccgatcgcgtggtggacgatgcacaggcgatcaccgtgccgacccagttgctggtctccggcgcggatgttgtggtgcatcgcggcccgcaggatcgcttctacgaaaacctgcgctcgccgatcaagcagcgccactggctgccggggtttttccacgacaccctgggcgaacgcgatcgcgcgattgccatcgcgcacattcgccagttcgtccaagtgcggtttgcgcaaccgccggtgcgcgccgcgctgcgcaatgcccaccgtgccggccccagtttcgaagaggccgaacggctggcctggccaccgcagcgcaacagcctgcaggacctgcgctggcgcggcgtgcgtgccggcctgcgcctgggtggcaagctctccgagggcatcgcgcttggtctgcagaccggtttcgattccggcagcacattggactacatctaccgcaatcaggcgcatggtcgcgggccgctgggccgcatgatcgaccgcacgtatctcaacgcgatcggttggcgcggcatccgcatccgcggcagccatctgggcgaattgctgcgcgaggcagcggcgcgcttgcgtggcgccggcaagccggtacgcgtcctggacatcgctgccggacacggccgctatgtgctccaggcgctgggcagcggcgcacagcgtgccgatgcaatcgtgctgcgcgacttcagcccgcccaacgtgacccagggcactgcgctgatccaggcgctgggcgctggcgacatcgcccgtttcgaacaaggcgatgcgttcgacccggcagcattggcgtccgtgcaaccggctccgacgctggcggtggtctcgggcctgtacgaattgtttgccgataacgaccaggtcgcgcgctcgctggccggcctggccgcggcggtgcagccgggcggttatctgctttacaccggtcagccctggcatccgcagctggaattcattgcgcgcgcgctgaccagtcaccgcgatggcgtggcctgggtgatgcgccggcggagccagcaggagatggatggcctggtggaagcggcgggctttcgcaaggtggcgcaacgcatcgatgcgttcggcatcttcaccgtgtcgatggcgcagcgggtcgacgcatga

SEQ ID NO: 20148 - protein, 586 aa, Xanthomonas axonopodis pv. citri str. 306
MRTVLEREFVSFDGVPLFYRHWPLHDAVATGTPRAVVLLHRGHEHSGRVMHLAEELDMPDAQFFAWDARGNGRSPGVRGDAPGFEALVRDLDSFIAHLRATHGIAVQDIVVIAQSVGAVVAATWVHDYAPPLRALVLASPAFKVKLYVPFARAGLALLHALRGNFFVNSYVKPQWLTHDPARVESYRTDPLITRPISVRVLLGLYAAADRVVDDAQAITVPTQLLVSGADVVVHRGPQDRFYENLRSPIKQRHWLPGFFHDTLGERDRAIAIAHIRQFVQVRFAQPPVRAALRNAHRAGPSFEEAERLAWPPQRNSLQDLRWRGVRAGLRLGGKLSEGIALGLQTGFDSGSTLDYIYRNQAHGRGPLGRMIDRTYLNAIGWRGIRIRGSHLGELLREAAARLRGAGKPVRVLDIAAGHGRYVLQALGSGAQRADAIVLRDFSPPNVTQGTALIQALGAGDIARFEQGDAFDPAALASVQPAPTLAVVSGLYELFADNDQVARSLAGLAAAVQPGGYLLYTGQPWHPQLEFIARALTSHRDGVAWVMRRRSQQEMDGLVEAAGFRKVAQRIDAFGIFTVSMAQRVDA

SEQ ID NO: 20149 - DNA, 1764 bp, Yersinia pestis KIM
  CDS (1)..(1764): transl_table=11
atgagtcaggaagtgcgtttatttcaagaaggcatgttcaccgccagcgatgaaacatcgttgtattttcgccactggtctgccacggaaggtaacagcaagaaagttattgtgttgtttcatcgcgggcatgaacactcggggcgtctgcaacatattgtggatgaactgatgatgcccgatacccatttttacgcgtgggatgcgcgtggacacgggcagtcgccaggggctcgtggctacagccccagccttgctcgctcggttttagacgtggatgagtttgtgcgttttgtggcacaggatgcgcaggtcaacctcgacgatatcgtggtgattgcgcaaagcgtgggggccgtgctggtatcaacctgggttcatgactacgcgccgaaaatccgtggcatggtgctggcgtccccggcatttaaggtcaagctgtatgtgccgtttgcccgcctggggctgggattaatgcagcgtatacgtggcctgttttacgtgaattcctacgtgaaagggaaattcctcagccacgaccccgagcgcatcgccagctttgagcaggacaaattaatcacgcgccagatcgccgtcaatattttgctcgatctctacaaaacggctgaacgtattgtttcagactcgacggcgattactctcccgacccagttgcttatttccggcgatgattttgtggtgcatgagaaaccgcaaaaacaattttatgccggtcttcgcagcgcgataaaagagcaacatattctgccgggtttctatcacgacacgctgggtgaaaaagaccgctctattgcttttgataaaatgaaaaactttatcgaccgactctatgcaactgcgccttatgcctttgattatagccatgaagatcgctggagtccgagtgccgatgcgtatcgtgaattgcaggctccaccaaaatcacgctcgctggaagggatgttttatgctgcgctaagtttcggcatgaagaccatcgggcgacagtccaaagggatgcgcctgggttatgaaacaggttttgactccggcagtacgctggattacgtctatcgtaatcagcctgaaggtaatggcattctggggcgtatgattgaccacaactatctgaacagcgttggctggcgtggtattcgcgtgcgtaaagtgaatatccagcagatgattgaacaggccgttgcgaagattcagctcagtcacatgccggtgcgagtggtcgatatcgccgccggacatggccgctatgtgctggatgcactggaaaaacagcagggtatcgaaagtatactgctgcgtgattacagcgatttgaatgtagaaaaaggtcaggcgatgatcgaagagcgtgggctaagccacgtcgctcagttcagaaaaggcaacgccttcgactatgattcccttgccacgctcgatcctgctccgacgctgggcattgtttccgggctgtatgagctcttcccggataacgacttaatcaaaacgtcgttggccgggctggctgcggctattccaccaggcggcatgctggtatacaccgggcaaccgtggcacccacagttaaaaaccatcgcgtataccttaaccagccatcaaaacgggatcccgtggatgatgcgtgtgcgcagccagaaagagatggacacgctggtggagcaggccggctttgaaaaatgccatcaggtgattgatgagtttggcattttcaccgtgtcgctggcggtgagaaagcagcatggttga

SEQ ID NO: 20150 - protein, 587 aa, Yersinia pestis KIM
MSQEVRLFQEGMFTASDETSLYFRHWSATEGNSKKVIVLFHRGHEHSGRLQHIVDELMMPDTHFYAWDARGHGQSPGARGYSPSLARSVLDVDEFVRFVAQDAQVNLDDIVVIAQSVGAVLVSTWVHDYAPKIRGMVLASPAFKVKLYVPFARLGLGLMQRIRGLFYVNSYVKGKFLSHDPERIASFEQDKLITRQIAVNILLDLYKTAERIVSDSTAITLPTQLLISGDDFVVHEKPQKQFYAGLRSAIKEQHILPGFYHDTLGEKDRSIAFDKMKNFIDRLYATAPYAFDYSHEDRWSPSADAYRELQAPPKSRSLEGMFYAALSFGMKTIGRQSKGMRLGYETGFDSGSTLDYVYRNQPEGNGILGRMIDHNYLNSVGWRGIRVRKVNIQQMIEQAVAKIQLSHMPVRVVDIAAGHGRYVLDALEKQQGIESILLRDYSDLNVEKGQAMIEERGLSHVAQFRKGNAFDYDSLATLDPAPTLGIVSGLYELFPDNDLIKTSLAGLAAAIPPGGMLVYTGQPWHPQLKTIAYTLTSHQNGIPWMMRVRSQKEMDTLVEQAGFEKCHQVIDEFGIFTVSLAVRKQHG

SEQ ID NO: 20151 - DNA, 1758 bp, Escherichia coli CFT073
  CDS (1)..(1758): transl_table=11
atggaaaattcacgcatccctggggagcatttttttaccaccagtgataatacagcgttgttttatcggcactggcccactttactgccaggggcgaaaaaggtcatcgtcttatttcatcgcggtcatgaacattctggtcgtctacaacatatcgttgatgaactggcgatgccagatactgctttttatgcatgggatgcccgagggcatggacaaacttcggggccgcgtggttatagtccgtctcttgcgcgttcagtgcaggatgttgatgaatttgtccgttttgctgccagcgacagccaggtcggactggaagaggtggttgtgatcgcgcaaagcgtcggcgcagtgatggttgccacatgggttcatgattatgcgcctgctattcgcggactagtgctggcatctccggcctttaaggttaaattgtatgtgccgctggcacgtcctgggctggcgttatggcatcgtctgcgtggtctgttttttattaattcctatgtgaaagggcgttatctgacccacgatcggcaacgggtggcgagtttcaataatgatccgctgatcacacgggcgattgccgtcaatatcttgctcgatctctataaaacgtctgaacgtattgttagcgatgcggcggcgattacgctccccacgcaacttctgatatcaggcgatgactatgtggtgcatcgccaaccgcagattgatttttatcagcgtttacgtagtcctctgaaagagctgcatctgctgccaggcttttatcacgacacgttgggtgaagagaacagggcgcaggcatttgaaaaaatgcaaagctttatcagccgtttatatgctaacaagtcgcaaaaatttgattatcagcatgaagaccgcacaggaccatcagcggatcgatggcggctcctttctggtggacccgtgccgttatcgccggttgatttggcgtatcgctttatgcgaaaggcgatgaaactgttcggggcgcactctgcgggcctgcatctcggaatgagtaccggctttgattcaggcagttcgctggattatgtctatcaaaatcaaccgcaaggcagtaacgcattcgggcgctttatcgacaaaatctacctgaacagtgttggctggcgcggtattcgccagcgcaaaacccatttacaaatgctgattaaacaagccgttgcccatctccacgccaaaggtttagccgtccgcgtggttgacattgccgcagggcatgggcgctatgtactggatgcgctggcaaacgagcccgccataagcgaaattttgttacgtgattacagtgaggtaaatgttgcacaagggcaagagatgattgcccaacggggaatgtctgggcgggtgcgttttgaacagggcgatgcgtttaacccggaggaactcagcgcgttaactccgcggcctacgctggcgattgtctctggcctgtatgagcttttccccgaaaatgagcaggtaaaaaactcactcgcaggtcttgccaatgccatcgatccgggtggcattctcatctacaccgggcagccgtggcacccacaactggagctgattgccggggtgttaaccagtcataaagatggtaaaccgtgggtaatgcgcgtgcgttcgcaaggggagatggattcgctcgtgcatgatgccggattcgataaatgcacacaacggattgatgtgtggggcatttttacggtttcgatggcggtgcgtcgtgataactga

SEQ ID NO: 20152 - protein, 585 aa, Escherichia coli CFT073
MENSRIPGEHFFTTSDNTALFYRHWPTLLPGAKKVIVLFHRGHEHSGRLQHIVDELAMPDTAFYAWDARGHGQTSGPRGYSPSLARSVQDVDEFVRFAASDSQVGLEEVVVIAQSVGAVMVATWVHDYAPAIRGLVLASPAFKVKLYVPLARPGLALWHRLRGLFFINSYVKGRYLTHDRQRVASFNNDPLITRAIAVNILLDLYKTSERIVSDAAAITLPTQLLISGDDYVVHRQPQIDFYQRLRSPLKELHLLPGFYHDTLGEENRAQAFEKMQSFISRLYANKSQKFDYQHEDRTGPSADRWRLLSGGPVPLSPVDLAYRFMRKAMKLFGAHSAGLHLGMSTGFDSGSSLDYVYQNQPQGSNAFGRFIDKIYLNSVGWRGIRQRKTHLQMLIKQAVAHLHAKGLAVRVVDIAAGHGRYVLDALANEPAISEILLRDYSEVNVAQGQEMIAQRGMSGRVRFEQGDAFNPEELSALTPRPTLAIVSGLYELFPENEQVKNSLAGLANAIDPGGILIYTGQPWHPQLELIAGVLTSHKDGKPWVMRVRSQGEMDSLVHDAGFDKCTQRIDVWGIFTVSMAVRRDN

SEQ ID NO: 20153 - DNA, 1758 bp, Pseudomonas syringae pv. tomato str. DC3000
  CDS (1)..(1758): transl_table=11
atgcgtgatgtgaatgatcagcgcttcaccacccacgatggcgtggagctgttctaccgccactggcctgttgcacacccgacgcccggtgcgccacggcaagcggtgttgctgtttcatcgcggccacgagcattccgggcgaattgcgcatctggttgatgaactggacctgccaggctttgattttttcgcctgggatgcccgcggtcacggccagtcgcccggggcccgtggtgacagcccgagctttgcgaccagcgttcgcgacgtgcagaccttcgtcgatcacctgcgcgtcacgtttgatattgccgaagagaacatggcggtgatcgcgcaaagcgtaggcgccgtcattgcagcgacatgggcgcacgactacgcaccgaagatccgcgcactggtcctcgcctcccccgccttcaaggtcaagctgtacgtacctttcgcccgcacggggctggcgctgctgcgcaggttcaagggcaatttcttcgtcaacagctacgtcaaggcgcgcttcctgagccacgatccgcaacgtatcgcgtcctacgacagcgacccgctgatcaccaaggccatttcagtgaatgtactgctgggcctgtatgaagccgccgaccgtgtggttgccgatgcccaggcgatccagatcccgacccaattgctgatttccggctcggatttcgtcgtgcatcgcgcgccgcaggagcgttttttcgaacaactgggcagcttgcgcaaggagaaacacatcctgccagggttcttccacgacacgttgggcgagcgcgaccgtcacttggcgctgagccgcgcgcggcgctttgttttgcagagttttgaaacgccgatgcaccgcccgtcgttgctggacgctgaccggctgggcgcaacctgtgcggagtccgaagagctggccgcgccgttgccgcacaattcgttgcgcgacctgtactggcgcatgacccacgccagcatgcgccttggcagcaagttatccacaggggtgaaactgggtttcgacactggtttcgattctggcagcacgcttgattacgtctatcgcaaccgacccgccggcaaaggcgcgctgggtcgcatgatcgacaagaactacctgcaatcgatcggctggcgtggcattcgccaacgcaagctgcatgccgaagaactgctgcgcctggccatggcgcatttgcgcaatcagggcaaaccggtacgcatcgtggacatcgccgccgggcacgggcgctacattctggagtcgttgcggggcgtagagccgctgccggaatccattctgctgcgcgactacagcgacatcaatgtgcgcgacggcagcctgctgatagagcagaaagatctggaagacatcgcgcgcttcgtcaagggcgatgcctttgaccgcaacgacctggcgacgctggaccccaaaccgacgctggcggtggtgtcggggctgtacgagttgttttccagcaaccagatggtcggcgattcgctggccgggctggcggcagccgtcgaaccgggcggttatctggtgtacaccgggcagccgtggcacccgcaactggagctgatcgcccgcgccctgaccagccatcgcgaaggccaggcctgggtaatgcgccgtcgcagtcagtcagagatggaccaactggtggaagccgcaggctttcgcaagatcacccagcgtgtggatgaatgggggattttcactgtgtccctcgcgcagcgcatccagtga

SEQ ID NO: 20154 - protein, 585 aa, Pseudomonas syringae pv. tomato str. DC3000
MRDVNDQRFTTHDGVELFYRHWPVAHPTPGAPRQAVLLFHRGHEHSGRIAHLVDELDLPGFDFFAWDARGHGQSPGARGDSPSFATSVRDVQTFVDHLRVTFDIAEENMAVIAQSVGAVIAATWAHDYAPKIRALVLASPAFKVKLYVPFARTGLALLRRFKGNFFVNSYVKARFLSHDPQRIASYDSDPLITKAISVNVLLGLYEAADRVVADAQAIQIPTQLLISGSDFVVHRAPQERFFEQLGSLRKEKHILPGFFHDTLGERDRHLALSRARRFVLQSFETPMHRPSLLDADRLGATCAESEELAAPLPHNSLRDLYWRMTHASMRLGSKLSTGVKLGFDTGFDSGSTLDYVYRNRPAGKGALGRMIDKNYLQSIGWRGIRQRKLHAEELLRLAMAHLRNQGKPVRIVDIAAGHGRYILESLRGVEPLPESILLRDYSDINVRDGSLLIEQKDLEDIARFVKGDAFDRNDLATLDPKPTLAVVSGLYELFSSNQMVGDSLAGLAAAVEPGGYLVYTGQPWHPQLELIARALTSHREGQAWVMRRRSQSEMDQLVEAAGFRKITQRVDEWGIFTVSLAQRIQ

SEQ ID NO: 20155 - DNA, 1764 bp, Yersinia pseudotuberculosis IP 32953
  CDS (1)..(1764): transl_table=11
atgagtcaggaagtgcgtttatttcaagaaggcatgttcaccgccagcgatgaaacatcgttgtattttcgccactggtctgccacggaaggtaacagcaagaaagttattgtgttgtttcatcgcgggcatgaacactcggggcgtctgcaacatattgtggatgaactgatgatgcccgatacccatttttacgcgtgggatgcgcgtggacacgggcagtcgccaggggctcgtggctacagccccagccttgctcgctcggttttagacgtggatgagtttgtgcgttttgtggcacaggatgcgcaggtcaacctcgacgatatcgtggtgattgcgcaaagcgtgggggccgtgctggtatcaacctgggttcatgactacgcgccgaaaatccgtggcatggtgctggcgtccccggcatttaaggtcaagctgtatgtgccgtttgcccgcctggggctgggattaatgcagcgtatacgtggcctgttttacgtgacttcctacgtgaaagggaaattcctcagccacgaccccgagcgcatcgccagctttgagcaggacaaattaatcacgcgccagatcgccgtcaatattttgctcgatctctacaaaacggctgaacgtattgtttcagactcgacggcgattactctcccgacccagttgcttatttccggcgatgattttgtggtgcatgagaaaccgcaaaaacaattttatgccggtcttcgcagcgcgataaaagagcaacatattctgccgggtttctatcacgacacgctgggtgaaaaagaccgctctattgcttttgataaaatgaaaaactttatcgaccgactctatgcaactgcgccttatgcctttgattatagccatgaagatcgctggagtccgagtgccgatgcgtatcgtgaattgcaggctccaccaaaatcacgctcgctggaagggatgttttatgctgcgctaagtttcggcatgaagaccatcgggcgacagtccaaagggatgcgcctgggttatgaaacaggttttgactccggcagtacgctggattacgtctatcgtaatcagcctgaaggtaatggcattctggggcgtatgattgaccacaactatctgaacagcgttggctggcgtggtattcgcgtgcgtaaagtgaatatccagcagatgattgaacaggccgttgcgaagattcagctcagtcacatgccggtgcgagtggtcgatatcgccgccggacatggccgctatgtgctggatgcactggaaaaacagcagggtatcgaaagtatactgctgcgtgattacagcgatttgaatgtagaaaaaggtcaggcgatgatcgaaaagcgtgggctaagccacgtcgctcagttcagaaaaggcaacgccttcgactatgattcccttgccacgctcgatcctgctccgacgctgggcattgtttccgggctgtatgagctcttcccggataacgacttaatcaaaacgtcgttggccgggctggctgcggctattccaccaggcggcatgctggtatacaccgggcaaccgtggcacccacagttaaaaaccatcgcgtataccttaaccagccatcaaaacgggatcccgtggatgatgcgtgtgcgcagccagaaagagatggacacgctggtggagcaggccggctttgaaaaatgtcatcaggtgattgatgagtttggcattttcaccgtgtcgctggcggtgagaaagcagcatggttga

SEQ ID NO: 20156 - protein, 587 aa, Yersinia pseudotuberculosis IP 32953
MSQEVRLFQEGMFTASDETSLYFRHWSATEGNSKKVIVLFHRGHEHSGRLQHIVDELMMPDTHFYAWDARGHGQSPGARGYSPSLARSVLDVDEFVRFVAQDAQVNLDDIVVIAQSVGAVLVSTWVHDYAPKIRGMVLASPAFKVKLYVPFARLGLGLMQRIRGLFYVTSYVKGKFLSHDPERIASFEQDKLITRQIAVNILLDLYKTAERIVSDSTAITLPTQLLISGDDFVVHEKPQKQFYAGLRSAIKEQHILPGFYHDTLGEKDRSIAFDKMKNFIDRLYATAPYAFDYSHEDRWSPSADAYRELQAPPKSRSLEGMFYAALSFGMKTIGRQSKGMRLGYETGFDSGSTLDYVYRNQPEGNGILGRMIDHNYLNSVGWRGIRVRKVNIQQMIEQAVAKIQLSHMPVRVVDIAAGHGRYVLDALEKQQGIESILLRDYSDLNVEKGQAMIEKRGLSHVAQFRKGNAFDYDSLATLDPAPTLGIVSGLYELFPDNDLIKTSLAGLAAAIPPGGMLVYTGQPWHPQLKTIAYTLTSHQNGIPWMMRVRSQKEMDTLVEQAGFEKCHQVIDEFGIFTVSLAVRKQHG

SEQ ID NO: 20157 - DNA, 1764 bp, Xanthomonas campestris pv. campestris str. 8004
  CDS (1)..(1764): transl_table=11
atgcgcacagttgtagagcgcgagttcgccagtttcgacggtgcgcccctgttttatcggcactggccggtgcaggccgctgccgatgccgcaacgccgcccaaggccgtggtgttgctgcaccgtgggcacgagcattccgggcgggtgatgcacctggccgaagaattgcagctgccggacgcgcagttctttgcctgggatgcgcgcggcaacgggcgctcgcccggcgcgcgcggcgacgcgcccggcttcgatgcgctagtgcgcgacctggacagtttcattgcgcacatcggtgccacccacggcatcgcggtgcaggacatcgtggtgatcgcgcagagcgtgggcgcggtggtggcatccacctgggtgcacgattacgcgccgccgctgcgcgcgctggtgctggcctcgccggcgttcaaggtcaagttgtatgtgccgtttgcacgcgcggggctggcgctgatgcaggcgctgcgcggcaacttcttcgtcaacagctatgtcaagccgcagtggctgacgcatgatccggcgcgcgtggacagctaccgtaccgatccgttgatcacccggccgatttcggtgcgtgtgctgctggggctgtatgcggcgggcgaccgcgtggtggccgatgcgcaggcgatcaccgtgccgacccagttgctggtctccggcgcggatttcgttgtgcatcgcggcccgcaggaccgcttctatgagaacctgcgctcgccgatcaagcaacggcattttctgcccgggttcttccacgacaccttgggtgagcgcgaccgtgcgatagcgattgcgcagatccgtcagttcgtcagcgagcgctttgcgcagccaccggtgcgcgcggacctgcgcgacgcgcatcgtgcgggaccgagtttcgaagaagccgaacgcctggcctggccgtcgcaacgcaacagcctgcaagacctgcgctggcgcggtgtgcgtgcgggcctgcggctgggtggcacattgtccgaaggcatcgcgctgggcctgcagaccggcttcgattccggcagcacgctggattacatctatcgcaaccaggcgcgtgggcgcgggccgctcggccgcatgatcgaccgcaattacctcaacgccatcggctggcgcggcatccgcatccgtggcgcgcatctgggcgaattgctgcgcgcaaccgccacccgcctgcgccaggccgggcaaccggtgcgcgtgttggacatcgctgccgggcatggccgctacgtgctggaagcgctgggcagcggcgcgcaacgcgccgatgcgatcgtgctgcgcgacttcagcccgctcaatgtcacccagggtgcggcgttgatccaggcgctgggtgcaggcgacatcgcgcgcttcgagcagggcgatgcgttcgatccagtctcggtgggcgcggtggacccggcgcccacgctggctgtggtgtcgggcctgtacgaactgtttgccgacaacgaccaggtggcgcgctcgctcgctggcgtggccgcggcggtgccgcccggcggctatctgctctacaccgggcagccctggcatccgcagctggaattcattgcgcgcgcactcaccagtcatcgcgatggcgtggcctgggtgatgcgccggcgcagccagcaggagatggacggcctggtggaagcggccgggtttcgcaaggtggaccagcgcatcgacgcgttcggcatcttcaccgtgtcgctggcgcagcggatcaacgcatga

SEQ ID NO: 20158 - protein, 587 aa, Xanthomonas campestris pv. campestris str. 8004
MRTVVEREFASFDGAPLFYRHWPVQAAADAATPPKAVVLLHRGHEHSGRVMHLAEELQLPDAQFFAWDARGNGRSPGARGDAPGFDALVRDLDSFIAHIGATHGIAVQDIVVIAQSVGAVVASTWVHDYAPPLRALVLASPAFKVKLYVPFARAGLALMQALRGNFFVNSYVKPQWLTHDPARVDSYRTDPLITRPISVRVLLGLYAAGDRVVADAQAITVPTQLLVSGADFVVHRGPQDRFYENLRSPIKQRHFLPGFFHDTLGERDRAIAIAQIRQFVSERFAQPPVRADLRDAHRAGPSFEEAERLAWPSQRNSLQDLRWRGVRAGLRLGGTLSEGIALGLQTGFDSGSTLDYIYRNQARGRGPLGRMIDRNYLNAIGWRGIRIRGAHLGELLRATATRLRQAGQPVRVLDIAAGHGRYVLEALGSGAQRADAIVLRDFSPLNVTQGAALIQALGAGDIARFEQGDAFDPVSVGAVDPAPTLAVVSGLYELFADNDQVARSLAGVAAAVPPGGYLLYTGQPWHPQLEFIARALTSHRDGVAWVMRRRSQQEMDGLVEAAGFRKVDQRIDAFGIFTVSLAQRINA

SEQ ID NO: 20159 - DNA, 1758 bp, Pseudomonas fluorescens Pf-5
  CDS (1)..(1758): transl_table=11
atgcgcgacgctcaacaccagacgttccgaacccatgacggtgtcgaactgttctaccgccactggccagccactgaagtggcccctggcgaaccgcggcaagcggtgatgctgttccaccgcggtcacgaacactccgggcgcattgcccacctggtggaagagctgaacctgccccagttcgatttcttcgcctgggacgcccgtggccatggccagtcgccgggcgcccgtggcgacagcccgagcttcgctaccagcgtgcgcgacgtgcagaccttctgtgatcacctgggcagcgctcatgggatcgccgaggaaaacatcgccgtggtggcccagagtgtgggcgcggtgatcgcgtccacctgggtccacgactacgcgccgcgcatccgctccctggtgctggcctcgccggcgttcaaggtcaagctgtacgtgcccttcgcccggcccggcctggccctgatgcggcgctttcgtggcaacttcttcgtcaacagctacgtcaaggcgcgcttcctgagccacgacccggagcgggtccgcagctatgacagcgacccgctgatcaccaaggcgatctcggtgaatgtactgctgggcctgtatgaagcggcagaccgggtggtagccgacgcccaggcgatccaggtgccgacccagttgctgatctccggctccgacttcgtggtgcatcgcaagccccaggagcagttcttcgagcgcctgggcagcctgcacaaggaaaagcacatcctcccgggcttcttccacgacaccctgggggaaaagaaccgggcgccggccatggccagcatccgtcgcttcatcctgcagaatttcgagcgcccgctgaaccgccctgccctgctggacgccgaccgcctgggcgttacctgcgccgagtccgaagccctggccgcgccgctgccgcacaattccctgcgcgacctgtactggcgcgccacccgcgccagcatgcgcctgggcagccagctgtcggcgggggtcaagctgggcttcgacaccggtttcgactccggcagcaccctggactacgtctaccgcaaccgccccaccgggcattccgcactgggccggatgatcgaccagaactacctgaactccatcggctggcgcggcatccgccagcgcaagctgcatgtggaagaactgctgcgcctggccatggaaaaactccgtgagcaaaacagcgaagtgcgcatcgtcgatatcgccgccggccacggccgctacatcctcgaagccctgcaaggggtcagcccgctgccggaatcgatcctgctgcgcgactacagcgatatcaacgtgcgcgacggcagtgcgctgatccaggaaaaaggcctgggggacatcgcccgcttcgtcaaaggcaacgccttcgaccgcgaggacctcgcagccctggacccgaaacccaccctggcggtggtctccgggctctatgagctgttcgccgacaaccagatggtcggcggctccctggcgggcctggccagtgccgtggagcccggcggctacctggtgtacaccggccagccgtggcacccgcagctggaactgatcgcccgcgccctgaccagccaccgcgaaggccaggcctgggtcatgcgccgccgcacccaggcggagatggaccaactggtggaggccgccggctttcgcaaggtcaccatgcgtgtggatgaatgggggattttcagcgtatccctggcgcaacgggtgcaatga

SEQ ID NO: 20160 - protein, 585 aa, Pseudomonas fluorescens Pf-5
MRDAQHQTFRTHDGVELFYRHWPATEVAPGEPRQAVMLFHRGHEHSGRIAHLVEELNLPQFDFFAWDARGHGQSPGARGDSPSFATSVRDVQTFCDHLGSAHGIAEENIAVVAQSVGAVIASTWVHDYAPRIRSLVLASPAFKVKLYVPFARPGLALMRRFRGNFFVNSYVKARFLSHDPERVRSYDSDPLITKAISVNVLLGLYEAADRVVADAQAIQVPTQLLISGSDFVVHRKPQEQFFERLGSLHKEKHILPGFFHDTLGEKNRAPAMASIRRFILQNFERPLNRPALLDADRLGVTCAESEALAAPLPHNSLRDLYWRATRASMRLGSQLSAGVKLGFDTGFDSGSTLDYVYRNRPTGHSALGRMIDQNYLNSIGWRGIRQRKLHVEELLRLAMEKLREQNSEVRIVDIAAGHGRYILEALQGVSPLPESILLRDYSDINVRDGSALIQEKGLGDIARFVKGNAFDREDLAALDPKPTLAVVSGLYELFADNQMVGGSLAGLASAVEPGGYLVYTGQPWHPQLELIARALTSHREGQAWVMRRRTQAEMDQLVEAAGFRKVTMRVDEWGIFSVSLAQRVQ

SEQ ID NO: 20161 - DNA, 1776 bp, Ralstonia eutropha JMP134
  CDS (1)..(1776): transl_table=11
gtggaacgtacgccgatcgagtcctcgtttgccacccatgacgggcaggaactgttctaccggcactggccggctgcgagtcgtcagccacgcggtgccgtgctgctgttccaccgcggacatgaacattccgggcgcgttgcgcatcttgtggacgagttggacttgcctgaccatgccttcttcgcgtgggatgcacgcggccacgggcgctcgcccggcgagcgtggctacagcccgggactcgcctgttcggtgcgcgatatccagaccttcgtcgaccatatcgcgaccatgcatggtatcggcgtggatcgcattgccgtggtggcgcaaagcgtcggtgccgtgcttgctgcgacctgggtgcacgactatgcgccgcgcatccgctgtctggtcgtggcgtcaccggcgttcaaggtcaagctctacgtgccattcgcgcggcccggcctgaagctgatgcagcagatgcgcggcaagttcttcgtcaacagctacgtcaaggcgaaattcctgacacacgatccgcagcgcgtggccagctacaacgctgatccgctcattactcggccaatcgcggtcaatatgctgctcgatctctacgatgccggcgagcgcatcgtggccgatgcagcggcgattacggttcccacgcaactgctgatttccggcgcggactgggtcgtgcatcgtggtccgcaggacgcgttcttcgatcggctgggggcgcgcgtgaaggagcgcatcgtgctcgatggtttctaccacgacacgcttggcgaacgcgatcgcgcatccgccgtggccgccgcgcggcgtttcatcgttcgcgagttcgatacaccgtcggagccggtgtcgctgctgggcgccgaccggcgggggcctttcaaggacgaggccgaccggctcgccgtgccgctgtccgctggcagtcctgcgggcctgtattggggcatggtgcgtggagggctgcgctttggcggcatgttgtccgaaggcgtacggctcggccaccagaccggttttgattcgggttcgacgctcgactacgtctatcgcaacaaggcgacgggccgcttcggcattggccaggcggtcgaccgcaactacctggacgcgattggctggcgtggcatccggcagcgcaagctgcatgtcgaggaactgatcggcgaggccattcgccgcctgcaggccatgggcgagccggtgcgcatcgtggatattgccgccggccacgggcgttatgtgctggaggcgctgacctcgcaaagcggcaacatcgacggcaacgcggtggagagcatcctgctgcgtgactacagcgacctcaatgtcgagcagggacggaacctgatccgccgcaagggcctcgatccgatcgcgcgcttcgaaaagggcgatgcgttcgatggcgacagccttgccgcgctgaatccggcgccgacgctggccatcgtttccgggctctatgaactgttcggggacaacgagatggtcggatgctcgctgcgcggactggcacaggcggtgcgtcccggcggctatctggtctatacgggacagccgtggcatccgcaactcgagttcatcgcacgcgcgctaaccagccaccgtgccggatccgcgtgggtcatgcgccgccgctcgcaggccgagatggatgaactcgtgcgccacgccggtttcgaaaagctcgcgcagcgcatcgacccgtggggcatcttcacggtcagcctggcgcgccggaaaggcgagggcgcctga

SEQ ID NO: 20162 - protein, 591 aa, Ralstonia eutropha JMP134
MERTPIESSFATHDGQELFYRHWPAASRQPRGAVLLFHRGHEHSGRVAHLVDELDLPDHAFFAWDARGHGRSPGERGYSPGLACSVRDIQTFVDHIATMHGIGVDRIAVVAQSVGAVLAATWVHDYAPRIRCLVVASPAFKVKLYVPFARPGLKLMQQMRGKFFVNSYVKAKFLTHDPQRVASYNADPLITRPIAVNMLLDLYDAGERIVADAAAITVPTQLLISGADWVVHRGPQDAFFDRLGARVKERIVLDGFYHDTLGERDRASAVAAARRFIVREFDTPSEPVSLLGADRRGPFKDEADRLAVPLSAGSPAGLYWGMVRGGLRFGGMLSEGVRLGHQTGFDSGSTLDYVYRNKATGRFGIGQAVDRNYLDAIGWRGIRQRKLHVEELIGEAIRRLQAMGEPVRIVDIAAGHGRYVLEALTSQSGNIDGNAVESILLRDYSDLNVEQGRNLIRRKGLDPIARFEKGDAFDGDSLAALNPAPTLAIVSGLYELFGDNEMVGCSLRGLAQAVRPGGYLVYTGQPWHPQLEFIARALTSHRAGSAWVMRRRSQAEMDELVRHAGFEKLAQRIDPWGIFTVSLARRKGEGA

SEQ ID NO: 20163 - DNA, 1713 bp, Fusobacterium nucleatum subsp. vincentii ATCC 49256
  CDS (1)..(1713): transl_table=11
ttgggaggagacatggaaaatttattttttaatacttttgatggaaataaaattttttatagagtatggaattttgaaaaaaataaaaaaactttaattattattcatagagggcatgaacattcagagagattaagtgaattaacacaagatgaaaaatttttaaaatataatatttttgcttatgatttaagaggacatggctatacagaagctaagacttctcctaatgctatggattatgttagagatttagatttttttgtaaaacatataaaaagtgaatatcaaataaaagaagaagatatttttattgtagcaaatagcataggtggtgttatactttctgcctatgttcatgattttgcaccaaatatagcaggtattgcattacttgcacctgcttttgaaataaaactttatattccttttgcaaaacaacttataacattacttactaaaataaaaaaagatgctaaggttatgagttatgttaaagcaaaagttttaactcatgatgttgaagaacaaaataaatataataatgataaacttataaataaagaaattaatgccaaacttttaattgatttagctaatatgggcaaaagattggttgaagattctatggcaatagaactacctacaataatattttctgctgaaaaagactatgttgtaaaaaattctgcacaaaagaaattctttttaaatttatcatctaaaaaaagagaatttatagaacttgaaaatttttatcatggaataatttttgaaaaagaaaggcaaaaagtatataaaatgttggatgattttatacaagatgttttcaaaaataaaaatattacacttgatgtttctcccagagaattttcaagaaaggagtatgaaaggatagccttaggagaatatcctctaagtgaaaaaatattttattctatacaaaaattttcaatgaaaacttttggatttttaagtaaaggtatgagtttaggattaagatatggctttgactctggaatttctcttgattatatttataaaaatcaagctgatgaaaaattattactaggaaaatttatagatagattttatctaaatcaaattggctgggcaggtgttagggaaaggaaaaagaacttgcttactttaatagaagaaaagataaataatttaggtgaagaaaatgttaaaatcttagatgttgctggtggaactgggaattatttatttgatataaaagaaaaatatccaaagatacatattttaataaatgagtttaaaaaatcaaatattgaagttggagaagaagttattaagaaaaataattggaaaaatatatcttttgtaaactatgactgttttgatagagagacttataaaaaaatagattacacacctaatatagttataatctcaggagtttttgagctttttgaagataataatatgcttgaaaatactatttcaggagtagcagaaattttagagaaaaatggtgctgttatttacacaggtcagccttggcaccctcaattaaagcaaatagccttagttcttaatagccataaaggaaacgataaatcttggcttatgagaagaagaagtgaaaaagagctagatggtttatttgaaaaatataatttgaataaagaaaaaatgctaattgataataatggaatttttacagtttcattagcagaattgaggtag

SEQ ID NO: 20164 - protein, 570 aa, Fusobacterium nucleatum subsp. vincentii ATCC 49256
MGGDMENLFFNTFDGNKIFYRVWNFEKNKKTLIIIHRGHEHSERLSELTQDEKFLKYNIFAYDLRGHGYTEAKTSPNAMDYVRDLDFFVKHIKSEYQIKEEDIFIVANSIGGVILSAYVHDFAPNIAGIALLAPAFEIKLYIPFAKQLITLLTKIKKDAKVMSYVKAKVLTHDVEEQNKYNNDKLINKEINAKLLIDLANMGKRLVEDSMAIELPTIIFSAEKDYVVKNSAQKKFFLNLSSKKREFIELENFYHGIIFEKERQKVYKMLDDFIQDVFKNKNITLDVSPREFSRKEYERIALGEYPLSEKIFYSIQKFSMKTFGFLSKGMSLGLRYGFDSGISLDYIYKNQADEKLLLGKFIDRFYLNQIGWAGVRERKKNLLTLIEEKINNLGEENVKILDVAGGTGNYLFDIKEKYPKIHILINEFKKSNIEVGEEVIKKNNWKNISFVNYDCFDRETYKKIDYTPNIVIISGVFELFEDNNMLENTISGVAEILEKNGAVIYTGQPWHPQLKQIALVLNSHKGNDKSWLMRRRSEKELDGLFEKYNLNKEKMLIDNNGIFTVSLAELR

SEQ ID NO: 20165 - DNA, 1791 bp, Ralstonia eutropha JMP134
  CDS (1)..(1791)
atggagacgcactgcgtggaacgtacgccgatcgagtcctcgtttgccacccatgacgggcaggaactgttctaccggcactggccggctgcgagtcgtcagccacgcggtgccgtgctgctgttccaccgcggacatgaacattccgggcgcgttgcgcatcttgtggacgagttggacttgcctgaccatgccttcttcgcgtgggatgcacgcggccacgggcgctcgcccggcgagcgtggctacagcccgggactcgcctgttcggtgcgcgatatccagaccttcgtcgaccatatcgcgaccatgcatggtatcggcgtggatcgcattgccgtggtggcgcaaagcgtcggtgccgtgcttgctgcgacctgggtgcacgactatgcgccgcgcatccgctgtctggtcgtggcgtcaccggcgttcaaggtcaagctctacgtgccattcgcgcggcccggcctgaagctgatgcagcagatgcgcggcaagttcttcgtcaacagctacgtcaaggcgaaattcctgacacacgatccgcagcgcgtggccagctacaacgctgatccgctcattactcggccaatcgcggtcaatatgctgctcgatctctacgatgccggcgagcgcatcgtggccgatgcagcggcgattacggttcccacgcaactgctgatttccggcgcggactgggtcgtgcatcgtggtccgcaggacgcgttcttcgatcggctgggggcgcgcgtgaaggagcgcatcgtgctcgatggtttctaccacgacacgcttggcgaacgcgatcgcgcatccgccgtggccgccgcgcggcgtttcatcgttcgcgagttcgatacaccgtcggagccggtgtcgctgctgggcgccgaccggcgggggcctttcaaggacgaggccgaccggctcgccgtgccgctgtccgctggcagtcctgcgggcctgtattggggcatggtgcgtggagggctgcgctttggcggcatgttgtccgaaggcgtacggctcggccaccagaccggttttgattcgggttcgacgctcgactacgtctatcgcaacaaggcgacgggccgcttcggcattggccaggcggtcgaccgcaactacctggacgcgattggctggcgtggcatccggcagcgcaagctgcatgtcgaggaactgatcggcgaggccattcgccgcctgcaggccatgggcgagccggtgcgcatcgtggatattgccgccggccacgggcgttatgtgctggaggcgctgacctcgcaaagcggcaacatcgacggcaacgcggtggagagcatcctgctgcgtgactacagcgacctcaatgtcgagcagggacggaacctgatccgccgcaagggcctcgatccgatcgcgcgcttcgaaaagggcgatgcgttcgatggcgacagccttgccgcgctgaatccggcgccgacgctggccatcgtttccgggctctatgaactgttcggggacaacgagatggtcggatgctcgctgcgcggactggcacaggcggtgcgtcccggcggctatctggtctatacgggacagccgtggcatccgcaactcgagttcatcgcacgcgcgctaaccagccaccgtgccggatccgcgtgggtcatgcgccgccgctcgcaggccgagatggatgaactcgtgcgccacgccggtttcgaaaagctcgcgcagcgcatcgacccgtggggcatcttcacggtcagcctggcgcgccggaaaggcgagggcgcctga

SEQ ID NO: 20166 - protein, 596 aa, Ralstonia eutropha JMP134
METHCVERTPIESSFATHDGQELFYRHWPAASRQPRGAVLLFHRGHEHSGRVAHLVDELDLPDHAFFAWDARGHGRSPGERGYSPGLACSVRDIQTFVDHIATMHGIGVDRIAVVAQSVGAVLAATWVHDYAPRIRCLVVASPAFKVKLYVPFARPGLKLMQQMRGKFFVNSYVKAKFLTHDPQRVASYNADPLITRPIAVNMLLDLYDAGERIVADAAAITVPTQLLISGADWVVHRGPQDAFFDRLGARVKERIVLDGFYHDTLGERDRASAVAAARRFIVREFDTPSEPVSLLGADRRGPFKDEADRLAVPLSAGSPAGLYWGMVRGGLRFGGMLSEGVRLGHQTGFDSGSTLDYVYRNKATGRFGIGQAVDRNYLDAIGWRGIRQRKLHVEELIGEAIRRLQAMGEPVRIVDIAAGHGRYVLEALTSQSGNIDGNAVESILLRDYSDLNVEQGRNLIRRKGLDPIARFEKGDAFDGDSLAALNPAPTLAIVSGLYELFGDNEMVGCSLRGLAQAVRPGGYLVYTGQPWHPQLEFIARALTSHRAGSAWVMRRRSQAEMDELVRHAGFEKLAQRIDPWGIFTVSLARRKGEGA

SEQ ID NO: 20167 - DNA, 1761 bp, Pseudomonas aeruginosa UCBPP-PA14
  CDS (1)..(1761)
atgcgcgacgtacaggaattgcgtttcaccacccacgacggggtagaactcttctaccgccactggccggccagccgcccggcgccggacggcacgcgccaggcggtgttgctgttccaccgcggccatgagcactccgggcggatcgcccacctggtcgacgaactcgacctgccggaacacgacttcttcgcctgggacgcccgtggccacggcctctcgccaggcgcccgcggcgacagcccgagcttcgccaccagcgtgcgcgacgtacagaccttcgtcgaccatatccaggccgtccacggtatcgccgaagagcggatggcggtggtggcgcagagcgtcggcgcggtgctggttgccacctgggcccacgactacgcgccgaaggtgcgcgcactggtgctggcttcgccggcgttccaggtcaagctctacgtgccgttcgcccgcagcgggctgaaactgatgcgcctgtggcgcggcaatttcttcgtcaacagctatgtcaaggcacgcttcctcagtcacgacccgcagcggatcgcctcctacgacagcgacccgctgatcgccaaggcgatctcggtgaacgtcctgctcggcctctacgaagctgccgagcgggtggtagcggacgcacaggcgatccagattcccacccaactgctgatttccggggccgacttcgtcgtccatcgtgcgccgcaggagcgcttcttcgagcgtctcggcagcctgcgcaaggaaaagcacatcctgcccggcttcttccacgacacccttggcgagcgcgatcgtcacctggccgtcggccgtgcccggcgcttcctcctcgaggcattcgccacggtccccgaacgaccgagcctgctcgatgccgaccgcctgggtcatacctgcgccgaggccgaggcgctggccgcgccgttgccgaagaactcgccgcgcgatctctactggcgcgccacccgtgccggcctgcgcctgggcagcctgtggtcggacggggtcaagctgggcttcgacaccggtttcgattccgggagcaccctcgactatgtctaccgcaaccagcccagcggcagcggcccgctgggtcgcctgatcgaccgcaactacctggactccatcggctggcgcggcatccgccagcgcaagctgcacgccgaggagctgctgcgcctggccatgcagcggttgcgcgaggagcagcgcgaggtgcgcatcgtcgacatcgccgccggccacggccgctacatcctcgaagccctgcaaggcgtcgagccgctgccggaaagcatccttctgcgcgactacagcgagatcaacgtgcgtgacggcagcgccctgatcgaaagcaagggcctcgccggcatcgcccgctttgtcaagggcgacgccttcgatcgcgccgacctggcggcgctgcaaccgaagccgagcctcggggtggtttccgggctctacgagctgttcgccgacaaccgcatggtcggcgactccctcgccggcctcggcgaggcgctggaggagggcgcctacctggtctacaccggacagccctggcacccgcagctggaactgatcgcccgcgcgctgaccagccaccgccagggccaggcctgggtgatgcggcgccggacccaggcggaaatggaccagctggtggccgccgccggcttccgcaagatcacccagcgggtcgaccagtggggcatcttcagcgtatcgctggcgcagaaggtcgcccgctga

SEQ ID NO: 20168 - protein, 586 aa, Pseudomonas aeruginosa UCBPP-PA14
MRDVQELRFTTHDGVELFYRHWPASRPAPDGTRQAVLLFHRGHEHSGRIAHLVDELDLPEHDFFAWDARGHGLSPGARGDSPSFATSVRDVQTFVDHIQAVHGIAEERMAVVAQSVGAVLVATWAHDYAPKVRALVLASPAFQVKLYVPFARSGLKLMRLWRGNFFVNSYVKARFLSHDPQRIASYDSDPLIAKAISVNVLLGLYEAAERVVADAQAIQIPTQLLISGADFVVHRAPQERFFERLGSLRKEKHILPGFFHDTLGERDRHLAVGRARRFLLEAFATVPERPSLLDADRLGHTCAEAEALAAPLPKNSPRDLYWRATRAGLRLGSLWSDGVKLGFDTGFDSGSTLDYVYRNQPSGSGPLGRLIDRNYLDSIGWRGIRQRKLHAEELLRLAMQRLREEQREVRIVDIAAGHGRYILEALQGVEPLPESILLRDYSEINVRDGSALIESKGLAGIARFVKGDAFDRADLAALQPKPSLGVVSGLYELFADNRMVGDSLAGLGEALEEGAYLVYTGQPWHPQLELIARALTSHRQGQAWVMRRRTQAEMDQLVAAAGFRKITQRVDQWGIFSVSLAQKVAR

SEQ ID NO: 20169 - DNA, 1758 bp, Burkholderia cepacia R18194
  CDS (1)..(1758)
atggcccgcgaggccgacttcatcacgcacgacggcgaaacgctgttctatcgtcactggcccgccacgggcgcgcgctgccgcggcgcaatcgtgttgctgcatcgcggccacgaacactcggcgcgcgtcgcgcacctcgtcgacgagctcgacctgcccgatttcgcattcttcgcgtgggatgcgcgcggccacggccgctcgcccggcgcgcgcggctacagcccgagcgcggccgcgtcggtgcgcgacctgcagaccttcgttgaacatatccgcgacacgcacggcatcgcgatcgaggacatggccgtggtcggccagagcgtcggcgcggtgctcgcggccacctgggcgcacgattatgcgccgccgatccgcgcgctcgtcgtcgcgtcgccggcgttccacatcaagctctacgtaccgttcgcgcggccgggcctgcggctgatgcacaagctgcgcgggctgttctacgtgaacagctacgtgaagccgaaattcctcacgcacgatcccgagcggatcgcgagctatgcgtccgacccgctgatcacgcggccgatcgcggtcaacatgctgctcgacctgcacgataccgcgcagcggatcgtcgccgacgcggccgcgatcaccgtgccgacgcagctgctgatctcgggcgccgactgggtcgtgcatcgcggcccgcaggaccgcttcttcgagcgcctcggcgccgcgcgcaaggagcgcatcgtgctgccgggcttctatcacgacacgctcggcgaacgcgaccgcgcgcaggcgctcgcaccgctgcgtgcattcgtgctgcgggaattcgatgcgccgagcccgcgcgtgtcgctcgccgacgccgaccggcgcggcgcgttccacgacgaatacgcggcgctcggccgcccgcccgcgaatgcgttcgcgcgggcgtactgggcgctcacgcgcgccggcctgaaggccggcggcgcgctgtcggacggcatcgcgctcgggctgcggctcggcttcgattcgggctcgacgctcgactacgtgtaccgcaaccgcgcgcaggggcgtctcggcgtcggcgcgctgatcgatcgcacctatctcgattcgccaggctgggtcggcatccgccagcgcaaggtgcatctgcaggaactgatcggcgcggcgatcggccgcctgcgcggccacggcgcgccggtgcggatcgtcgacatcgcggccgggcacgggcgctacgtgctcgacgcgatcgcgtcggccgccgagcgcgacggcgcggcgcccgacgacatcacgctgcgcgactacagcccgccgaacgtcgaggccgggcgcgtgctgattgcgcagcgcggcctcgatccgattgcgcgcttcgagcgcggcgacgcgttcgacgaggcgtcgctcgcgacgctcgagccgcgtccgacgctcgcgatcgtgtcgggcctctacgagctgttcggcgagaacgcgctgatcgagcgctcgctgcgcgggctcgcgcaggccgtgccgccgggcggctatctcgtctatacggggcagccgtggcatccgcagctcgaattcatcgcgcgcgcgctgaacaatcaccgcggcgaagcgacctgggtgatgcgccggcgctcgcaggccgagatggacgaactcgtcgcgcgcgcgggcttccgcaagctcgaccagcggatcgacgaaatgggcatcttcacggtcagcctcgcgcagcgggtcgacgcgtcatga

SEQ ID NO: 20170 - protein, 585 aa, Burkholderia cepacia R18194
MAREADFITHDGETLFYRHWPATGARCRGAIVLLHRGHEHSARVAHLVDELDLPDFAFFAWDARGHGRSPGARGYSPSAAASVRDLQTFVEHIRDTHGIAIEDMAVVGQSVGAVLAATWAHDYAPPIRALVVASPAFHIKLYVPFARPGLRLMHKLRGLFYVNSYVKPKFLTHDPERIASYASDPLITRPIAVNMLLDLHDTAQRIVADAAAITVPTQLLISGADWVVHRGPQDRFFERLGAARKERIVLPGFYHDTLGERDRAQALAPLRAFVLREFDAPSPRVSLADADRRGAFHDEYAALGRPPANAFARAYWALTRAGLKAGGALSDGIALGLRLGFDSGSTLDYVYRNRAQGRLGVGALIDRTYLDSPGWVGIRQRKVHLQELIGAAIGRLRGHGAPVRIVDIAAGHGRYVLDAIASAAERDGAAPDDITLRDYSPPNVEAGRVLIAQRGLDPIARFERGDAFDEASLATLEPRPTLAIVSGLYELFGENALIERSLRGLAQAVPPGGYLVYTGQPWHPQLEFIARALNNHRGEATWVMRRRSQAEMDELVARAGFRKLDQRIDEMGIFTVSLAQRVDAS

SEQ ID NO: 20171 - DNA, 1770 bp, Burkholderia vietnamiensis G4
  CDS (1)..(1770): transl_table=11
atgagcgcacgcacggcccgcgaggccgacttcatcgcgcacgacggcaccgcgctgttctatcgtcactggcccgccaccgcgccgcgctgccgcggcgcgatcgtgctgctgcatcgcggtcacgagcattcggcgcgtgtagcgcacctcgtcgacgagctcgacctgcccgacttcgcgttcttcgcatgggacgcgcgcggccacggccgctcgcccggcacgcgcggctacagtccgggcgcggccgcgtcggtgcgcgatctgcagagcttcgtcgagcacattcgcgacacgcacggcgtcgcgatcgaggacatcgccgtcgtcggacagagcgtcggcgcggtgctcgcagccgcgtgggcgcacgactatgcgccgccgatccgctgcctcgtgctcgcgtcgcccgcgttccacatcaagctgtacgtaccgttcgcgcggccgggcttgcggctgatgcacaagctgcgcggcctgttctacgtgaacagctacgtgaagccgaaattcctcacgcacgacccgcagcggatcgcgagctatgcggccgatccgctggtcacgcggccgatcgcggtcaacatgctgctcgatctgcacgacaccgcgcagcggatcgtcgccgatgcggccgcgatcacggtgccgacccagctgctgatctcgggcgccgactgggtcgtgcatcgcgctccgcaggatcgcttcttcgagcggctcggcgccgcgcgcaaggagcgcatcgtgctgccgggcttctatcacgatacgctcggcgagcgcgaccgcacgcaggcgctcgcgccgctgcgcgcgttcgtgctgcgcgaattcgacacgccgggcccgcgcgtgtcgctcgccgacgccgaccggcgcggcgcgttccatgacgaatacgtggcgctccgcgccgcgccggcgagcccgttcgcgcgcgcgtactgggcgttcgtgcgggccggcctgaaggcgggcggcgcactgtcggacggcatcgcgctcgggctgcggctcggcttcgattcgggctcgacgctcgactacgtgtaccgcaatcgcgcgcaggggcgcttcggcatcggcgcgctgatcgatcgcacctatctagactcgccgggctgggccggcattcgccggcgcaagctgcacctgcaggagctgatcggtgcggcgatcggccggctgcgcagccggggcgaaccggtgcgcatcgtcgacatcgcggccggccacgggcgctacgtgctcgacgcgatcgcgacggccgccgagcgcgacggcgcggcgcccgacgacatcctgctgcgcgactacagcgcgccgaacgtcgatgccgggcgcgtgctgatcgcgcagcgcggcctcgagccgatcgcgcgcttcgagcgcggcgatgcgttcgacgacgcgtcgctcgcgacgctcgaaccgcgtccgacgctcgcgatcgtgtcgggactgtacgagctgttcggcgacaacgcgctcgtcgagcgctcgctgcgcgggctcgcgcaggccgtgccgcccggcgggtatctcgtctatacggggcagccgtggcatccgcagctcgaattcatcgcgcgcgtgttgaacaatcaccgcggcgaggcgacgtgggtgatgcgccgccgctcgcaggccgagatggacgagctcgtcgcgcgcgcgggctttcgcaagctcgaccagcgcatcgacgcgatgggcatcttcacggtcagcctggcccagcgggtcgacgcgcaatga

SEQ ID NO: 20172 - protein, 589 aa, Burkholderia vietnamiensis G4
MSARTAREADFIAHDGTALFYRHWPATAPRCRGAIVLLHRGHEHSARVAHLVDELDLPDFAFFAWDARGHGRSPGTRGYSPGAAASVRDLQSFVEHIRDTHGVAIEDIAVVGQSVGAVLAAAWAHDYAPPIRCLVLASPAFHIKLYVPFARPGLRLMHKLRGLFYVNSYVKPKFLTHDPQRIASYAADPLVTRPIAVNMLLDLHDTAQRIVADAAAITVPTQLLISGADWVVHRAPQDRFFERLGAARKERIVLPGFYHDTLGERDRTQALAPLRAFVLREFDTPGPRVSLADADRRGAFHDEYVALRAAPASPFARAYWAFVRAGLKAGGALSDGIALGLRLGFDSGSTLDYVYRNRAQGRFGIGALIDRTYLDSPGWAGIRRRKLHLQELIGAAIGRLRSRGEPVRIVDIAAGHGRYVLDAIATAAERDGAAPDDILLRDYSAPNVDAGRVLIAQRGLEPIARFERGDAFDDASLATLEPRPTLAIVSGLYELFGDNALVERSLRGLAQAVPPGGYLVYTGQPWHPQLEFIARVLNNHRGEATWVMRRRSQAEMDELVARAGFRKLDQRIDAMGIFTVSLAQRVDAQ

SEQ ID NO: 20173 - DNA, 1770 bp, Burkholderia cenocepacia AU 1054
  CDS (1)..(1770): transl_table=11
atgagcgcacgcacggcccgcgaggccgacttcatcacgcacgacggcgaaacgctgttctatcgtcactggcccgcgacgggcgcacgctgccgcggcgccatcgtgctgctgcatcgcgggcacgaacactcggcgcgcgtcgcgcacctcgtcgacgagctcgacctgccggatttcgcgttttttgcgtgggacgcacgcggccacggccgctcgccgggcgcgcgtggctacagcccgagcgcggccgcgtcggtgcgcgacctgcagaccttcgtcgagcatatccgcgacacgcacggcatcgcgatcgaggagatggcggtagtcggccagagcgtcggcgcggtgctcgcggcgacctgggtacacgactacgcgccgccgatccgcgcgctcgtggtcgcgtcgccggcgttccacatcaagctctacgtgccgttcgcgcggccggggctgcggctgatgcacaagctgcgcgggctgttctacgtgaacagctacgtgaagccgaaattcctcacgcacgatcccgagcggatcgcgagctacgcgtccgatccgctgatcacgcggccgatcgcggtcaacatgctgctcgacctgcacgataccgcgcagcgcatcgtcgccgacgcggccgcgatcaccgtgccgacgctgttgctgatctcgggcgccgactgggtcgtgcatcgcggcccgcaggaccgcttcttcgagcggctcggcgcggcgcgcaaggagcgcatcgtgctgccgggcttctatcacgacacgctcggcgagcgcgaccgcgcgcaggcgctcgcgccgctgcgggcgttcgtgctgcgcgagttcgatgcgccgagcccgcgcgtgtcgctcgccgatgccgaccggcgcggcgcgttccatgacgaatacgcggcgctctcccggccgccggcgaacgtgttcgcacgggcgtactgggcgctcacgcgcgccggcctgaaagccggcggcgcgctgtcggacggcatcgcgctcgggttgcggctcggcttcgattcgggctcgacgctcgactacgtgtaccgcaaccgcgcgcaggggcggctgggcatcggcgcgctgatcgaccgcacgtatctcgattcgccgggctgggtcggcatccgccagcgcaaggtgcatctgcaggagctgatcggcgcggcgatcggccggctgcgcgggaacggcacgccggtgcggatcgtcgacatcgccgccggccacgggcgctacgtgctcgatgcgatcgcgctggccgccgagcgcgatggcgcggcgcccgacgacatcacgctgcgcgactacagtccgccgaacgtcgaggccgggcgcgtgctgatcgcgcagcgcggcctcgagccgatcgcgcgcttcgagcgcggcgacgcgttcgacgaggcgtcgctcgcgacgctcgagccgcggccgacgctggcgatcgtgtcgggcctgtacgagctgttcggcgagaacgcgctgatcgagcgctcgctgcgcgggctcgcgcaggccgtaccgccgggcggctatctcgtctatacggggcagccgtggcatccgcagctcgaattcatcgcgcgtgcgctgaacaaccatcgcggcgagtcgacctgggtgatgcgtcgccgttcgcaggccgaaatggacgaactcgtcgcgcgggcggggttccgcaagctcgaccagcggatcgacgagatgggcatcttcacggtcagcctcgcgcagcgggtcgatgcgtcatga

SEQ ID NO: 20174 - protein, 589 aa, Burkholderia cenocepacia AU 1054
MSARTAREADFITHDGETLFYRHWPATGARCRGAIVLLHRGHEHSARVAHLVDELDLPDFAFFAWDARGHGRSPGARGYSPSAAASVRDLQTFVEHIRDTHGIAIEEMAVVGQSVGAVLAATWVHDYAPPIRALVVASPAFHIKLYVPFARPGLRLMHKLRGLFYVNSYVKPKFLTHDPERIASYASDPLITRPIAVNMLLDLHDTAQRIVADAAAITVPTLLLISGADWVVHRGPQDRFFERLGAARKERIVLPGFYHDTLGERDRAQALAPLRAFVLREFDAPSPRVSLADADRRGAFHDEYAALSRPPANVFARAYWALTRAGLKAGGALSDGIALGLRLGFDSGSTLDYVYRNRAQGRLGIGALIDRTYLDSPGWVGIRQRKVHLQELIGAAIGRLRGNGTPVRIVDIAAGHGRYVLDAIALAAERDGAAPDDITLRDYSPPNVEAGRVLIAQRGLEPIARFERGDAFDEASLATLEPRPTLAIVSGLYELFGENALIERSLRGLAQAVPPGGYLVYTGQPWHPQLEFIARALNNHRGESTWVMRRRSQAEMDELVARAGFRKLDQRIDEMGIFTVSLAQRVDAS

SEQ ID NO: 20175 - DNA, 1800 bp, Burkholderia ambifaria AMMD
  CDS (1)..(1800): transl_table=11
atgattcgaacaacgaaacgagagaaacgcatgagcgcacgcacggcccgcgaggctgacttcatcacgcacgacggcgaaacgctgttctatcgtcactggcccgcgacgggcccgcgctgccgcggcgcgatcgtgctgctgcatcgcggccacgaacattcggcgcgcgtcgcgcatctcgtcgacgagctcgacctgccggacttcgcgttcttcgcatgggatgcgcgcggccacggccgctcgcccggcgcgcgcggctacagcccgagcgcggccgcgtcggtgcgcgacctgcagatcttcgtcgagcatatccgcgacacgcacggcatcgcgatcgaggacatcgccgtggtcgggcagagcgtcggcgcggtgctcgcggccacctgggtacacgattacgcgccgccgatccgctgcctcgtggtcgcgtcgccggcgttccacatcaagctctacgtgccgttcgcgcggccggggctgcggctgatgcacaagctgcgcgggctgttctacgtgaacagctacgtgaaaccgaaattcctcacgcatgaccccgaacggatcgcgagctatgcggccgatccgctgatcacgcggccgatcgccgtcaacatgctgctcgacctgcacgacaccgcgaagcggatcgtcgccgatgcggccgcgatcaccgtgccgacgcagctgctgatctccggcgccgactgggtcgtccatcgcggcccgcaagaccgcttcttcgagcggctcggcgccgtgcgcaaggagcgcatcgtgctgcccggcttctatcacgacacgctcggcgagcgcgaccgcgcgcaggcgctcgcgccgctgcgcaccttcgtgctgcgcgagttcgatacgccgagcccgcgcgtgtcgctcgccgacgccgaccggcgcggcgcattccacgacgaatacgcggcgctcggccggccgcccgcgaacccgttcgcccgcgcgtactgggcgatcacgcgggcggggctgaaggcaggcggcgcgctgtcggacggcatcgcgctcgggttgcggctcggcttcgattcgggctcgacgctcgactacgtgtaccgcaaccgcgcgcagggccggctcggcgtcggcgcgctgatcgaccgcacctatctcgattcgccgggctgggtcggcatccgtcagcgcaaggtgcatctgcaggagctgatcggcgcggcgatcgggcggctgcgcggcctcggcgaacccgtgcggatcgtcgacatcgcggccgggcacggacgctatgtgctcgacgcgatcgcgacggccgccgaacgcgacggcgcggcgcccgacgacatcacgctgcgcgactacagcccgccgaacgtcgaggccggacgcgtgctgatcgcgcagcgcggcctcgagccgatcgcgcgcttcgagcgcggcgacgcgttcgacgaggcgtcgctcgcgacgctcgagccgcgcccgacgctcgcgatcgtgtcggggctgtatgaactgttcggcgagaacgcgctgatcgagcgctcgctgcgcgggctcgcgcaggcggtgccgcccggcggctatctcgtctatacggggcagccgtggcatccgcagctcgaattcatcgcgcgtgcgctgaacaaccatcgcggcgacgcgacctgggtgatgcgccgccgctcgcaggccgagatggacgagctcgtcgcgcgcgccggtttccgcaagctcgaccagcgcatcgacgagatgggcatcttcacggtgagcctcgcgcagcgggtcgacgcgtcgtga

SEQ ID NO: 20176 - protein, 599 aa, Burkholderia ambifaria AMMD
MIRTTKREKRMSARTAREADFITHDGETLFYRHWPATGPRCRGAIVLLHRGHEHSARVAHLVDELDLPDFAFFAWDARGHGRSPGARGYSPSAAASVRDLQIFVEHIRDTHGIAIEDIAVVGQSVGAVLAATWVHDYAPPIRCLVVASPAFHIKLYVPFARPGLRLMHKLRGLFYVNSYVKPKFLTHDPERIASYAADPLITRPIAVNMLLDLHDTAKRIVADAAAITVPTQLLISGADWVVHRGPQDRFFERLGAVRKERIVLPGFYHDTLGERDRAQALAPLRTFVLREFDTPSPRVSLADADRRGAFHDEYAALGRPPANPFARAYWAITRAGLKAGGALSDGIALGLRLGFDSGSTLDYVYRNRAQGRLGVGALIDRTYLDSPGWVGIRQRKVHLQELIGAAIGRLRGLGEPVRIVDIAAGHGRYVLDAIATAAERDGAAPDDITLRDYSPPNVEAGRVLIAQRGLEPIARFERGDAFDEASLATLEPRPTLAIVSGLYELFGENALIERSLRGLAQAVPPGGYLVYTGQPWHPQLEFIARALNNHRGDATWVMRRRSQAEMDELVARAGFRKLDQRIDEMGIFTVSLAQRVDAS

SEQ ID NO: 20177 - DNA, 23 bp, Artificial sequence
  Primer sequence
atggaaaattcacgcatccctgg

SEQ ID NO: 20178 - DNA, 24 bp, Artificial sequence
  Primer sequence
ttagttatcacgacgcaccgccat

SEQ ID NO: 20179 - protein, 589 aa, Artificial sequence
  Consensus
  Variant (2)..(4): Xaa in position 2 to 4 is any amino acid
  Variant (6)..(7): Xaa in position 6 to 7 is any amino acid
  Variant (9)..(11): Xaa in position 9 to 11 is any amino acid
  Variant (13)..(15): Xaa in position 13 to 15 is any amino acid
  Variant (22)..(29): Xaa in position 22 to 29 is any amino acid
  Variant (30)..(35): Xaa in position 30 to 35 is any or no amino acid
  Variant (39)..(39): Xaa in position 39 is any amino acid
  Variant (50)..(50): Xaa in position 50 is any amino acid
  Variant (53)..(53): Xaa in position 53 is any amino acid
  Variant (57)..(57): Xaa in position 57 is any amino acid
  Variant (60)..(62): Xaa in position 60 to 62 is any amino acid
  Variant (73)..(73): Xaa in position 73 is any amino acid
  Variant (75)..(75): Xaa in position 75 is any amino acid
  Variant (77)..(77): Xaa in position 77 is any amino acid
  Variant (80)..(80): Xaa in position 80 is any or no amino acid
  Variant (83)..(87): Xaa in position 83 to 87 is any amino acid
  Variant (89)..(89): Xaa in position 89 is any amino acid
  Variant (92)..(93): Xaa in position 92 to 93 is any amino acid
  Variant (96)..(97): Xaa in position 96 to 97 is any amino acid
  Variant (99)..(103): Xaa in position 99 to 103 is any amino acid
  Variant (105)..(106): Xaa in position 105 to 106 is any amino acid
  Variant (108)..(108): Xaa in position 108 is any amino acid
  Variant (110)..(110): Xaa in position 110 is any amino acid
  Variant (121)..(121): Xaa in position 121 is any amino acid
  Variant (125)..(125): Xaa in position 125 is any amino acid
  Variant (131)..(131): Xaa in position 131 is any amino acid
  Variant (134)..(134): Xaa in position 134 is any amino acid
  Variant (143)..(143): Xaa in position 143 is any amino acid
  Variant (153)..(153): Xaa in position 153 is any amino acid
  Variant (156)..(156): Xaa in position 156 is any amino acid
  Variant (159)..(161): Xaa in position 159 to 161 is any amino acid
  Variant (164)..(164): Xaa in position 164 is any amino acid
  Variant (173)..(173): Xaa in position 173 is any amino acid
  Variant (180)..(181): Xaa in position 180 to 181 is any amino acid
  Variant (184)..(184): Xaa in position 184 is any amino acid
  Variant (187)..(188): Xaa in position 187 to 188 is any amino acid
  Variant (190)..(190): Xaa in position 190 is any amino acid
  Variant (193)..(193): Xaa in position 193 is any amino acid
  Variant (195)..(195): Xaa in position 195 is any amino acid
  Variant (199)..(199): Xaa in position 199 is any amino acid
  Variant (203)..(203): Xaa in position 203 is any amino acid
  Variant (206)..(207): Xaa in position 206 to 207 is any amino acid
  Variant (209)..(209): Xaa in position 209 is any amino acid
  Variant (213)..(213): Xaa in position 213 is any amino acid
  Variant (216)..(216): Xaa in position 216 is any amino acid
  Variant (219)..(219): Xaa in position 219 is any amino acid
  Variant (229)..(229): Xaa in position 229 is any amino acid
  Variant (235)..(236): Xaa in position 235 to 236 is any amino acid
  Variant (239)..(240): Xaa in position 239 to 240 is any amino acid
  Variant (243)..(244): Xaa in position 243 to 244 is any amino acid
  Variant (246)..(246): Xaa in position 246 is any amino acid
  Variant (248)..(249): Xaa in position 248 to 249 is any amino acid
  Variant (252)..(254): Xaa in position 252 to 254 is any amino acid
  Variant (256)..(256): Xaa in position 256 is any amino acid
  Variant (269)..(270): Xaa in position 269 to 270 is any amino acid
  Variant (272)..(277): Xaa in position 272 to 277 is any amino acid
  Variant (280)..(282): Xaa in position 280 to 282 is any amino acid
  Variant (284)..(295): Xaa in position 284 to 295 is any amino acid
  Variant (298)..(307): Xaa in position 298 to 307 is any amino acid
  Variant (309)..(310): Xaa in position 309 to 310 is any amino acid
  Variant (312)..(317): Xaa in position 312 to 317 is any amino acid
  Variant (318)..(321): Xaa in position 318 to 321 is any or no amino acid
  Variant (323)..(328): Xaa in position 323 to 328 is any amino acid
  Variant (331)..(335): Xaa in position 331 to 335 is any amino acid
  Variant (337)..(337): Xaa in position 337 is any amino acid
  Variant (340)..(340): Xaa in position 340 is any amino acid
  Variant (343)..(345): Xaa in position 343 to 345 is any amino acid
  Variant (360)..(362): Xaa in position 360 to 362 is any amino acid
  Variant (364)..(366): Xaa in position 364 to 366 is any amino acid
  Variant (369)..(370): Xaa in position 369 to 370 is any amino acid
  Variant (373)..(374): Xaa in position 373 to 374 is any amino acid
  Variant (377)..(377): Xaa in position 377 is any amino acid
  Variant (379)..(379): Xaa in position 379 is any amino acid
  Variant (382)..(382): Xaa in position 382 is any amino acid
  Variant (386)..(386): Xaa in position 386 is any amino acid
  Variant (389)..(390): Xaa in position 389 to 390 is any amino acid
  Variant (392)..(393): Xaa in position 392 to 393 is any amino acid
  Variant (396)..(397): Xaa in position 396 to 397 is any amino acid
  Variant (400)..(401): Xaa in position 400 to 401 is any amino acid
  Variant (403)..(406): Xaa in position 403 to 406 is any amino acid
  Variant (407)..(408): Xaa in position 407 to 408 is any or no amino acid
  Variant (427)..(433): Xaa in position 427 to 433 is any amino acid
  Variant (434)..(440): Xaa in position 434 to 440 is any or no amino acid
  Variant (448)..(449): Xaa in position 448 to 449 is any amino acid
  Variant (452)..(453): Xaa in position 452 to 453 is any amino acid
  Variant (455)..(456): Xaa in position 455 to 456 is any amino acid
  Variant (459)..(461): Xaa in position 459 to 461 is any amino acid
  Variant (463)..(465): Xaa in position 463 to 465 is any amino acid
  Variant (468)..(468): Xaa in position 468 is any or no amino acid
  Variant (470)..(471): Xaa in position 470 to 471 is any amino acid
  Variant (473)..(473): Xaa in position 473 is any amino acid
  Variant (477)..(479): Xaa in position 477 to 479 is any amino acid
  Variant (482)..(482): Xaa in position 482 is any amino acid
  Variant (484)..(484): Xaa in position 484 is any amino acid
  Variant (486)..(486): Xaa in position 486 is any amino acid
  Variant (500)..(500): Xaa in position 500 is any amino acid
  Variant (503)..(504): Xaa in position 503 to 504 is any amino acid
  Variant (506)..(507): Xaa in position 506 to 507 is any amino acid
  Variant (510)..(510): Xaa in position 510 is any amino acid
  Variant (514)..(514): Xaa in position 514 is any amino acid
  Variant (517)..(518): Xaa in position 517 to 518 is any amino acid
  Variant (521)..(521): Xaa in position 521 is any amino acid
  Variant (534)..(535): Xaa in position 534 to 535 is any amino acid
  Variant (538)..(539): Xaa in position 538 to 539 is any amino acid
  Variant (541)..(542): Xaa in position 541 to 542 is any amino acid
  Variant (545)..(548): Xaa in position 545 to 548 is any amino acid
  Variant (549)..(549): Xaa in position 549 is any or no amino acid
  Variant (554)..(554): Xaa in position 554 is any amino acid
  Variant (558)..(558): Xaa in position 558 is any amino acid
  Variant (562)..(562): Xaa in position 562 is any amino acid
  Variant (565)..(566): Xaa in position 565 to 566 is any amino acid
  Variant (570)..(570): Xaa in position 570 is any amino acid
  Variant (572)..(573): Xaa in position 572 to 573 is any amino acid
  Variant (575)..(575): Xaa in position 575 is any amino acid
  Variant (578)..(579): Xaa in position 578 to 579 is any amino acid
  Variant (588)..(588): Xaa in position 588 is any amino acid
RXXXEXXFXXXDXXXLFYRHWXXXXXXXXXXXXXXIVLXHRGHEHSGRVXHLXDELXLPXXXFFAWDARGHGXSXGXRGXSPXXXXXVXDVXXFVXXIXXXXXIXXEXIXVVAQSVGAVLXATWXHDYAPXIRXLVLASPAFXVKLYVPFARXGLXLMXXXRGXFFVNSYVKXKFLTHDXXRIXSYXXDXLIXRXIAVXMLLXLYXXAXRIVXDAXAIXVPTQLLISGXDFVVHXXPQXXFFXXLXSXXKEXXXLXGFYHDTLGERDRXXAXXXXXXFIXXXFXXXXXXXXXXXXDRXXXXXXXXXXLXXPXXXXXXXXXXWXXXXXXLKXXXXXSXGIXLGXXXGFDSGSTLDYVYRNXXXGXXXLGXXIDXXYLXSXGWXGIRXRKXXLXXLIXXAIXXLXXXXXXVRIVDIAAGHGRYVLDALXXXXXXXXXXXXXXILLRDYSXXNVXXGXXLIXXXGXXXIAXFXXGXAFDXXXLAXLXPXPTLAIVSGLYELFXDNXXVXXSLXGLAXAVXXGGXLVYTGQPWHPQLXXIAXXLXXHRXXXXXWVMRXRSQXEMDXLVXXAGFXKXXQXIDXXGIFTVSLAXR

SEQ ID NO: 20180 - protein, 9 aa, Artificial sequence
  Consensus
  Variant (8)..(8): Xaa in position 8 is Ala or Gly
HRGHEHSXR

SEQ ID NO: 20181 - protein, 96 aa, Artificial sequence
  Consensus
  Variant (5)..(5): Xaa in position 5 is any amino acid
  Variant (6)..(6): Xaa in position 6 is Ile, Leu or Val
  Variant (8)..(8): Xaa in position 8 is Ala, Cys, Gly or Ser
  Variant (9)..(9): Xaa in position 9 is Leu or Met
  Variant (11)..(11): Xaa in position 11 is Leu or Val
  Variant (17)..(17): Xaa in position 17 is any amino acid
  Variant (18)..(18): Xaa in position 18 is Ile or Val
  Variant (24)..(24): Xaa in position 24 is Phe or Leu
  Variant (27)..(27): Xaa in position 27 is any amino acid
  Variant (30)..(30): Xaa in position 30 is any amino acid
  Variant (32)..(35): Xaa in position 32 to 35 is any amino acid
  Variant (36)..(36): Xaa in position 36 is Lys or Arg
  Variant (38)..(38): Xaa in position 38 is any amino acid
  Variant (40)..(40): Xaa in position 40 is Phe or Tyr
  Variant (41)..(41): Xaa in position 41 is Ile or Val
  Variant (42)..(42): Xaa in position 42 is Asn or Thr
  Variant (47)..(47): Xaa in position 47 is Ala, Gly or Pro
  Variant (48)..(48): Xaa in position 48 is any amino acid
  Variant (49)..(49): Xaa in position 49 is Phe, Trp or Tyr
  Variant (51)..(51): Xaa in position 51 is Ser or Thr
  Variant (54)..(54): Xaa in position 54 is any amino acid
  Variant (55)..(55): Xaa in position 55 is Ala, Glu or Gln
  Variant (57)..(57): Xaa in position 57 is Ile or Val
  Variant (58)..(58): Xaa in position 58 is any amino acid
  Variant (60)..(60): Xaa in position 60 is Phe or Tyr
  Variant (61)..(61): Xaa in position 61 is any amino acid
  Variant (62)..(62): Xaa in position 62 is Ala, Asn, Gln, Ser or Thr
  Variant (64)..(64): Xaa in position 64 is any amino acid
  Variant (66)..(66): Xaa in position 66 is Ile or Val
  Variant (67)..(67): Xaa in position 67 is Ala or Thr
  Variant (68)..(68): Xaa in position 68 is Lys or Arg
  Variant (69)..(69): Xaa in position 69 is any amino acid
  Variant (71)..(71): Xaa in position 71 is Ala or Ser
  Variant (73)..(73): Xaa in position 73 is Asn or Arg
  Variant (74)..(74): Xaa in position 74 is Ile, Met or Val
  Variant (77)..(77): Xaa in position 77 is Asp or Gly
  Variant (79)..(79): Xaa in position 79 is His or Tyr
  Variant (80)..(80): Xaa in position 80 is any amino acid
  Variant (81)..(81): Xaa in position 81 is Ala or Thr
  Variant (82)..(82): Xaa in position 82 is Ala, Gly or Ser
  Variant (83)..(83): Xaa in position 83 is any amino acid
  Variant (85)..(85): Xaa in position 85 is Ile or Val
  Variant (87)..(87): Xaa in position 87 is Ala, Asp or Ser
  Variant (89)..(89): Xaa in position 89 is Ala or Ser
  Variant (90)..(90): Xaa in position 90 is Ala, Gln or Thr
  Variant (93)..(93): Xaa in position 93 is Gln or Thr
  Variant (94)..(94): Xaa in position 94 is Ile, Leu or Val
DYAPXXRXXVXASPAFXXKLYVPXARXGLXLXXXXXGXFXXXSYVKXXXLXHDXXRXXSXXXDXLXXXXIXVXXLLXLXXXXXRXVXDXXAIXXPT

SEQ ID NO: 20182 - protein, 53 aa, Artificial sequence
  Consensus
  Variant (2)..(2): Xaa in position 2 is any amino acid
  Variant (4)..(4): Xaa in position 4 is any amino acid
  Variant (5)..(5): Xaa in position 5 is any or no amino acid
  Variant (7)..(7): Xaa in position 7 is any or no amino acid
  Variant (9)..(9): Xaa in position 9 is any amino acid
  Variant (10)..(10): Xaa in position 10 is Asp, Glu, Gln, Arg or Ser
  Variant (11)..(11): Xaa in position 11 is any amino acid
  Variant (18)..(18): Xaa in position 18 is Ser or Thr
  Variant (22)..(22): Xaa in position 22 is Ile or Val
  Variant (24)..(24): Xaa in position 24 is Gln or Arg
  Variant (26)..(26): Xaa in position 26 is any amino acid
  Variant (27)..(27): Xaa in position 27 is Ala or Pro
  Variant (28)..(28): Xaa in position 28 is any amino acid
  Variant (30)..(31): Xaa in position 30 to 31 is any amino acid
  Variant (32)..(32): Xaa in position 32 is Ala, Gly, Ile or Pro
  Variant (33)..(33): Xaa in position 33 is Phe, Ile, Leu or Val
  Variant (35)..(36): Xaa in position 35 to 36 is any amino acid
  Variant (37)..(37): Xaa in position 37 is Ile or Val
  Variant (39)..(39): Xaa in position 39 is His, Lys or Arg
  Variant (40)..(40): Xaa in position 40 is any amino acid
  Variant (43)..(43): Xaa in position 43 is Asp, Asn or Gln
  Variant (44)..(44): Xaa in position 44 is Ala or Ser
  Variant (45)..(45): Xaa in position 45 is Ile, Pro or Val
  Variant (48)..(48): Xaa in position 48 is any amino acid
  Variant (52)..(52): Xaa in position 52 is any amino acid
SXGXXLXGXXXGFDSGSXLDYXYXNXXXGXXXXGXXXDXXYLXXXGWXGIRXR

SEQ ID NO: 20183 - protein, 93 aa, Artificial sequence
  Consensus
  Variant (7)..(7): Xaa in position 7 is Ala, Gly, Pro or Ser
  Variant (8)..(8): Xaa in position 8 is Asp, Glu or Ser
  Variant (10)..(11): Xaa in position 10 to 11 is any amino acid
  Variant (12)..(12): Xaa in position 12 is Ile or Val
  Variant (13)..(14): Xaa in position 13 to 14 is any amino acid
  Variant (17)..(17): Xaa in position 17 is any amino acid
  Variant (20)..(20): Xaa in position 20 is Ala or Gly
  Variant (21)..(21): Xaa in position 21 is Ala, Glu, Asn, Gln or Ser
  Variant (23)..(23): Xaa in position 23 is Ile, Leu or Val
  Variant (24)..(24): Xaa in position 24 is any amino acid
  Variant (25)..(25): Xaa in position 25 is Glu or Pro
  Variant (27)..(27): Xaa in position 27 is Ala or Gly
  Variant (28)..(28): Xaa in position 28 is any amino acid
  Variant (30)..(30): Xaa in position 30 is Ile, Leu or Val
  Variant (41)..(41): Xaa in position 41 is Glu or Lys
  Variant (42)..(42): Xaa in position 42 is any amino acid
  Variant (45)..(45): Xaa in position 45 is any amino acid
  Variant (46)..(46): Xaa in position 46 is Ala, Thr or Val
  Variant (48)..(48): Xaa in position 48 is Asn or Thr
  Variant (49)..(49): Xaa in position 49 is Asn or Ser
  Variant (51)..(51): Xaa in position 51 is any amino acid
  Variant (52)..(52): Xaa in position 52 is Ala, Asp, Glu, Gly, Asn or Gln
  Variant (53)..(53): Xaa in position 53 is Asp, Glu or Gly
  Variant (54)..(54): Xaa in position 54 is any amino acid
  Variant (55)..(55): Xaa in position 55 is Ala, Pro or Thr
  Variant (57)..(57): Xaa in position 57 is Met or Val
  Variant (60)..(60): Xaa in position 60 is any amino acid
  Variant (62)..(62): Xaa in position 62 is Ser or Thr
  Variant (64)..(64): Xaa in position 64 is any amino acid
  Variant (68)..(68): Xaa in position 68 is Glu, Gly, Gln, Ser or Thr
  Variant (71)..(72): Xaa in position 71 to 72 is any amino acid
  Variant (76)..(76): Xaa in position 76 is Asp, Glu or Arg
  Variant (78)..(81): Xaa in position 78 to 81 is any amino acid
  Variant (82)..(82): Xaa in position 82 is Ile or Val
  Variant (84)..(85): Xaa in position 84 to 85 is any amino acid
  Variant (89)..(89): Xaa in position 89 is Ser or Thr
  Variant (92)..(92): Xaa in position 92 is Leu or Met
GLYELFXXNXXXXXSLXGLXXAXXXGXXLXYTGQPWHPQLXXIAXXLXXHXXXXXWXMRXRXQXEMDXLVXXAGFXKXXXXXDXXGIFXVSXA

SEQ ID NO: 20184 - DNA, 582 bp, Escherichia coli K12
  CDS (1)..(582): transl_table=11
atgactgactacctgttactgtttgtcggaactgtactggtcaataactttgtactggtcaagtttctcggtctctgtccgtttatgggggtttccaaaaaactggaaaccgcgatgggcatggggctggcaacaacgtttgtgatgacgctggcgtctatttgcgcctggcttatcgatacgtggattttgatcccacttaatctgatttacctgcgcaccctggcatttattctggtgattgctgtggtcgtgcagttcaccgagatggtggtgcgcaaaaccagcccggtgctttaccgtctgctggggatttttttgccgcttatcaccaccaactgtgcagtgctcggcgtggcgttgctgaatatcaatctcgggcacaatttcttgcagtcggcgctgtacggtttttccgccgctgtcggtttctcgctggtgatggtgctcttcgccgccatccgcgaacgccttgctgtggctgatgtcccggcaccttttcgcggtaatgccattgcgttaattaccgcaggtcttatgtctctggcctttatgggctttagtggtttggtgaagttgtaa

SEQ ID NO: 20185 - protein, 193 aa, Escherichia coli K12
MTDYLLLFVGTVLVNNFVLVKFLGLCPFMGVSKKLETAMGMGLATTFVMTLASICAWLIDTWILIPLNLIYLRTLAFILVIAVVVQFTEMVVRKTSPVLYRLLGIFLPLITTNCAVLGVALLNINLGHNFLQSALYGFSAAVGFSLVMVLFAAIRERLAVADVPAPFRGNAIALITAGLMSLAFMGFSGLVKL

SEQ ID NO: 20186 - DNA, 603 bp, Thermotoga maritima MSB8
  CDS (1)..(603): transl_table=11
atgagccgcttgagagaattaactaaggggatcataaaagagaatcccacttatgttcaggttcttggaatgtgtcccacactcgccgtcaccacgagtgccatcaacggtctggggatggggcttgctacgacagccgttctcaccatgtcaaacgtggttatttcactgataagaaagatcgttcctgataagatcagaattcctatattcatcgttgttatcgcgtctttcgttaccatgatagatctcctcatgcacggttttgcctacgatctgtggaagaccctgggacttttcattcctctcatagtggtgaactgtatcataatgggaagggcggaatcgttcgcttccaagcatggtgttctggattccatgctcgatggcctgggagtgggtctcggtttcacaggttcgcttgttctccttggaagcgtcagagaactcttcggtaacggtacgatcttcggttacaaagtgtgggagttgaagatatttcttgaaattcttccaccgggagcctacataacactcggtcttctctctgcactcttcacctacatcggcatcaggagaaagaaaagaggtgaagcgaaatga

SEQ ID NO: 20187 - protein, 200 aa, Thermotoga maritima MSB8
MSRLRELTKGIIKENPTYVQVLGMCPTLAVTTSAINGLGMGLATTAVLTMSNVVISLIRKIVPDKIRIPIFIVVIASFVTMIDLLMHGFAYDLWKTLGLFIPLIVVNCIIMGRAESFASKHGVLDSMLDGLGVGLGFTGSLVLLGSVRELFGNGTIFGYKVWELKIFLEILPPGAYITLGLLSALFTYIGIRRKKRGEAK

SEQ ID NO: 20188 - DNA, 642 bp, Vibrio cholerae O1 biovar eltor str. N16961
  CDS (1)..(642): transl_table=11
ttgttattgctttggcaaagcaggataatgccgggatcggaagcaaacatttatataactatgaccgaatatcttttgttgttaatcggcaccgtgctggtcaataactttgtactggtgaagtttttgggcttatgtccttttatgggcgtatcaaaaaaactagagaccgccattggcatggggttggcgacgacattcgtcctcaccttagcttcggtgtgcgcttatctggtggaaagttacgtgttacgtccgctcggcattgagtatctgcgcaccatgagctttattttggtgatcgctgtcgtagtacagttcaccgaaatggtggtgcacaaaaccagtccgacactctatcgcctgctgggcattttcctgccactcatcaccaccaactgtgcggtattaggggttgcgctgctcaacatcaacgaaaatcacaactttattcaatcgatcatttatggttttggcgctgctgttggcttctcgctggtgctcatcttgttcgcttcaatgcgtgagcgaatccatgtagccgatgtccccgctccctttaagggcgcatccattgcgatgatcaccgcaggtttaatgtctttggcctttatgggctttaccggattggtgaaactgtaa

SEQ ID NO: 20189 - protein, 213 aa, Vibrio cholerae O1 biovar eltor str. N16961
MLLLWQSRIMPGSEANIYITMTEYLLLLIGTVLVNNFVLVKFLGLCPFMGVSKKLETAIGMGLATTFVLTLASVCAYLVESYVLRPLGIEYLRTMSFILVIAVVVQFTEMVVHKTSPTLYRLLGIFLPLITTNCAVLGVALLNINENHNFIQSIIYGFGAAVGFSLVLILFASMRERIHVADVPAPFKGASIAMITAGLMSLAFMGFTGLVKL

SEQ ID NO: 20190 - DNA, 729 bp, Pasteurella multocida subsp. multocida str. Pm70
  CDS (1)..(729): transl_table=11
atgaacgacactttcgcaaaacagaccgcactttctgacgctaaagacgatgtcatggaccagcaatctacattagcgaatacatccactccgtcggtctggaaaacacttttctggcaaggagtatggaaaaataattcaacccttgtgcaactcttgggcttatgtccattattagctgtatccaacagtgtcacaaatgcgttggggttaggcattgcaacgctattcgtgctgatttgtagtaacacagtagtctctttattccgcaaacaaattccgcacgaaatccgtattccaatttatgtgatgattattgccacgaccgtcacggtggtgcaattactgatgaatgcctatacttattcactctatcaatccttgggtatttttattccactgatcgtcactaactgtattgtgattgggcgtgctgaagcctttgcttcaaaaaatccgctttcccatgcgatgtttgatggctttgccatggggttaggcatgtgtttaagcttagtctttttaggggcaatccgtgaaattctcggtaatggcaccttgtttgacggcattgagcatttacttggtgattgggcaaaaggattgcgtattgaattatttcatctcgatagccatttcttgttggcgattttaccaccgggcgcctttattggtttaggactcattttagccattaaaaatgtcattgatcagcgtaacaaagcatga

SEQ ID NO: 20191 - protein, 242 aa, Pasteurella multocida subsp. multocida str. Pm70
MNDTFAKQTALSDAKDDVMDQQSTLANTSTPSVWKTLFWQGVWKNNSTLVQLLGLCPLLAVSNSVTNALGLGIATLFVLICSNTVVSLFRKQIPHEIRIPIYVMIIATTVTVVQLLMNAYTYSLYQSLGIFIPLIVTNCIVIGRAEAFASKNPLSHAMFDGFAMGLGMCLSLVFLGAIREILGNGTLFDGIEHLLGDWAKGLRIELFHLDSHFLLAILPPGAFIGLGLILAIKNVIDQRNKA

SEQ ID NO: 20192 - DNA, 669 bp, Clostridium perfringens str. 13
  CDS (1)..(669): transl_table=11
ttgaaagttttatttgaaagattaaaaaatggtatagttactgaaaatcctatatttgttcaagtattagctatgtgtccaaccctagcagttacttcaagtgttgaaaatgccgtgggcatgggaatagcttctacagtggttttaattttttctaatatgataatttcagccttaagaaagtttataccaaataaaataagaattcctgcatatatagttataattgcatcctttgttactgtggttgatatgttaatgaatgcttatgttcaatcattatataaatccttaggaattttcatacctcttatagtagttaactgcgttatattagggagagctgaggcttatgcttcaaataacaaaatcctaccatctatttttgatgccattggaatgggaattggatttactatagcgttattttctataggaacttttagagaaatattaggggctggaacatttttgggaatgaacatcatgccagagggatttaagcctgctactattatgatattagctccaggagcatttttaaccttaggagcattaatgactttcttaaattatagaaacataaagaaagctaaaaacgaaggtaaaaaagctaaatgtttagaacataattgtagtacttgttctggatgcggtaaaaattcttaa

SEQ ID NO: 20193 - protein, 222 aa, Clostridium perfringens str. 13
MKVLFERLKNGIVTENPIFVQVLAMCPTLAVTSSVENAVGMGIASTVVLIFSNMIISALRKFIPNKIRIPAYIVIIASFVTVVDMLMNAYVQSLYKSLGIFIPLIVVNCVILGRAEAYASNNKILPSIFDAIGMGIGFTIALFSIGTFREILGAGTFLGMNIMPEGFKPATIMILAPGAFLTLGALMTFLNYRNIKKAKNEGKKAKCLEHNCSTCSGCGKNS

SEQ ID NO: 20194 - DNA, 576 bp, Clostridium perfringens str. 13
  CDS (1)..(576): transl_table=11
atggaattatttctgatttttattggagctatgcttgttaataactttgttttatcacaatttttaggaatatgttcatttataggagtttcaaaaaagaaggaagctgcagtaggaatgggacttgcagttacctttgtaatggtattagctagtataatttcttggcttgtttataacttgattttagataagtttaatataacttatttgaaaacaatagtttttgttcttgttatagcttccttggttcaatttgttgagatggttgttaaaaaatatagtcctagtttatataaagcattaggtatatttttacctttaataactacaaattgtgctgttttaggaatggccgttactaatgttgaagaagtatataatcttattcaatcaatagtacatgctttaggggctgctggaggatatatgcttgctatagtattaatgtcatttttaagagaaaagatagatgacaatgaagaaatacatccttattttagagggttaccaataactctttttacagcagcacttatgtctatagcctttttaggattccaaggacttatataa

SEQ ID NO: 20195 - protein, 191 aa, Clostridium perfringens str. 13
MELFLIFIGAMLVNNFVLSQFLGICSFIGVSKKKEAAVGMGLAVTFVMVLASIISWLVYNLILDKFNITYLKTIVFVLVIASLVQFVEMVVKKYSPSLYKALGIFLPLITTNCAVLGMAVTNVEEVYNLIQSIVHALGAAGGYMLAIVLMSFLREKIDDNEEIHPYFRGLPITLFTAALMSIAFLGFQGLI

SEQ ID NO: 20196 - DNA, 585 bp, Fusobacterium nucleatum subsp. nucleatum ATCC 25586
  CDS (1)..(585): transl_table=11
atgagtataggtggattatttagtataattattacttcaatatttataaataacataatatttgctaagttcttaggttgctgtccatttatgggagtttctaaaaaggttgactcatcattaggaatggggatggctgttaccttcgttattacaatagcttcaggagtaacttggatagtttacagaaagatattagaacctcttggtttaggatatttacaaacaatagcttttatattaataatagcttctcttgtacaattcgttgaaatggcaattaaaaagacatcaccaagtctatataaagcacttggagtatttttaccattaatcacaacaaactgtgctgttctaggggttgctataataaatatccaagaaggatataattttatagaaacaatagtaaatggttttggagttgcagtaggtttctcactagcattgttacttttagctggaatcagagaaagattagaatatgcaaacattcctaaaaacttcaaaggagttccaatagcatttatcacagctggacttttagctatggcatttatgggatttagtggaatgcaaatttaa

SEQ ID NO: 20197 - protein, 194 aa, Fusobacterium nucleatum subsp. nucleatum ATCC 25586
MSIGGLFSIIITSIFINNIIFAKFLGCCPFMGVSKKVDSSLGMGMAVTFVITIASGVTWIVYRKILEPLGLGYLQTIAFILIIASLVQFVEMAIKKTSPSLYKALGVFLPLITTNCAVLGVAIINIQEGYNFIETIVNGFGVAVGFSLALLLLAGIRERLEYANIPKNFKGVPIAFITAGLLAMAFMGFSGMQI

SEQ ID NO: 20198 - DNA, 618 bp, Fusobacterium nucleatum subsp. nucleatum ATCC 25586
  CDS (1)..(618): transl_table=11
atgaaaaaattaggagtacttacagctggaatatttaaagaaaatccagtgtttgttttaatgttaggactttgtcctacacttggggtaacaagtagtgcaataaatggtttttcaatgggacttgcagttatagcagttcttgcttgttcaaatggattgatatctctttttaagaaatttataccagatgaagtaagaatacctgcatttataatgataatagctacacttgttacagtagttgatatggttatgaatgcttatacacctgacttatataaggtattaggattatttatacctttaatagttgttaactgtatagttcttggaagagcagaaagttttgcatctaaaaatggtgttattgattctatacttgatggtattggatctggaataggatttactttatctttaactttcttaggttcagtaagagaaattttaggaaatggttcagtatttggaatttcattagttcctgctaactttacacctgctttaatatttatattagcacctggtggatttattacaatagggataattatggcttgtataaatatgaaaaaagaaagagatgcaaagaaaaagaaggtgactaaaaaatga

SEQ ID NO: 20199 - protein, 205 aa, Fusobacterium nucleatum subsp. nucleatum ATCC 25586
MKKLGVLTAGIFKENPVFVLMLGLCPTLGVTSSAINGFSMGLAVIAVLACSNGLISLFKKFIPDEVRIPAFIMIIATLVTVVDMVMNAYTPDLYKVLGLFIPLIVVNCIVLGRAESFASKNGVIDSILDGIGSGIGFTLSLTFLGSVREILGNGSVFGISLVPANFTPALIFILAPGGFITIGIIMACINMKKERDAKKKKVTKK

SEQ ID NO: 20200 - DNA, 642 bp, Methanosarcina acetivorans C2A
  CDS (1)..(642): transl_table=11
atgtatccgcacaggagggctgatatgaatcctataagtgaatttatacgcggaattactaaagacaaccctacctttgggcttgtgctcgggctctgtccgactctagcagtcacaacatccgtggaaaacgggatcggtatggccatgggtacactgttcgtgttggtaggttcgaacatgatggtttctgcgatccgaaaaggaattccgggaacagtcaggcttcccgttgaaattattgtcattgcaactttcgttacgatcgttgacatggtgatggaagcatttacacctgacctgtacacatctctcggcgtgttcattcctttgatcgtggtcaattgtattgttattggaagggctgaggcctacgccctgaagaatggggtcttttattcgattatcgatgctcttggtgagggtacgggttttctgctcgtgttaatcctcatcggaggaatcagagaactgctggggaccggcataattgatccgttcggaatgactctcatcaacctgagtggtgtaataaaccctgcaatgttcatgaccatgtctccgggtgccttcctcacaattgcagtgttgatgaccattgtgaactatcgcaggcagcagaaagctgcaaagggtggttaa

SEQ ID NO: 20201 - protein, 213 aa, Methanosarcina acetivorans C2A
MYPHRRADMNPISEFIRGITKDNPTFGLVLGLCPTLAVTTSVENGIGMAMGTLFVLVGSNMMVSAIRKGIPGTVRLPVEIIVIATFVTIVDMVMEAFTPDLYTSLGVFIPLIVVNCIVIGRAEAYALKNGVFYSIIDALGEGTGFLLVLILIGGIRELLGTGIIDPFGMTLINLSGVINPAMFMTMSPGAFLTIAVLMTIVNYRRQQKAAKGG

SEQ ID NO: 20202 - DNA, 600 bp, Methanosarcina acetivorans C2A
  CDS (1)..(600): transl_table=11
gtggttaaaatggcagaatctctatttacaatctttcttgaaggagtgttcatcaagaactttcttctcattcagttcctgggtctatgttcttttgtgggcgtgaccaaggacttgaaaagtgcttcagggatgtcgggcgctgtagtcttcgtcatggcgatggcagcaaccgtatcctttgctctgtataatttcattttagtacccctcaagctggagttcctgcggactatcgctttcatcgtggttatcgcagcacttgtgcagcttgtagagtttatcgtcaggaaacatgtgcctgccctctaccgttccctcgggatctacctgcctctgattaccaccaactgtgcggtgctcggggctgtgctcctcaatgtcatgaacgattacgatctcgctcagagcgttgtcttcggagttgccgcagggcttggctatacggttgctatgctgatgatggctgcaataagggaaaggagcgacctggtagaagtgccgaagtccgtaggaaggggtgtaacatacgccttcttcattgcgactattatgtcaatgtctttcgtgaacttcttcggggtgattccgcttgagtag

SEQ ID NO: 20203 - protein, 199 aa, Methanosarcina acetivorans C2A
MVKMAESLFTIFLEGVFIKNFLLIQFLGLCSFVGVTKDLKSASGMSGAVVFVMAMAATVSFALYNFILVPLKLEFLRTIAFIVVIAALVQLVEFIVRKHVPALYRSLGIYLPLITTNCAVLGAVLLNVMNDYDLAQSVVFGVAAGLGYTVAMLMMAAIRERSDLVEVPKSVGRGVTYAFFIATIMSMSFVNFFGVIPLE

SEQ ID NO: 20204 - DNA, 603 bp, Yersinia pestis KIM
  CDS (1)..(603): transl_table=11
ttgacgatggaacattatatcagtctgttggtccgcgcagtgtttgtggagaatatggcgttagcgttctttctgggaatgtgtactttcctggccgtctctaaaaaagtgtcaacggcctttggcttaggcattgcggtaacggttgttctgggcatctccgtgccagccaataatttggtttataacctggttctacgagatggcgcattggttgaaggggttgaccttagcttcctgaatttcattaccttcattggggtcattgccgccattgttcaggtgttggagatgatcctcgatcgttacttccctgcgttatataacgcgctgggtatttttctgccgctaatcaccgtgaactgcgccatctttggtggcgtgtcgtttatggcacagcgtgattacaacttccctgaatccatcgtttatggctttggttctggtatggggtggatgctggcgattgttgcattagcggggatccgcgaaaaaatgaaatatgccaatgtgcctgcgggcttacaggggctagggatcacctttatctcaaccggattgatggcattaggttttatgtctttcgccggtgtgaacctataa

SEQ ID NO: 20205 - protein, 200 aa, Yersinia pestis KIM
MTMEHYISLLVRAVFVENMALAFFLGMCTFLAVSKKVSTAFGLGIAVTVVLGISVPANNLVYNLVLRDGALVEGVDLSFLNFITFIGVIAAIVQVLEMILDRYFPALYNALGIFLPLITVNCAIFGGVSFMAQRDYNFPESIVYGFGSGMGWMLAIVALAGIREKMKYANVPAGLQGLGITFISTGLMALGFMSFAGVNL

SEQ ID NO: 20206 - DNA, 645 bp, Yersinia pestis KIM
  CDS (1)..(645): transl_table=11
ttgtcgtcgggccgtcaattttggataataggcggcttttatttttttaggtcccgcaatgcaatgactgaatacctgctcctatttgtcggcacagttttggtaaataactttgttctggtcaagtttcttggcctgtgcccgtttatgggcgtctctaaaaaactggaaaccgccattggtatgggtctggcgaccactttcgtgctgacattggcatcggtttgcgcctggatggtcaatagctttattttgctgccactcggcctgatctatttgcgaacactggccttcattttagttatcgctgtcgtggtgcaattcaccgagttggtggtccgcaaaaccagcccgacactttaccgcttgctgggtatctttctccccctgatcaccaccaattgtgccgttttaggggtcgcactactcaatgtgaatcaatcgcataatttcatgcaatccgcggtctatggttttagtgctgctgcgggtttctctttggtcatggtgttatttgccgctattcgtgagcgcctggctgtggcggatgtccctgcgcccttccgtgggtcttctatcgccttaatcactgccgggctgatgtctctggcctttatgggctttaccggtttggtgaagttctaa

SEQ ID NO: 20207 - protein, 214 aa, Yersinia pestis KIM
MSSGRQFWIIGGFYFFRSRNAMTEYLLLFVGTVLVNNFVLVKFLGLCPFMGVSKKLETAIGMGLATTFVLTLASVCAWMVNSFILLPLGLIYLRTLAFILVIAVVVQFTELVVRKTSPTLYRLLGIFLPLITTNCAVLGVALLNVNQSHNFMQSAVYGFSAAAGFSLVMVLFAAIRERLAVADVPAPFRGSSIALITAGLMSLAFMGFTGLVKF

SEQ ID NO: 20208 - DNA, 624 bp, Yersinia pestis KIM
  CDS (1)..(624): transl_table=11
atggacgatttaggagtgtgtgtaatgaccgagagttatttgaccatttttattagagctgtttttgttgaaaatatggcattaaatttctttcttggaatgtgcacatttctggcaatatctaaaaaagtagaaacagcctttggccttgggttgacagttacagccctgctggcgatagcaacacctctcaataatcttatttacacctatatactcagagagaatgctctgattgatggagtggatcttagttttcttgatttcattaccttcatcggggtgcttgcggcattagtccaaatacttgaaatggtacttgagcgatttttgccaagcttacatcacaccctgggggcctttttaccactactgacgatccactgtgcaatatttggtgcaaccatttttatggttcagcgagaatatacgttcaccgaatcttttgtttacgggactggctgtggtttaggttggatgctggccattatatccatggcaggtttacgagaaaaaatgaagtactctaacattccaaaagggttgcaagggctcggcatcgtctttatgacggcagggctgatgtccttaggatttatgtcattttcaggtattcggctctaa

SEQ ID NO: 20209 - protein, 207 aa, Yersinia pestis KIM
MDDLGVCVMTESYLTIFIRAVFVENMALNFFLGMCTFLAISKKVETAFGLGLTVTALLAIATPLNNLIYTYILRENALIDGVDLSFLDFITFIGVLAALVQILEMVLERFLPSLHHTLGAFLPLLTIHCAIFGATIFMVQREYTFTESFVYGTGCGLGWMLAIISMAGLREKMKYSNIPKGLQGLGIVFMTAGLMSLGFMSFSGIRL

SEQ ID NO: 20210 - DNA, 696 bp, Shigella flexneri 2a str. 301
  CDS (1)..(696): transl_table=11
gtgagcgaaattaaagacgttattgttcaggggttgtggaaaaacaactctgcactggtccaactgctcggcctttgtccgctattggcggtcacatccactgccactaacgctctgggtttaggacttgcgactacgctggtactgacgctgaccaacctgaccatttcgacgctgcgtcactggacgccagccgagatccgcattcccatttacgtgatgatcatcgcctcggtggtcagcgctgtacagatgctgatcaacgcctacgcctttggcctgtatcaatcattagggatttttattccgctgattgtcactaactgtatcgttgtgggccgcgctgaagccttcgccgccaaaaaaggtccggcgctttcggcactggacggcttttcaattggtacgggcgcaacctgcgccatgttcgtgctgggttcactacgcgaaattatcggcaatggcacgttgtttgacggtgcagatgcgctgttaggtagctgggcaaaagtattacgcgtggagattttccacaccgactcccctttcctgctggcgatgctgccaccaggtgcatttattggcttgggactgatgctggcaggaaaatacctgattgatgaaagaatgaaaaagcgccgtgctgaagcagctgccgaacgtgcattgccaaacggtgaaacagggaatgtctga

SEQ ID NO: 20211 - protein, 231 aa, Shigella flexneri 2a str. 301
MSEIKDVIVQGLWKNNSALVQLLGLCPLLAVTSTATNALGLGLATTLVLTLTNLTISTLRHWTPAEIRIPIYVMIIASVVSAVQMLINAYAFGLYQSLGIFIPLIVTNCIVVGRAEAFAAKKGPALSALDGFSIGTGATCAMFVLGSLREIIGNGTLFDGADALLGSWAKVLRVEIFHTDSPFLLAMLPPGAFIGLGLMLAGKYLIDERMKKRRAEAAAERALPNGETGNV

SEQ ID NO: 20212 - DNA, 621 bp, Shewanella oneidensis MR-1
  CDS (1)..(621): transl_table=11
atgagcaacagtttatccatgcgggacatgctagcaggccctgtgtttgctaataaccccgtagcgatgcaagtactgggcgtatgctcggcgctggcggtgagtaactccatgcagaccgcggtggtgatgacactcgcggtgaccttcgtactggtgttctccaacctgattatctctgctattcgcaactttatccctaatagtgtgcggattattgcccagatgacagtaattgcctccttggtcattattgttgacatggtattgcaggatgtggcttatgagttatctaagcaactgtctgtatttgttgggttaattatcactaactgtatcatcatgggccgtgcagaagcctttgcgatgaagtatccaccgcacttagctgtggtcgatgccgtgggtaacgcagcgggttacggtttagtgctgatcagtgtggcctttgtgcgtgagttgttaggcacgggtaatctgttcggccatagtgtgttgactacggttgaaaacggcggctggtacttacctaacgagatgtttaagttgccaccaagcgccttcttcctgattggcctgctgatctggagcattaacgtgatccagcgtaaacgcggttaa

SEQ ID NO: 20213 - protein, 206 aa, Shewanella oneidensis MR-1
MSNSLSMRDMLAGPVFANNPVAMQVLGVCSALAVSNSMQTAVVMTLAVTFVLVFSNLIISAIRNFIPNSVRIIAQMTVIASLVIIVDMVLQDVAYELSKQLSVFVGLIITNCIIMGRAEAFAMKYPPHLAVVDAVGNAAGYGLVLISVAFVRELLGTGNLFGHSVLTTVENGGWYLPNEMFKLPPSAFFLIGLLIWSINVIQRKRG

SEQ ID NO: 20214 - DNA, 609 bp, Shewanella oneidensis MR-1
  CDS (1)..(609): transl_table=11
atggaacactatattaatctgtttatacaggccactttcttagacaacatggcgctgtcgttcttcctcggtatgtgtaccttcttagcggtgtctaaaaaggtgtcgaccgccttcggcttaggcgttgcagttattgtggtaatgaccttagccgtgcccttaaaccaactgatctatgcgaaggtgttagcacctggcgctctggcttgggcgggtatgcctggcatcgatttaagctatctgcaactgatcacctttatcggtgtgattgcagccttagtgcaaattttggaaatgtttttagataaatacattccaagcctgtatgactcacttgggatcttcttgccactgctcaccgtaaactgcgcgatttttgctggggtgatctttatggctaaccgcgattacaactttgccgaatcggcggtatttgccatgggttcgggcacaggttgggcgttggcgattgtgatgctggctggacttcgtgagcgcatgaagttccatgcgattcccgaaggcttacaggggattggtatcacctttattaccacagggttgatggcgctaggctttatgtctttctcggggatctcgctgtaa

SEQ ID NO: 20215 - protein, 202 aa, Shewanella oneidensis MR-1
MEHYINLFIQATFLDNMALSFFLGMCTFLAVSKKVSTAFGLGVAVIVVMTLAVPLNQLIYAKVLAPGALAWAGMPGIDLSYLQLITFIGVIAALVQILEMFLDKYIPSLYDSLGIFLPLLTVNCAIFAGVIFMANRDYNFAESAVFAMGSGTGWALAIVMLAGLRERMKFHAIPEGLQGIGITFITTGLMALGFMSFSGISL

SEQ ID NO: 20216 - DNA, 633 bp, Shewanella oneidensis MR-1
  CDS (1)..(633): transl_table=11
atgtctgacgctaaagaactgaaacaggttctgactggacctatcgtcaacaacaacccgattgcattacaagttcttggtgtatgtagtgcgttagcggtaacgagcaagctcgaaactgcactggtgatggcgttggcattaactgcggtaacagcgttttctaacctgtttatctcaatgatccgtaatcatattcctagcagcgtacgtattatcgtacagatgaccattattgcctctctggtaatcgtggttgaccaattgctgcaggcttatgcttatcagatttctaagcaattatcggtattcgtcggccttattattacgaactgtatcgtaatgggtcgcgctgaagcctatgcgatgaaaacaccgccaatgatgagttttatggatggtattggtaacggtttaggttacggtgcgattctattagctgttggttttgtgcgtgagctgtttggtaacggttctctgttcggtgttcaaatcctgcacaagatctctgatggtggctggtatcaaccaaacggtctgctattactgccgccaagtgcgttcttcctgatcggtatgttgatttggattattcgtacctataagccagagcaagttgaagcaaaagggtaa

SEQ ID NO: 20217 - protein, 210 aa, Shewanella oneidensis MR-1
MSDAKELKQVLTGPIVNNNPIALQVLGVCSALAVTSKLETALVMALALTAVTAFSNLFISMIRNHIPSSVRIIVQMTIIASLVIVVDQLLQAYAYQISKQLSVFVGLIITNCIVMGRAEAYAMKTPPMMSFMDGIGNGLGYGAILLAVGFVRELFGNGSLFGVQILHKISDGGWYQPNGLLLLPPSAFFLIGMLIWIIRTYKPEQVEAKG

SEQ ID NO: 20218 - DNA, 609 bp, Shewanella oneidensis MR-1
  CDS (1)..(609): transl_table=11
atggaacattatattagcctgttaattcgctctgttttcattgaaaacatggcactggccttcttcctcggtatgtgtactttcttagctgtatcgaagaaagtgaccactgcgatgggcctagggattgcggtagttgtagtgttaactatctctgttcctgctaaccaagttatttaccaagggctgttagcacctggcgcattggcttgggccggcgcacctgaagctgacctaagcttcttgaaattcattacctttatcggtgtgatcgcggctttagttcaaattctggaaatggcactggataagtactttcctcctttgtataacgcgttaggtatcttcttacctctgatcactgtgaactgtgcgattttcggtgcggtatcatttatggttgagcgtgactataaactgggtgaaagtctggtgtttggtttcggctctggagtaggttgggcattagctatcgtattgatggccggtatccgtgagaagctgaagtatgccgatgtgcctaatggcctgcgtggtttgggtattacctttattactgctggtttaatggccttaggtttcatgtcgttttctggtgtgtctctataa

SEQ ID NO: 20219 - protein, 202 aa, Shewanella oneidensis MR-1
MEHYISLLIRSVFIENMALAFFLGMCTFLAVSKKVTTAMGLGIAVVVVLTISVPANQVIYQGLLAPGALAWAGAPEADLSFLKFITFIGVIAALVQILEMALDKYFPPLYNALGIFLPLITVNCAIFGAVSFMVERDYKLGESLVFGFGSGVGWALAIVLMAGIREKLKYADVPNGLRGLGITFITAGLMALGFMSFSGVSL

SEQ ID NO: 20220 - DNA, 579 bp, Shewanella oneidensis MR-1
  CDS (1)..(579): transl_table=11
atgagtgaatatctcctgttgttgatcagcactgtattggtcaacaatttcgttttagtgaaattcttaggtttatgtccatttatgggggtctccagcaaattggagtccgctatcggtatgtctatggccaccaccttcgtgttgactttggcatccattctcagttacctcgtgaatcaatatctgctattgccctttgacctcggttatctgcgcaccatgagctttattttagtgattgcggtggtggtgcaatttaccgagatggtcgtgcaaaaaaccagtgcagccctacaccgcgcgttggggatttatctgccgctgatcaccactaactgcgctgtattaggggtagcactattaaacgtgaatgagaaacacgattttattcaatccgctatctacggatttggtgccgcggtagggttttccttagtgttaattctgttttctgcgatgcgtgaacgtttagcggctgccgatgtaccagagccttttaaaggcggtgccatcgccatgatcaccgcgggcctgatgtccttggcctttatgggattcacaggattggttaaataa

SEQ ID NO: 20221 - protein, 192 aa, Shewanella oneidensis MR-1
MSEYLLLLISTVLVNNFVLVKFLGLCPFMGVSSKLESAIGMSMATTFVLTLASILSYLVNQYLLLPFDLGYLRTMSFILVIAVVVQFTEMVVQKTSAALHRALGIYLPLITTNCAVLGVALLNVNEKHDFIQSAIYGFGAAVGFSLVLILFSAMRERLAAADVPEPFKGGAIAMITAGLMSLAFMGFTGLVK

SEQ ID NO: 20222 - DNA, 699 bp, Shewanella oneidensis MR-1
  CDS (1)..(699): transl_table=11
atgactaattatcgcgaaattgcttggcaagggctgtggaaaaataaccctggtctagtacagcgcctcgggctttgcccattgctagcggtcacaacaaccctcaccaatgcccttggccttggtatcgccactatgctggtactgataggctctaacgtcttaatatcgttagtacgcgactatgtgcccaaggaaatccgtatccccgtgtttgtgatgatcattgcagcgctggtgacggcggtgcaacttctggtgaatgcttatgcctatgggctttatatgtcgttggggatcttcctaccgctgattgtgaccaactgcattatcattggccgcgcagaagcatttgcttcccgtaataatgcctttagctccgccttcgatggtttgatgatgggattagggtttaccttggtattggtcttacttggcgccacgcgagaaatccttggtcaaggcacactgtttgatggcgcagatcaactgcttggcccttgggcaaaagccttaacatttcaggtatggcaagttgatacgtccttcctgctagccatgttgccgcccggcgcctttatcgtcatgggtttacttatcgctcttaaaaacgttatcgataaaaagcttagagagcgtcagcctgaaacggcggttcaaccaagcgtcgcacgggcacggatcactaaagtgagttaa

SEQ ID NO: 20223 - protein, 232 aa, Shewanella oneidensis MR-1
MTNYREIAWQGLWKNNPGLVQRLGLCPLLAVTTTLTNALGLGIATMLVLIGSNVLISLVRDYVPKEIRIPVFVMIIAALVTAVQLLVNAYAYGLYMSLGIFLPLIVTNCIIIGRAEAFASRNNAFSSAFDGLMMGLGFTLVLVLLGATREILGQGTLFDGADQLLGPWAKALTFQVWQVDTSFLLAMLPPGAFIVMGLLIALKNVIDKKLRERQPETAVQPSVARARITKVS

SEQ ID NO: 20224 - DNA, 549 bp, Pseudomonas putida KT2440
  CDS (1)..(549): transl_table=11
atgaatgactacatcctggtcctgatcagcgccgcactgatcaatcacctgtgcctgctccgacagccactctccgggctgcaacttcaggtgcacggcctggcctgcgccctgtgcatcgccctgggcgtaatcggcgcgcagctgctggtgcacgcggtacttgccccgttgcacatccacgatcttgccctgtttctgctattgccctggctggccttgctcgcctggggactgccctggcttttggccaagtggcgcccggcctggcctgtagtggggttgccagcgctgctgttgagcaatgcagcagcgcttgggcttgccctgcagcagacaagcgacggcaccacctggccaaccatgctgctcaaaggcttgctgacgggtggcggcttctggctggcgctgatggtgttcgccgacctgcgccagcgcagcgcccacgccgatatccccaacgtgctgcgcggcctgcccatcgaattgatcggtgccggggtgatggctatggcgttttccggtttcaacggaatgtttggccaatga

SEQ ID NO: 20225 - protein, 182 aa, Pseudomonas putida KT2440
MNDYILVLISAALINHLCLLRQPLSGLQLQVHGLACALCIALGVIGAQLLVHAVLAPLHIHDLALFLLLPWLALLAWGLPWLLAKWRPAWPVVGLPALLLSNAAALGLALQQTSDGTTWPTMLLKGLLTGGGFWLALMVFADLRQRSAHADIPNVLRGLPIELIGAGVMAMAFSGFNGMFGQ

SEQ ID NO: 20226 - DNA, 603 bp, Clostridium tetani E88
  CDS (1)..(603): transl_table=11
atgtcaatgggtgatagattatacaatggtattattagagaaaatccaacttttgttcaggtattaggaatgtgtccaaccctagcggtaacttcaagtgctatgaatggggcaggaatgggattatcaacaactgttgtattaataggatcaaacgtagctatatcattacttagaaaagttattccagatgaaattcgtataccggcatatataactataatagctacttttgttacagtgttgcaatttttacttaaagcatatcttccagatttaaataagtctttaggtatatttataccacttatagttgttaactgtattatacttggaagagcggaagcttatgcatcaaaaaatggtatagtaagctcgttatttgatggtttgggaatgggattaggatttactttatccttaactgtactaggaataataagagaattattaggaaatggaacagtatttggttggagattaatgccacaagcatataatccagcactaataatgatacttgcacctggagctttctttacattaggaatattattggcaatattaaatgctagaaaattaaagaaagctaaaaacaattaa

SEQ ID NO: 20227 - protein, 200 aa, Clostridium tetani E88
MSMGDRLYNGIIRENPTFVQVLGMCPTLAVTSSAMNGAGMGLSTTVVLIGSNVAISLLRKVIPDEIRIPAYITIIATFVTVLQFLLKAYLPDLNKSLGIFIPLIVVNCIILGRAEAYASKNGIVSSLFDGLGMGLGFTLSLTVLGIIRELLGNGTVFGWRLMPQAYNPALIMILAPGAFFTLGILLAILNARKLKKAKNN

SEQ ID NO: 20228 - DNA, 576 bp, Clostridium tetani E88
  CDS (1)..(576): transl_table=11
atgaagatatttaccatatttttaagtgcgctattagttaataacttcgttttatctagattcttaggaatatgtcctttccttggtgtttccaaaaaagtagaaactgctacaggaatgggggcagcagttacgtttgttatggcgttagcgtctattatgacttatttagttgaaaaatttatactagtaaaatttgagataacatatttatcaacattggcatttatacttgttatagcatctctagttcaatttgttgagatggtaattaaaaaggtaagtcctgatttgtataaagcattaggtatattcttacctttaataacaacaaactgtgctgttctaggagttgcagttattaacagtgatgaaggatatactttaattgaatcattagtaaactctgtaggagcggcactaggatttacattagcccttgttttacttgcaggaattagagaaaagttagatactaacgaatatataccagaagcactaaaaggtctaccaataacacttgttacagcaggattaatggctatagcgtttctaggattccaaggactaatataa

SEQ ID NO: 20229 - protein, 191 aa, Clostridium tetani E88
MKIFTIFLSALLVNNFVLSRFLGICPFLGVSKKVETATGMGAAVTFVMALASIMTYLVEKFILVKFEITYLSTLAFILVIASLVQFVEMVIKKVSPDLYKALGIFLPLITTNCAVLGVAVINSDEGYTLIESLVNSVGAALGFTLALVLLAGIREKLDTNEYIPEALKGLPITLVTAGLMAIAFLGFQGLI

SEQ ID NO: 20230 - DNA, 639 bp, Vibrio parahaemolyticus RIMD 2210633
  CDS (1)..(639): transl_table=11
ttgttattggtgtcacaaaacacgataatattgagatcggattttaagaacgtaataactatgaccgaatatgttttgttgttggtcggcactgtgctggtgaacaactttgtactggtgaagtttttgggcttgtgtccatttatgggcgtgtctaaaaaactggaaacagcaataggcatggggttagcaaccacttttgtgctaacccttgcatctgtgtgtgcgtacttagtggaaagctatatcttgcgaccgctcggtatcgagtacttaagaaccatgagctttattttggtgatcgctgtcgtggtacagttcaccgagatggttgtacacaaaactagcccgaccctttatcgcttgcttggtatcttcttaccactaatcacgaccaactgtgccgtattgggtgttgcacttctcaacatcaatgagaatcataacttcatcgaatctatcatttatggttttggtgcagccgtcggtttttcacttgtattgatcctttttgcttctatgcgtgagcgtatcgctgcggctgacgtgcctgttccatttaaaggtgcatcgattgcaatgatcacagcgggtttaatgtcgcttgctttcatgggctttacaggtttggtgaagtaa

SEQ ID NO: 20231 - protein, 212 aa, Vibrio parahaemolyticus RIMD 2210633
MLLVSQNTIILRSDFKNVITMTEYVLLLVGTVLVNNFVLVKFLGLCPFMGVSKKLETAIGMGLATTFVLTLASVCAYLVESYILRPLGIEYLRTMSFILVIAVVVQFTEMVVHKTSPTLYRLLGIFLPLITTNCAVLGVALLNINENHNFIESIIYGFGAAVGFSLVLILFASMRERIAAADVPVPFKGASIAMITAGLMSLAFMGFTGLVK

SEQ ID NO: 20232 - DNA, 585 bp, Bacteroides thetaiotaomicron VPI-5482
  CDS (1)..(585): transl_table=11
atgaataattttaaagtaatgatgaacgggattatcaaagagaatcctatttttgtgctcctgctcggtatgtgtcctacactgggtacgacatcatcggcaatcaacggtatgggtatgggactggccactatgttcgtcctgatttgctcgaacgtggtaatttcatctatcaagaatctgattccggatatggtacgcatcccttcatttatcgtggtgatcgcgtcattcgtgacactgttgcagatgataatgcaagcatacgtgcccgatctgtatgctaccctcggtcttttcattccgctgatcgtagtaaactgtatcgtattgggacgtgcggaagctttcgcagcgaagaacaatccgctggcctctatgtttgatggtatcggtatgggatttggctttaccattgccctgactctgttgggtgccgtacgtgaattcctcggaacaggtaagatatttaatctgaccattctgccggaagaatacggaatgctgatctttgttctggctccgggtgcctttatcgctttaggttatctgattgccattattaatagtctgaagaaagcctaa

SEQ ID NO: 20233 - protein, 194 aa, Bacteroides thetaiotaomicron VPI-5482
MNNFKVMMNGIIKENPIFVLLLGMCPTLGTTSSAINGMGMGLATMFVLICSNVVISSIKNLIPDMVRIPSFIVVIASFVTLLQMIMQAYVPDLYATLGLFIPLIVVNCIVLGRAEAFAAKNNPLASMFDGIGMGFGFTIALTLLGAVREFLGTGKIFNLTILPEEYGMLIFVLAPGAFIALGYLIAIINSLKKA

SEQ ID NO: 20234 - DNA, 573 bp, Bacteroides thetaiotaomicron VPI-5482
  CDS (1)..(573): transl_table=11
atggaatatatattgatatttatctcggcaatctttgtaaacaacattgtgttgtcgcagttcctgggaatctgtccgttcctgggtgtttccaagaaggtggaaacagcgatgggtatgagtgcggcagttgctttcgtgctgactatcgctaccatcgtcacattcctgattcagaagtttgtgttggacgctttcggattggggtacttacagacaatcacttttattctggttattgccggactggtgcagatggtagaaattattctgaagaaagtttctccttctttgtatcaggcactgggtgtgttcctgccgttgattacaacgaactgctgtattctcggtgtggcaatcctggtcatccagaaagactttgatctgctgacaggtgttgtatacgcattctctactgctcttggctttggtctggcactggtattgtttgccggattgcgtgagcagatgaccctggtgaagattccgaaaggaatgcaggggactccgattgctttgattaccgcaggtttgctggcaatggcattcatgggcttctctggcgtcgtgtaa

SEQ ID NO: 20235 - protein, 190 aa, Bacteroides thetaiotaomicron VPI-5482
MEYILIFISAIFVNNIVLSQFLGICPFLGVSKKVETAMGMSAAVAFVLTIATIVTFLIQKFVLDAFGLGYLQTITFILVIAGLVQMVEIILKKVSPSLYQALGVFLPLITTNCCILGVAILVIQKDFDLLTGVVYAFSTALGFGLALVLFAGLREQMTLVKIPKGMQGTPIALITAGLLAMAFMGFSGVV

SEQ ID NO: 20236 - DNA, 627 bp, Bacteroides thetaiotaomicron VPI-5482
  CDS (1)..(627): transl_table=11
atggaacatttattaagtttattcgtccgctccatctttgtggacaacatgatattcgcgttcttcttgggtatgtgctcatatctggctgtatcgaagaatgtgaagactgccgtaggactgggtatagccgtaacattcgtgttgctggttacgcttccggtgaactatttattgcaaaccaaggtgctggctgccaacgctatcattgaaggtgttgacctcagcttcctgagttttattcttttcattgccgttattgccggtatcgtgcaattggtggagatggtggtagaacgtttcagcccgtcgctgtatgcttcactgggtatctttctgccgttgatcgccgttaactgtgctatcatgggtgcttctttgtttatgcaacaacgcatcaatctgggtgcaagcgatccgaaatacatcggtgatgtatgggatgcgctgtcttacgcactcggttcgggtatcggctggctgctggctatcgtcggtctggctgctatccgtgagaaaatggcttactctgatgtacctgctccgctaaaaggtctgggtatcacatttatcactgtaggtctgatggcaatcgcatttatgtgtttctctggtttgaacatctaa

SEQ ID NO: 20237 - protein, 208 aa, Bacteroides thetaiotaomicron VPI-5482
MEHLLSLFVRSIFVDNMIFAFFLGMCSYLAVSKNVKTAVGLGIAVTFVLLVTLPVNYLLQTKVLAANAIIEGVDLSFLSFILFIAVIAGIVQLVEMVVERFSPSLYASLGIFLPLIAVNCAIMGASLFMQQRINLGASDPKYIGDVWDALSYALGSGIGWLLAIVGLAAIREKMAYSDVPAPLKGLGITFITVGLMAIAFMCFSGLNI

SEQ ID NO: 20238 - DNA, 642 bp, Bacteroides thetaiotaomicron VPI-5482
  CDS (1)..(642): transl_table=11
atgggacaactgttttcaaagaagaataaagaagtattctctgctccgttgggaatcgataatccggtaaccgtacaggtgcttggtatctgttctgcacttgctgttactgccaagctggaacccgccattgtgatgggactttcagttactgtgattacagcgtttgccaatgtcgttatttcactgttgcgtaagacgattccaaatcgtatccgtatcatcgttcagttggtagtggttgctgctttggttaccatcgttagtgaaattctgaaagcgtttgcatacgatgtaagtgtacagctctctgtttatgtaggtttgatcattaccaactgtatcctgatgggacgtctggaagcatttgccatgcagaacggtccttgggaatcattccttgacggagttggtaacggtttgggttatgccaagattctggtaatcgtagctttcttccgcgaactgctcggttcgggaactttgcttggtttcaatatcctgaattatgagcctatccagaatatcggttatgtaaacaacggtctgatgttgatgccgccgatggcattgattatcgtagcttgcatcatctggtatcagcgtgcacgtcacaaagaactgcaagaagaaagtaattaa

SEQ ID NO: 20239 - protein, 213 aa, Bacteroides thetaiotaomicron VPI-5482
MGQLFSKKNKEVFSAPLGIDNPVTVQVLGICSALAVTAKLEPAIVMGLSVTVITAFANVVISLLRKTIPNRIRIIVQLVVVAALVTIVSEILKAFAYDVSVQLSVYVGLIITNCILMGRLEAFAMQNGPWESFLDGVGNGLGYAKILVIVAFFRELLGSGTLLGFNILNYEPIQNIGYVNNGLMLMPPMALIIVACIIWYQRARHKELQEESN

SEQ ID NO: 20240 - DNA, 696 bp, Shigella flexneri 2a str. 2457T
  CDS (1)..(696): transl_table=11
gtgagcgaaattaaagacgttattgttcaggggttgtggaaaaacaactctgcactggtccaactgctcggcctttgtccgctattggcggtcacatccactgccactaacgctctgggtttaggacttgcgactacgctggtactgacgctgaccaacctgaccatttcgacgctgcgtcactggacgccagccgagatccgcattcccatttacgtgatgatcatcgcctcggtggtcagcgctgtacagatgctgatcaacgcctacgcctttggcctgtatcaatcattagggatttttattccgctgattgtcactaactgtatcgttgtgggccgcgctgaagccttcaccgccaaaaaaggtccggcgctttcggcactggacggcttttcaattggtacgggcgcaacctgcgccatgttcgtgctgggttcactacgcgaaattatcggcaatggcacgttgtttgacggtgcagatgcgctgttaggtagctgggcaaaagtattacgcgtggagattttccacaccgactcccctttcctgctggcgatgctgccaccaggtgcatttattggcttgggactgatgctggcaggaaaatacctgattgatgaaagaatgaaaaagcgccgtgctgaagcagctgccgaacgtgcattgccaaacggtgaaacagggaatgtctga

SEQ ID NO: 20241 - protein, 231 aa, Shigella flexneri 2a str. 2457T
MSEIKDVIVQGLWKNNSALVQLLGLCPLLAVTSTATNALGLGLATTLVLTLTNLTISTLRHWTPAEIRIPIYVMIIASVVSAVQMLINAYAFGLYQSLGIFIPLIVTNCIVVGRAEAFTAKKGPALSALDGFSIGTGATCAMFVLGSLREIIGNGTLFDGADALLGSWAKVLRVEIFHTDSPFLLAMLPPGAFIGLGLMLAGKYLIDERMKKRRAEAAAERALPNGETGNV

SEQ ID NO: 20242 - DNA, 609 bp, Nitrosomonas europaea ATCC 19718
  CDS (1)..(609): transl_table=11
atgaacagtctggccggtttatttattaccgcagttttcgtcgagaatcttgcgcttactttttttcttggcatgtgcacttttctggccatttccaaaaaaatagaggtggcgttcggcatgggaattgccgtgatcgtcgtccagacattgacggttcccatcaataatctggtttatcagtacctgcttcgtgacggtgctctggtctgggcaggtctggcggagattgatttaactttcctcgggctcgtcagttatcttggggttatcgccgcgatagtacagattctggaaatgtttctggatcgtttcatgccggctctgcacagtgcattgggcatctatctgccactgattgccgtgaattgtgccattctgggtggttcattgttcatggtggaacgtgactataattttactgagagccttgtatatggtctcggctccggtttcggttgggcgttggcaattgttgcgctggctggtgtacgtgaaagactcaaatattcggatgtgccagacggtttacagggactgggcattacttttatcagtgcgggattgatggctatgggattcatggccttctccggcattcggctttaa

SEQ ID NO: 20243 - protein, 202 aa, Nitrosomonas europaea ATCC 19718
MNSLAGLFITAVFVENLALTFFLGMCTFLAISKKIEVAFGMGIAVIVVQTLTVPINNLVYQYLLRDGALVWAGLAEIDLTFLGLVSYLGVIAAIVQILEMFLDRFMPALHSALGIYLPLIAVNCAILGGSLFMVERDYNFTESLVYGLGSGFGWALAIVALAGVRERLKYSDVPDGLQGLGITFISAGLMAMGFMAFSGIRL

SEQ ID NO: 20244 - DNA, 672 bp, Nitrosomonas europaea ATCC 19718
  CDS (1)..(672): transl_table=11
atgatggcacaatccgtccgcaaaattttatttacacccgttgttaacgaaaatccgattacactgcaagtactggggatctgttcagcgctggcggttaccagcaaagtatctacagctttgactatgtgtattgctttgacgctggtcgtagcctgttccagcatgctgatcagtctgattcgtcattacatccctacgaatattcgtattatcatacaaatgacgattgccgcctcgctggtgatcgtggttgaccagttcctgcgggcatttgcctatgaggtcagtcgggagctctcggtattcgtcagtctgatcgttaccaattgtatcgtcatggggcgggcagaggcatttgccatgaaaaatccgccctggccgagtttccttgatggattgggtaatggtctcgggtacagcgcgattttgctgatagtcgggataatacgtgaactgttcggttcgggctccctgctgggagttacgatcctgccactcattcgggatggtggttggtatgaacccaatggattgttattattgccgcccagcgctttctttctgatcggattgatcatctggggggtgcgctcctggaaaacgaatcaagtcgagcaacccgagttccgcatccagcagacccataatcctactgagatcataagatga

SEQ ID NO: 20245 - protein, 223 aa, Nitrosomonas europaea ATCC 19718
MMAQSVRKILFTPVVNENPITLQVLGICSALAVTSKVSTALTMCIALTLVVACSSMLISLIRHYIPTNIRIIIQMTIAASLVIVVDQFLRAFAYEVSRELSVFVSLIVTNCIVMGRAEAFAMKNPPWPSFLDGLGNGLGYSAILLIVGIIRELFGSGSLLGVTILPLIRDGGWYEPNGLLLLPPSAFFLIGLIIWGVRSWKTNQVEQPEFRIQQTHNPTEIIR

SEQ ID NO: 20246 - DNA, 627 bp, Rhodopirellula baltica SH 1
  CDS (1)..(627): transl_table=11
atggctgcccccaaagtcggcaaggtcctgtttggacctgtcatcgacaacaacccaatcgcgttgcagatcctgggcatttgtagtgctctggctgtgacgaccagcatccaagtctcgatcgtcatggctctggccgtgatcgcggtgaccgggtgttccaatgcggcggtctcgtccattcgtcactacattcccggcagcatccggatcatcgttcagatgaccgtgatcgcgtcgttggtgatcgtcgttgaccaagtgttgaaggcgtacatgtacgaaatcagcaagcagctttcggtcttcgtgggtttgatcatcaccaactgtatcgtcatgggacgtgcggaaggtttcgctatgaagaatggcgtgtggatcagcttcctcgacggaatcggaaacggactgggatacggattggtcctgatcgtcgtcgcgttcttccgcgaattgttcggcagcggttcgctgttgggcttcgagctctttcaactggaccgcaacggcggctggtacaacccgaacaacttgatgctgttgccgcccagtgcgttcttcatcatcgggttcatgatttgggtcattcgtttgaacaaacccgaacaaatcgaagaggcctaa

SEQ ID NO: 20247 - protein, 208 aa, Rhodopirellula baltica SH 1
MAAPKVGKVLFGPVIDNNPIALQILGICSALAVTTSIQVSIVMALAVIAVTGCSNAAVSSIRHYIPGSIRIIVQMTVIASLVIVVDQVLKAYMYEISKQLSVFVGLIITNCIVMGRAEGFAMKNGVWISFLDGIGNGLGYGLVLIVVAFFRELFGSGSLLGFELFQLDRNGGWYNPNNLMLLPPSAFFIIGFMIWVIRLNKPEQIEEA

SEQ ID NO: 20248 - DNA, 642 bp, Rhodopirellula baltica SH 1
  CDS (1)..(642): transl_table=11
atggtcgaacaatacctcagcgtctttttgaaggcggtcttcgtcgagaaccttgcactcgcattctttcttggaatgtgcaccttcttggctgtcagtaaaaacgtcaaaacggcaatcggcttgggcatcgcggtcatcgcgattgaaaccatcaccgtgcctgccaaccaattgatttacagcctgttgctgaagaaaggtgcgttgacctgggtcaatgattacctgatcagcactgacacgtacaacttcgcggaggtcgacctgaccttcctcgggttcatcagttacatcggtgtgattgccgccatggttcagatcttggaaatgttcctcgatcgattcatgcccagcctttacaacgccctggggatcttccttcccctgatcacggtgaactgtgccatcctgggtgcgtcgctgttcatggagcaacgcgagtatccgttcggcgaatcggtcgtcttcggattcggatgtggtgtcggttgggctttggcgatcatggctttggccggtattcgcgaaaaattgaagtacagcgacgttcctccgccacttcgcggtttgggaatcacgtttatcacggttggattgatgtccctggcattcatgtcgtttagcggcatccagctgtaa

SEQ ID NO: 20249 - protein, 213 aa, Rhodopirellula baltica SH 1
MVEQYLSVFLKAVFVENLALAFFLGMCTFLAVSKNVKTAIGLGIAVIAIETITVPANQLIYSLLLKKGALTWVNDYLISTDTYNFAEVDLTFLGFISYIGVIAAMVQILEMFLDRFMPSLYNALGIFLPLITVNCAILGASLFMEQREYPFGESVVFGFGCGVGWALAIMALAGIREKLKYSDVPPPLRGLGITFITVGLMSLAFMSFSGIQL

SEQ ID NO: 20250 - DNA, 591 bp, Porphyromonas gingivalis W83
  CDS (1)..(591): transl_table=11
atgagtaagaatttgagtgttattataaacggcattatcaaggagaacccgacattcgtcctcctcctcggtatgtgtcctacgttggccacgacaacgtcggccatcaacggtatgagtatgggactggccaccatgtttgtattgatctgctccaacatggtagtatccttggtcaagaatctcatccccgatatggttcgtatcccggcttttattgtcatcattgcaggtttcgtgacgatattgcagatgcttatcaaggcttatatgccggatttggacaagagtctcggtatcttcatcccactgatcgtggtgaactgtatcgtactcggtcgtgctgaagccgttgcatcgaaaaaaggtctgctacactccatgttcgacggtatcggtatcggattgggctttaccctcagtttgactgttctcggtattgtccgtgagcttttgggtagcggtaagcttttcgactttgcagttttcaatgaatcctatggagcattgatcttcgtattggcacccggagctttcatcgctttgggctacctgattgccttggtgaacaaaatgaagaaaaaagcataa

SEQ ID NO: 20251 - protein, 196 aa, Porphyromonas gingivalis W83
MSKNLSVIINGIIKENPTFVLLLGMCPTLATTTSAINGMSMGLATMFVLICSNMVVSLVKNLIPDMVRIPAFIVIIAGFVTILQMLIKAYMPDLDKSLGIFIPLIVVNCIVLGRAEAVASKKGLLHSMFDGIGIGLGFTLSLTVLGIVRELLGSGKLFDFAVFNESYGALIFVLAPGAFIALGYLIALVNKMKKKA

SEQ ID NO: 20252 - DNA, 573 bp, Porphyromonas gingivalis W83
  CDS (1)..(573): transl_table=11
atggaatttttcatgttattcatagcggcggttttcgttaataacgtcgtgctgtcgcagttcctcggtatatgcccattcttaggcgtatcgaagaaggtagacacctcaatcggtatgggtgcagccgtgacattcgtattggcactggctaccttggttaccttcctgattcagaagttcgttttggatcgtttcggattgggctttatgcagaccattgcatttattttggtcattgccgccttggtgcagatggtggagatcatactcaagaaagtatctcctcccctctatcaggcactgggtgtattcttgcccttgattacgacgaactgctgtgtgctcggtgtggctattttggttatccagaaggattataccctgctccagagcttcgtctatgcaatatccacggctatcggtttcaccttggcaatggttactttcgcaggtattcgagagcaactcgatatgaccaatctccccaaagctatgaagggaataccttcggcactcttggctgccggtatattggctatggctttcatgggcttcagcggtatcgcctaa

SEQ ID NO: 20253 - protein, 190 aa, Porphyromonas gingivalis W83
MEFFMLFIAAVFVNNVVLSQFLGICPFLGVSKKVDTSIGMGAAVTFVLALATLVTFLIQKFVLDRFGLGFMQTIAFILVIAALVQMVEIILKKVSPPLYQALGVFLPLITTNCCVLGVAILVIQKDYTLLQSFVYAISTAIGFTLAMVTFAGIREQLDMTNLPKAMKGIPSALLAAGILAMAFMGFSGIA

SEQ ID NO: 20254 - DNA, 615 bp, Porphyromonas gingivalis W83
  CDS (1)..(615): transl_table=11
atggattacataagtatgtttgtccgctcgatattcgtggacaatatggtttttgcctactacttgggaatgtgttctttcttggccgtttccaagaatgtgaagacctctatcggactcggagctgccgtgactttcatcttggtctgcaccttgcccatcaactatctgttacagaactatattttcaaggccggtgctctttcttggctcggatcccaatatgccgaagtggatctgagcttcctctcactgatcatctttatcgcggtgattgcatcctttacgcagctcgtggaaatggtggtggagagattcagcccctccctctatgcttcgctgggtatcttccttcccttgatcgcggtgaactgcgcgatcctcggaggatcgcttttcatgcagcagcgtgagtttatcaatgtcgggatggctaccgtctatggattcggctccggtatcggctggatgctggctatcgtagggatggctgccatacgcgagaagctggcatattccaacgtccccaaaccgttgagagggttgggtatcacttttattatcaccggtctcatgggtattgctttcctgagcttctccggcgtgaaactctaa

SEQ ID NO: 20255 - protein, 204 aa, Porphyromonas gingivalis W83
MDYISMFVRSIFVDNMVFAYYLGMCSFLAVSKNVKTSIGLGAAVTFILVCTLPINYLLQNYIFKAGALSWLGSQYAEVDLSFLSLIIFIAVIASFTQLVEMVVERFSPSLYASLGIFLPLIAVNCAILGGSLFMQQREFINVGMATVYGFGSGIGWMLAIVGMAAIREKLAYSNVPKPLRGLGITFIITGLMGIAFLSFSGVKL

SEQ ID NO: 20256 - DNA, 630 bp, Porphyromonas gingivalis W83
  CDS (1)..(630): transl_table=11
atgtcactttggaataaaaagaataaggaaattcttctcgggccgctaagcagcaacaatcccgttatcgtgcagatgcttggtatctgctctgctctggccgtaacagccaagctgcaaccggctattgtcatggccctgtcggttactgcggtagtagcttttgccaacgttattatctctctcctgcgcaatacgatccccggacgcatccgaattatcgttcagctcgtcgtggtcgcagctctggtgactatcgtgagtcaggtactgaaagccttcgcttacgatgtgaacaagcagttgtccgttttcgtcggcctgatcattaccaactgtattttgatgggacgtttggaggcttttgccttggccaatcgtccttgggagtcattcctcgatggtatcggaaacggtctgggatatggatgggttttggttattatcgctttcttccgcgaattgctcggctccggtacattgctggatataaaagtcattcccaagagcttctacgaatcgggttatgtcaataacggtctgatgatcttgccgccgatggctctgatcaccgtggcagttgtcatctgggtacatcgtgcccgtaacaaggatttgcaagagaactaa

SEQ ID NO: 20257 - protein, 209 aa, Porphyromonas gingivalis W83
MSLWNKKNKEILLGPLSSNNPVIVQMLGICSALAVTAKLQPAIVMALSVTAVVAFANVIISLLRNTIPGRIRIIVQLVVVAALVTIVSQVLKAFAYDVNKQLSVFVGLIITNCILMGRLEAFALANRPWESFLDGIGNGLGYGWVLVIIAFFRELLGSGTLLDIKVIPKSFYESGYVNNGLMILPPMALITVAVVIWVHRARNKDLQEN

SEQ ID NO: 20258 - DNA, 630 bp, Photorhabdus luminescens subsp. laumondii TTO1
  CDS (1)..(630): transl_table=11
atggctgatagtaaagaaataaaacgagtccttcttgggccactcttggataataacccgattgcattgcaggttttggggatttgctcagcgctggcggtaacaaccaagctggaaacggcgttggtcatgacaatagcggtaacattggtgactgccttttccagcttttttatctcgttgattcgtcattacatccccggcagtgtgcggatcattgtccagatggctattattgcatcactggttatcgtggtagatcagattttacaggcttatgcttatgagatttccaagcagttgtcggtatttgttggtcttatcattactaactgtatcgtgatgggacgtgcggaagcctatgcgatgaagtctccacccattgagagctttatggatggtatcggtaatggtttaggttacggggttattctggtattggttggtttcctgcgtgagttgtttggttccggcaaactgtttgggattaccgtgatggaatcggtacagaatggtggctggtatcaacctaatggtttgttcctgttagccccaagcgcgtttttcattattggtatgctgatttggggtctgaggacgttgaaaccggcgcaggttgagaaggagtaa

SEQ ID NO: 20259 - protein, 209 aa, Photorhabdus luminescens subsp. laumondii TTO1
MADSKEIKRVLLGPLLDNNPIALQVLGICSALAVTTKLETALVMTIAVTLVTAFSSFFISLIRHYIPGSVRIIVQMAIIASLVIVVDQILQAYAYEISKQLSVFVGLIITNCIVMGRAEAYAMKSPPIESFMDGIGNGLGYGVILVLVGFLRELFGSGKLFGITVMESVQNGGWYQPNGLFLLAPSAFFIIGMLIWGLRTLKPAQVEKE

SEQ ID NO: 20260 - DNA, 597 bp, Photorhabdus luminescens subsp. laumondii TTO1
  CDS (1)..(597): transl_table=11
atggaacattttataagcctgtttgtccgcgctgtctttattgagaacatggcgttggctttcttcctcggtatgtgcacctttttggccgtatcgaaaaatgtcacaacagcgtttggtctgggtattgccgtcacggtggttttagggatctcggttcctgctaataacctggtgtataacttggtattgcgtgacggtgcattggttgaaggggttgatctcagctttctgaactttattacatttattggcgtgattgctgcattagtgcagattcttgaaatgatccttgatcgttatttcccttcactctataacgcgcttggcatttttttaccactgattacggttaactgtgcgatttttggtggtgtctctttcatggcgcagcgtgactataacttttctgaatccatcgtgtatggttttggctcaggtataggttggatgttggcaattgttctgctggcttctatccgtgaaaaaatgaaatatgctgatgttccagcgggtctgaaaggattggggatcacctttgtcactacgggtttgatggcattgggttttatgtccttctctggtgtccagttataa

SEQ ID NO: 20261 - protein, 198 aa, Photorhabdus luminescens subsp. laumondii TTO1
MEHFISLFVRAVFIENMALAFFLGMCTFLAVSKNVTTAFGLGIAVTVVLGISVPANNLVYNLVLRDGALVEGVDLSFLNFITFIGVIAALVQILEMILDRYFPSLYNALGIFLPLITVNCAIFGGVSFMAQRDYNFSESIVYGFGSGIGWMLAIVLLASIREKMKYADVPAGLKGLGITFVTTGLMALGFMSFSGVQL

SEQ ID NO: 20262 - DNA, 582 bp, Photorhabdus luminescens subsp. laumondii TTO1
  CDS (1)..(582): transl_table=11
atgactgactattttcttttatttgtcggaaccgtattggttaacaatttcgtcttggtgaaattcctcggcttatgccctttcatgggcgtatctaaaaagctggaaactgccatcgggatgggatttgcgacaacatttgttatgacactagcctctgtatgttcatggctggtgaatacttttattctattaccactggacttaatctatttgcgtactctgagctttattcttgtcattgcggtcgtagtgcaattcacagagcttgttgtacgcaaaaccagcccgacgttataccggttattaggtattttcttgccgttgattacgacgaactgtgctgtactgggtgtggcgctgctgaatatcaatcaatcacacgattttttacaatccgctatctatggtttcggtgctgccgccggtttctctctcgttatggtactgtttgccgctattcgcgaacgtctggctgttgctgatgtacccgcccctttcaaggggtcatctattggtcttattactgcgggtttaatgtccttggcttttatgggctttagtggtttggtgaaattctga

SEQ ID NO: 20263 - protein, 193 aa, Photorhabdus luminescens subsp. laumondii TTO1
MTDYFLLFVGTVLVNNFVLVKFLGLCPFMGVSKKLETAIGMGFATTFVMTLASVCSWLVNTFILLPLDLIYLRTLSFILVIAVVVQFTELVVRKTSPTLYRLLGIFLPLITTNCAVLGVALLNINQSHDFLQSAIYGFGAAAGFSLVMVLFAAIRERLAVADVPAPFKGSSIGLITAGLMSLAFMGFSGLVKF

SEQ ID NO: 20264 - DNA, 699 bp, Photorhabdus luminescens subsp. laumondii TTO1
  CDS (1)..(699): transl_table=11
atgagtgaaaccaaaaatttatttatccaagggctatggaaaaacaattccgctttagtacaactgctaggattgtgccccctgttagccgtctcttccactgcaaccaatgcgctcggcttagggctggcaacgacactggttctagtctgtaccaacattgcggtttccagcttgcgtcgttgggtacccaatgagatccgtattcccatttatgttatgataatcgcttcggttgtcagtactgtccagatgttgattaacgcctacgcttttggtctgtatgaatcattggggattttcattccactgattgtgactaactgtattgttatcggccgtgctgaagcctatgccgcgaaaaatccgatcatgccctctgcgattgatggcttagcaatgggattaggagccacttttgctctgtttgttcttggtgctattagagaaattctcggcaatggaaccctatttgatggcgctgatttactgctgggcaattgggctaaggtattacgaatagaaatcgttcatatggattcccctttcctattagccatcttaccacccggcgcttttatcggtttgggattaatgctggcagtgaaatatcttattgatgaaaaaatgaaaacgagagcaataaaagaaaaaagccgtgcaataacaatgtcaccagaatcggagagttctatttga

SEQ ID NO: 20265 - protein, 232 aa, Photorhabdus luminescens subsp. laumondii TTO1
MSETKNLFIQGLWKNNSALVQLLGLCPLLAVSSTATNALGLGLATTLVLVCTNIAVSSLRRWVPNEIRIPIYVMIIASVVSTVQMLINAYAFGLYESLGIFIPLIVTNCIVIGRAEAYAAKNPIMPSAIDGLAMGLGATFALFVLGAIREILGNGTLFDGADLLLGNWAKVLRIEIVHMDSPFLLAILPPGAFIGLGLMLAVKYLIDEKMKTRAIKEKSRAITMSPESESSI

SEQ ID NO: 20266 - DNA, 705 bp, Vibrio vulnificus YJ016
  CDS (1)..(705): transl_table=11
gtggaggccactatgagtgagcataaaaaattacttaaaaatggcatgtgggacaacaaccctgcactggtccagctacttggtctgtgtccgctactggcggtatcgtcaaccgtcaccaacgcacttggtctcggcatcgcaacattattggttctcgttggctccaacgtcactgtttctctgattcgtaactacgtaccaaaagaaattcgtattccggtattcgttatgatcattgcctcactggtcacgtgcgttcaattactgatgaacgcctacgcctatggcttatacctatcattgggcattttcattcctttgattgtgaccaactgcatcatcatcggccgtgctgaagcgtacgcatcaaaaaatgatcctttgcctgcggcattagatggcttttggatgggcatgggtatgaccaccgtgctcgtcgttctcggcgcaatgcgcgaaatcatcggcaacggtacccttttcgatggcgcggatcttctgctgggtgaatgggcgagcgcactgcggattcaggtattccaatttgacagtagcttcctactggcgctgttaccgcctggggcatttattggtgtcggcctgctcatcgcgttgaaaaatgtcatcgatacacagttgaaagctcgccaacctaaacaagaaaaacccgcgattgaacgcgctcgcgtgactaacgcgtaa

SEQ ID NO: 20267 - protein, 234 aa, Vibrio vulnificus YJ016
MEATMSEHKKLLKNGMWDNNPALVQLLGLCPLLAVSSTVTNALGLGIATLLVLVGSNVTVSLIRNYVPKEIRIPVFVMIIASLVTCVQLLMNAYAYGLYLSLGIFIPLIVTNCIIIGRAEAYASKNDPLPAALDGFWMGMGMTTVLVVLGAMREIIGNGTLFDGADLLLGEWASALRIQVFQFDSSFLLALLPPGAFIGVGLLIALKNVIDTQLKARQPKQEKPAIERARVTNA

SEQ ID NO: 20268 - DNA, 639 bp, Vibrio vulnificus YJ016
  CDS (1)..(639): transl_table=11
ttgttattacccggacaaagcacgataatatcgggatcggatttgcagaacgtaataattatgaccgaatatattttgttgttgattggcaccgtcctcgtaaacaactttgtactggtgaagtttctcggattgtgtcccttcatgggcgtgtcaaaaaaattggaaaccgcaattggtatgggcttggcaacgacctttgtccttactatggcttccgtgtgcgcttatcttgttgaaagctacattcttgagccattgcacatcgaatacctacgaaccatgagctttattttggtgattgcggtggtggtccagtttacggaaatggtggttcacaagaccagcccaaccctctatcgcctgctgggtatttttctacctttgattaccaccaactgtgccgtgttgggggttgctctactgaatatcaatgaaaaccactcgtttgttgaatccatcatctatggttttggtgcagcggttggtttttctttagtactgattctgtttgcttcgatgcgtgagcgcatttctgcagcggatgtgcccgcgccttttaaaggggcttccattgcgatgattactgcaggattaatgtcgctagcgtttatgggctttacggggttggtgaaataa

SEQ ID NO: 20269 - protein, 212 aa, Vibrio vulnificus YJ016
MLLPGQSTIISGSDLQNVIIMTEYILLLIGTVLVNNFVLVKFLGLCPFMGVSKKLETAIGMGLATTFVLTMASVCAYLVESYILEPLHIEYLRTMSFILVIAVVVQFTEMVVHKTSPTLYRLLGIFLPLITTNCAVLGVALLNINENHSFVESIIYGFGAAVGFSLVLILFASMRERISAADVPAPFKGASIAMITAGLMSLAFMGFTGLVK

SEQ ID NO: 20270 - DNA, 573 bp, Treponema denticola ATCC 35405
  CDS (1)..(573): transl_table=11
atgcccgaaacacttagtatttttctttctgcaatccttgtaaaaaacgtagttttaatgcgctttttagccctttgcccctttataggaatgtcctccgacgtaaaaaaatcggtaggcatgggctgggccgtactcttcgttactcttttggccacagccgtaacctatcccatatacaattacgtattgataggaaacctcgaattccttcagacccttatctttatcttggtaattgcaagcttggttcagctggtagaattctatctaaaaaaagcggctcctgccctttacagctcgatgggggtttatttggccctgattacgacaaactgtgcaatccttgcagttacaatcgatgccattgatgaaggctatacctttgtacaagcccttgttcatgctgcaggttcagctttcggctttatgatttcgctcttgcttttggcaggcttaagacaaagaatagataatgcccctgttccgaaattcttaaaaggaacgcccattctctttattgctgcagcccttctatccatggcatttgaaggtttcaaaggactgatttaa

SEQ ID NO: 20271 - protein, 190 aa, Treponema denticola ATCC 35405
MPETLSIFLSAILVKNVVLMRFLALCPFIGMSSDVKKSVGMGWAVLFVTLLATAVTYPIYNYVLIGNLEFLQTLIFILVIASLVQLVEFYLKKAAPALYSSMGVYLALITTNCAILAVTIDAIDEGYTFVQALVHAAGSAFGFMISLLLLAGLRQRIDNAPVPKFLKGTPILFIAAALLSMAFEGFKGLI

SEQ ID NO: 20272 - DNA, 660 bp, Treponema denticola ATCC 35405
  CDS (1)..(660): transl_table=11
atgaaaaatttaagcattttcacaaacggaattatccgaaacaatccccttttggttttaatgataggcctctgttcttctctggctgttacaacaaatatcctaaacggccttggaatgggacttgcaatgacctttgttatcgttatgagcgagttaatcataagtatttttagaaaactaattcctcaggacataagaattccggtttttatcatagtaatagcctcttttacgaccattgtagacctattgatgcaggcctatacccctgccctagcggatgcaatgggactttttattaagctgatcgttgtaaactgtattattatgggaagagtcgaatcctttgcttcaaaagaaagccccggaaaatccgttttagacgctctgggaatgggagtcggctatacgatagttcttgtgcttatttcggctataagagaaatcttaggctcgggatccttggctggaaacgtctttatacccgaagcctatcatatacgcttttttgcaaatgcacccggcggcttttttgtattcggtattatgatttcgataaacctctttgcaaaaaagcttttagaaagacctaagaaaaaaattcaaagttcgcctgctccgcaaaccgagccggaagctaaaaaagaggaggagtaa

SEQ ID NO: 20273 - protein, 219 aa, Treponema denticola ATCC 35405
MKNLSIFTNGIIRNNPLLVLMIGLCSSLAVTTNILNGLGMGLAMTFVIVMSELIISIFRKLIPQDIRIPVFIIVIASFTTIVDLLMQAYTPALADAMGLFIKLIVVNCIIMGRVESFASKESPGKSVLDALGMGVGYTIVLVLISAIREILGSGSLAGNVFIPEAYHIRFFANAPGGFFVFGIMISINLFAKKLLERPKKKIQSSPAPQTEPEAKKEEE

SEQ ID NO: 20274 - DNA, 744 bp, Parachlamydia sp. UWE25
  CDS (1)..(744): transl_table=11
atgtggatgggaccctacagcgtgctaaacctttttggtttgttattacaagctgtatttattgagaactttttacttgtcaatttcttaggaatgtgtacctatttagcctgttctaataagctaaaaacagctaatggattgggtatcgctgttgtttttgtattgacagtttctggagttttaaattggtttgtgcatcgttttgtgacaggcccgggagctttaacctggctaagtgcattcggaatagatagttctcaagtcaatctcggttttttggagtttctactatttatctctgtgattgcaggttttacacaaatcctcgaaatcatcattgaaaaagtctctcccgccctttatatgtcgcttggactctatcttcctctcattgcagtcaattgtgcgattttaggagcttgcttatttgcagtgactcgagattatccttttttccctaaccttatttacgtctttggttcagctgtaggctggtggcttgccattgctttgattgcagctattcgagaaaaaatagcgatatctaatgtggttcccgaattaaaaggaatggggattacttttatcatgtcaggattaatgtctatggcatttatggggtttactggtatcaagcttgctgatccttcgccaccagaagctacttctgaacaacctttaaaagaattggcgttatcggatgattcttcctctcaggaaacattgacgttaagcaaataa

SEQ ID NO: 20275 - protein, 247 aa, Parachlamydia sp. UWE25
MWMGPYSVLNLFGLLLQAVFIENFLLVNFLGMCTYLACSNKLKTANGLGIAVVFVLTVSGVLNWFVHRFVTGPGALTWLSAFGIDSSQVNLGFLEFLLFISVIAGFTQILEIIIEKVSPALYMSLGLYLPLIAVNCAILGACLFAVTRDYPFFPNLIYVFGSAVGWWLAIALIAAIREKIAISNVVPELKGMGITFIMSGLMSMAFMGFTGIKLADPSPPEATSEQPLKELALSDDSSSQETLTLSK

SEQ ID NO: 20276 - DNA, 636 bp, Parachlamydia sp. UWE25
  CDS (1)..(636): transl_table=11
atgagccagcccgaacctccagtttcgagttattttacctcgcaaatttggtctagtaaccaagttttagtagctgttttgggaatttgttctgccttagcgattaccaatcgattaagtgttgccattacgatggggctttcagtatcatttgtcacagctttttcctctctttttgtttccttactgagaaaaattactccagacagtgttcgcatgatcgttcaattagcaattatttccgtttttgtcattattattgatcagtttttacaagcttatttttttggtatttctaaagttttaagtgtatttgttggattaattattacaaattgcattgtgatgggaagaacagaaggaatggcgaaaaatgtagggcctttagcagcttttttagacgggttaggtgctggaacgggctatgccattgtcttattcattattgcttttattagagaattatttggatttggccaactatttggttatcaagttatccctcaatcatggtatgccacagcagcaaatcctgacggctatgaaaactttgttctaatggttagtcctccggcagctttttttctgatcggtggtctcatttacgtatctaaaaaaatgcaaggtaatgcttaa

SEQ ID NO: 20277 - protein, 211 aa, Parachlamydia sp. UWE25
MSQPEPPVSSYFTSQIWSSNQVLVAVLGICSALAITNRLSVAITMGLSVSFVTAFSSLFVSLLRKITPDSVRMIVQLAIISVFVIIIDQFLQAYFFGISKVLSVFVGLIITNCIVMGRTEGMAKNVGPLAAFLDGLGAGTGYAIVLFIIAFIRELFGFGQLFGYQVIPQSWYATAANPDGYENFVLMVSPPAAFFLIGGLIYVSKKMQGNA

SEQ ID NO: 20278 - DNA, 576 bp, Desulfovibrio vulgaris subsp. vulgaris str. Hildenborough
  CDS (1)..(576): transl_table=11
atggacgtattcgagattttcatctcagccatcttcgtcaacaacatcgtcctcgcccagtatctcggcaactgcccgtatctcggctgttcccgcgagaagggcgtggccctcggcatgggggcggcggttgtcttcgtcatcatcatggcgacgctgtgcacatggctcatccagtaccatgtgctggttcccttcgacctcgcctatctccagaccatcgtgttcattctggtcatcgcggggcttgtgcagttcgtcgagatgttcctcaagaagatggtgccccccctgtatgcggcactgggcatcttccttccgctcatcaccaccaactgcgccgtcatgggcgtgaccatcctcgtacagcgcgaagaatacgacctcatgacctcgctcacgtacggtctggcttccagcctcggcttcgtgctggcgctgctgctcatggcgggcatccgcgagcgactcgacacggcgcgggtacccaaggccatgataggcacgcccatcgcgctcatcatggcggggctcatgtcgctggcgttcatggccttcaagggcatgacctcgtag

SEQ ID NO: 20279 - protein, 191 aa, Desulfovibrio vulgaris subsp. vulgaris str. Hildenborough
MDVFEIFISAIFVNNIVLAQYLGNCPYLGCSREKGVALGMGAAVVFVIIMATLCTWLIQYHVLVPFDLAYLQTIVFILVIAGLVQFVEMFLKKMVPPLYAALGIFLPLITTNCAVMGVTILVQREEYDLMTSLTYGLASSLGFVLALLLMAGIRERLDTARVPKAMIGTPIALIMAGLMSLAFMAFKGMTS

SEQ ID NO: 20280 - DNA, 582 bp, Erwinia carotovora subsp. atroseptica SCRI1043
  CDS (1)..(582): transl_table=11
atgaccgaatacgcattgctctttgttagcatccttctggtaaataatttcgtcttagtgaagtttcttgggctgtgcccctttatgggcgtgtccaaaaaactagagacggcgattggcatgggaatggcgaccacgtttgtgatgacgctgggctcgatgttttcctggctgatcaacgaatttattcttgtcccgctcgacattctctatttacgcaccatggcttttattctggtgctcgccgttgtggtgcagttctccgagatgttcgtgcgcaaagttagccctgagctgtatcgcctgctggggattttcctaccgctgatcaccaccaactgtgccgtgcttggcgtcgtcttgctcaacatcaacctgtcgcacggttttctgcaatcgacaatttatggtttcggcggtgccgcaggattctcactggtgatggtccttttcgccgccatccgcgagcgcctcgccgtgtcggacattcccgcgccgttccgaggttcgtctatcgcactgatcaccgctggcctgatgtcgctggcatttatgggctttaccggactggtgaaattctga

SEQ ID NO: 20281 - protein, 193 aa, Erwinia carotovora subsp. atroseptica SCRI1043
MTEYALLFVSILLVNNFVLVKFLGLCPFMGVSKKLETAIGMGMATTFVMTLGSMFSWLINEFILVPLDILYLRTMAFILVLAVVVQFSEMFVRKVSPELYRLLGIFLPLITTNCAVLGVVLLNINLSHGFLQSTIYGFGGAAGFSLVMVLFAAIRERLAVSDIPAPFRGSSIALITAGLMSLAFMGFTGLVKF

SEQ ID NO: 20282 - DNA, 624 bp, Desulfotalea psychrophila LSv54
  CDS (1)..(624): transl_table=11
atggctgatactaatagagaactgctactacgctccatttttaagcgtaatcctatcgcccttctggttctgggggtctgttcggcccttgccgtcaccgggcagatgacgacggctcttgtcatggctgtttgtgttactctggtggtggctttttccagtcttatcataagtctggtccgttttcaaattcccaatagcgtccgtattggcatccagataaccgttatcgccaccctggttattctggtggatcagtttcttaaggcattttactatgatctctccaaacagctctccatctatgtgggtctgattattaccaactgtattgttatgggccgggccgagggctatgccatgcataatccccctatagcaagttttgtcgatggtattggtaatgggcttggttatggatttattctcatgtccgtggcattttttcgtgagctccttggctcgggtagcctcttcgggatcactgtcttaccactcaccaccgacggtggctggtatcagagaaatggtttattggtgctaccggccagtgccttttttcttattgccctgctgatctggttgtttagaaccattgatcccagccaacaggagaaagagtaa

SEQ ID NO: 20283 - protein, 207 aa, Desulfotalea psychrophila LSv54
MADTNRELLLRSIFKRNPIALLVLGVCSALAVTGQMTTALVMAVCVTLVVAFSSLIISLVRFQIPNSVRIGIQITVIATLVILVDQFLKAFYYDLSKQLSIYVGLIITNCIVMGRAEGYAMHNPPIASFVDGIGNGLGYGFILMSVAFFRELLGSGSLFGITVLPLTTDGGWYQRNGLLVLPASAFFLIALLIWLFRTIDPSQQEKE

SEQ ID NO: 20284 - DNA, 609 bp, Desulfotalea psychrophila LSv54
  CDS (1)..(609): transl_table=11
atggcccactatcttgatattatcgtccgcgctatattcatagagaacctgcctcttagtttttttctgggtatgtgtacctttcttgccatctctaagcaggtgaagacagccatggggctgggctttgccgtcttggttctgcagattataaccgtgcccattaacaatctcctgcttacccatgttctcaagccgggggccctggcatggcttggtcagcccgatcttgacctgcgctttcttggtttgctcacctatatctctattattgccgccgtggtgcaggtactggaaatggtcctggaccgttttatccccgccctttacaacagtcttggtatttttctgcccttgctcaccgtcaactgtgcaattttgggagcaagcctctttatggtggagagaaactatacttttgccgagagtgcggcctatggtgtcggggccgggggaggtttttttctggccgtggtctgtcttgccggcattcgggaacgtcttgaatatgccaatcctcctgctggtctgaaggggctgggcttgacctttattactacagggctcattgccatcgcctttatgggctttgccggtatggaaatataa

SEQ ID NO: 20285 - protein, 202 aa, Desulfotalea psychrophila LSv54
MAHYLDIIVRAIFIENLPLSFFLGMCTFLAISKQVKTAMGLGFAVLVLQIITVPINNLLLTHVLKPGALAWLGQPDLDLRFLGLLTYISIIAAVVQVLEMVLDRFIPALYNSLGIFLPLLTVNCAILGASLFMVERNYTFAESAAYGVGAGGGFFLAVVCLAGIRERLEYANPPAGLKGLGLTFITTGLIAIAFMGFAGMEI

SEQ ID NO: 20286 - DNA, 597 bp, Yersinia pseudotuberculosis IP 32953
  CDS (1)..(597): transl_table=11
atggaacattatatcagtctgttggtccgcgcagtgtttgtggagaatatggcgttagcgttctttctgggaatgtgtactttcctggccgtctctaaaaaagtgtcaacggcctttggcttaggcattgcggtaacggttgttctgggcatctccgtgccagccaataatttggtttataacctggttctgcgagatggcgcattggttgaaggggttgaccttagcttcctgaatttcattaccttcattggggtcattgccgccattgttcaggtgttggagatgatcctcgatcgttacttccctgcgttatataacgcgctgggtatttttctgccgctaatcaccgtgaactgcgccatctttggtggcgtgtcgtttatggcacagcgtgattacaacttccctgaatccatcgtttatggctttggttctggtatggggtggatgctggcgattgttgcattagcggggatccgcgaaaaaatgaaatatgccaatgtgcctgcgggcttacaggggctagggatcacctttatctcaaccggattgatggcattaggttttatgtctttcgccggtgtgaacctataa

SEQ ID NO: 20287 - protein, 198 aa, Yersinia pseudotuberculosis IP 32953
MEHYISLLVRAVFVENMALAFFLGMCTFLAVSKKVSTAFGLGIAVTVVLGISVPANNLVYNLVLRDGALVEGVDLSFLNFITFIGVIAAIVQVLEMILDRYFPALYNALGIFLPLITVNCAIFGGVSFMAQRDYNFPESIVYGFGSGMGWMLAIVALAGIREKMKYANVPAGLQGLGITFISTGLMALGFMSFAGVNL

SEQ ID NO: 20288 - DNA, 702 bp, Yersinia pseudotuberculosis IP 32953
  CDS (1)..(702): transl_table=11
atgagtgaagcgaaaaaactgttagcacaagggttgtggaaaaataactctgcgctggtgcaactgttggggctctgtccattgttggcagtctcttccacggcaaccaacgcattggggctggggttagcgaccacgctagtccttgtgtgtaccaataccgcagtttctgcattgcgccgttgggtaccgtctgaaatccgtattcctatttatgtcatgattattgcgtcggtcgtcagtaccgtgcaaatgctgatcaacgcttatgcctttggtttatatcaatcattggggatatttatcccattgattgtgaccaactgtatcgtgattggccgggcagaggcctatgcagcgaagaatccggtgggactatccgcattggatggttttgccatggggatgggagcaacctgtgccttatttgttttaggggcactgcgcgaaattttgggtaacggtaccttatttgacggcgcagacatgttgctaggcagttgggctacagtactgcgcattgacatcttgcatttagataccccttttctgctggcgatgttgccaccaggtgcgtttatcggtctgggtttactgctggccggtaaatatgtcattgacgagaaaatgaaagcgcgcaaagccaatacacgggttaacgtaccgcaacttcaggatggagatgccgagaaagccttatga

SEQ ID NO: 20289 - protein, 233 aa, Yersinia pseudotuberculosis IP 32953
MSEAKKLLAQGLWKNNSALVQLLGLCPLLAVSSTATNALGLGLATTLVLVCTNTAVSALRRWVPSEIRIPIYVMIIASVVSTVQMLINAYAFGLYQSLGIFIPLIVTNCIVIGRAEAYAAKNPVGLSALDGFAMGMGATCALFVLGALREILGNGTLFDGADMLLGSWATVLRIDILHLDTPFLLAMLPPGAFIGLGLLLAGKYVIDEKMKARKANTRVNVPQLQDGDAEKAL

SEQ ID NO: 20290 - DNA, 708 bp, Symbiobacterium thermophilum IAM 14863
  CDS (1)..(708): transl_table=11
gtgaagccatccgctcagtccccaacgttcgggtccgtcctggccgacggactccggcaggccccgccgttccggctgctgctgggtctctgcccctcgctggccgtgaccacggccatggagaacggcttctggatgggcctggccgtgatcttcgtcctgtcctgctcggagctgatcatcagcctgctgcgcagggtgatccccgaccgggtacgcattccggtctacatcgtgatcgtggccaccttcgtcaccgtggtcgacatggtgatgaaggcctatctgccggagatgcacgccattctgggcatcttcatccccttgatcgtcgtgaactgcatcatcctcggccgggcggaggccttcgcctccaagaacggcccgctgctctcggtggccgacgcggtgggcgtgggcctgggcttcaccgcatcgctcatggccatcggcggcgtgcgggagctcctgggcaccggcaacctgaagctgttcggcgtcgccctgctgggcccgggcctgccgctggaggtcgtggtgatgctgctacccgccggcgccttcttcgtcatcggcttcctgatggccggcctggcatggctgcagcagcggcaggaggcgcgggggcggcgggaccggccggcatccggatccggttccaccgccggcgccggcacagtgtccggaggagaggaggcggcggtctag

SEQ ID NO: 20291 - protein, 235 aa, Symbiobacterium thermophilum IAM 14863
MKPSAQSPTFGSVLADGLRQAPPFRLLLGLCPSLAVTTAMENGFWMGLAVIFVLSCSELIISLLRRVIPDRVRIPVYIVIVATFVTVVDMVMKAYLPEMHAILGIFIPLIVVNCIILGRAEAFASKNGPLLSVADAVGVGLGFTASLMAIGGVRELLGTGNLKLFGVALLGPGLPLEVVVMLLPAGAFFVIGFLMAGLAWLQQRQEARGRRDRPASGSGSTAGAGTVSGGEEAAV

SEQ ID NO: 20292 - DNA, 588 bp, Symbiobacterium thermophilum IAM 14863
  CDS (1)..(588): transl_table=11
atggagatcctggcgatcctgatcggcggcatcctggtcaacaactatatcttctcccgcttcctgggcctctgcccgttcttcggcgtctccaacaagctggagacggtctacggaatgggcgccgcggtcgtcttcgtcatgacgctggcctcggccatcacctggccgctgcagcatctccttctggagccgctggggctgggctacctgcagacggtggccttcatcctggtgatcgccgccctggtgcagacggtggagatggtcatccagcgggtcagccccaccctgtacgccgccctgggcatcttcctcccgctgctcaccaccaactgcgccgttctgggcgccgcgctgctgaatatcacccagggttacggcttcatgacgtccgtgctgaacggcttcgcctgcggcgttggctggaccctggcgacgctgctcttcgccggcgtgcgggagcggatcgagggggcgcacatcccgccggcgatgcggggtatgcccatcgcgttcgtcgcggccggcctgatggcgctggccttcatgggcttccagggcctctttcgcgggatcctcttctaa

SEQ ID NO: 20293 - protein, 195 aa, Symbiobacterium thermophilum IAM 14863
MEILAILIGGILVNNYIFSRFLGLCPFFGVSNKLETVYGMGAAVVFVMTLASAITWPLQHLLLEPLGLGYLQTVAFILVIAALVQTVEMVIQRVSPTLYAALGIFLPLLTTNCAVLGAALLNITQGYGFMTSVLNGFACGVGWTLATLLFAGVRERIEGAHIPPAMRGMPIAFVAAGLMALAFMGFQGLFRGILF

SEQ ID NO: 20294 - DNA, 597 bp, Mannheimia succiniciproducens MBEL55E
  CDS (1)..(597): transl_table=11
atggaacattacattagtctatttgtaaagtctgtgttcattgagaacatggcgctttctttcttccttggtatgtgtacattcctcgcggtgtcgaagaaagtttcaacagcattcggcttaggtattgccgttatcgtcgtattaggtatttcagtaccggtaaaccaactagtttatacccatatattaaaagacggtgcactaattgaaggtgtggatttaagtttcttaaacttcatcactttcatcggcgttattgcggcattagtacaaatcctagaaatgttcctggataaattcgtaccgtcactttatgaagcgttaggtattttcttaccgttaatcacagtaaactgtgcaattttcggtggcgtatcatttatggttcaacgtgaatataatttcccggaatccgtagtatatggtatcggcgcaggtacgggctggatgttagcgattgtggcattagccggtttgacggaaaaaatgaaatatgcggatgttccggcaggcctacgcggtttagggatcacctttatcaccgtcggtctaatggcattaggtttcatgtcattctccggcattcaattataa

SEQ ID NO: 20295 - protein, 198 aa, Mannheimia succiniciproducens MBEL55E
MEHYISLFVKSVFIENMALSFFLGMCTFLAVSKKVSTAFGLGIAVIVVLGISVPVNQLVYTHILKDGALIEGVDLSFLNFITFIGVIAALVQILEMFLDKFVPSLYEALGIFLPLITVNCAIFGGVSFMVQREYNFPESVVYGIGAGTGWMLAIVALAGLTEKMKYADVPAGLRGLGITFITVGLMALGFMSFSGIQL

SEQ ID NO: 20296 - DNA, 624 bp, Mannheimia succiniciproducens MBEL55E
  CDS (1)..(624): transl_table=11
atggcaggcagcaatcttaaaaaattattgttatcgccaattgccgataacaacccaattgcgttacaaattcttggtatttgttccgcattggcggtaactactcagttacaaactgcggtggtaatggctattgcggtaagttttgttacaggtttttcaagtttctttatttcttgtatccgtaactatgtaccaaacagcattcgtatcatcgtacaaatggcaatcattgcgtcattggtaatcttggttgaccaaattctgcgcgcttatgcttacgacttatctaaacaactttcggtattcgtaggtcttatcattacaaactgtatcgtaatgggtcgtgcggaagcgttcgctatgaaatcaggccctgttgaaagttttgttgacggtatcggtaacggtttaggctacggtgcaatcctattaatcgtcgcatttttacgtgaacttatcggttcgggtaaattattcggcgtaaccgtattggaaaccgtacaaaacggcggttggtatcaggcaaacggtctattcctattggcgccaagcgcgttctttatcatcggatttgtaatctggggacttagaacctggaaaccggaacaagtggagaaataa

SEQ ID NO: 20297 - protein, 207 aa, Mannheimia succiniciproducens MBEL55E
MAGSNLKKLLLSPIADNNPIALQILGICSALAVTTQLQTAVVMAIAVSFVTGFSSFFISCIRNYVPNSIRIIVQMAIIASLVILVDQILRAYAYDLSKQLSVFVGLIITNCIVMGRAEAFAMKSGPVESFVDGIGNGLGYGAILLIVAFLRELIGSGKLFGVTVLETVQNGGWYQANGLFLLAPSAFFIIGFVIWGLRTWKPEQVEK

SEQ ID NO: 20298 - DNA, 648 bp, Mannheimia succiniciproducens MBEL55E
  CDS (1)..(648): transl_table=11
atggaaaaagaacaatcaatttggcacgacctgctttctcaagggctatggcgaaataaccccgccatcgtacagttgcttgggctctgccctttgcttgcggtctcaaactcggcgaccaacgctcttggtttgggctttgcgacccttttggtgcttacctgcactaatactatggtgtctttatttcgtaaacaaatcccccacgagatccgtatccctatttacgtgatgattattgccactaccgtaacggcggtgcaattattgatgaacgcctacacttacagcctttatcaatcgctggggatttttattccattaatcgtcaccaactgtattgtgatcggcagagcggaagcctttgcctctaaaaattcagtactgcattccgctttcgacggattcgccatgggattaggcatgacattaagccttttcctgttgggcgcattacgtgaagtacttggtaatggcacgctgtttgacggtattcatttgctgttaggcgattgggcaaaacctctgcgtattgagtttttccataacgacagtaatttgttactggccattctgccgccgggcgcattcttaggcttagccgttattcttgcattaaaaaatgttattgagagccgtacaaaatga

SEQ ID NO: 20299 - protein, 215 aa, Mannheimia succiniciproducens MBEL55E
MEKEQSIWHDLLSQGLWRNNPAIVQLLGLCPLLAVSNSATNALGLGFATLLVLTCTNTMVSLFRKQIPHEIRIPIYVMIIATTVTAVQLLMNAYTYSLYQSLGIFIPLIVTNCIVIGRAEAFASKNSVLHSAFDGFAMGLGMTLSLFLLGALREVLGNGTLFDGIHLLLGDWAKPLRIEFFHNDSNLLLAILPPGAFLGLAVILALKNVIESRTK

SEQ ID NO: 20300 - DNA, 630 bp, Mannheimia succiniciproducens MBEL55E
  CDS (1)..(630): transl_table=11
ttgcaaaaacaggataataacgcgcttactcaaacgaattacaccaatatgacagactatatattattaattattagtactgcgctcattaataactttgtcctggttaaatttttagggctttgtccgttcatgggcgtttccaaaaaagtcgaaactgcaatcggcatggggcttgctacaacctttgtattaacggttgcctcactttgtacctatcttgcggacagttatattcttgcaccgttaaacgcatctttcttgcgcacgttagtctttattttggttattgcggtcgtagtacaatttactgaaatggtaatcaacaaaaccagtccgacgctctatcgtttgttaggtatttttcttccgcttattaccacaaactgtgccgtattaggggttgcgctgcttaatattaatttagctcataatttaaccgagtctgtcatttatggatttggcgcctcattaggttttgctctggtccttgttcttttcgcctctttacgcgaacgcctggcggcggcagatgtaccggcgccttttaaaggcgcgtctatcgcattagttaccgccggcttgatgtccttggttttcatgggctttaccgggcttattcgggtttaa

SEQ ID NO: 20301 - protein, 209 aa, Mannheimia succiniciproducens MBEL55E
MQKQDNNALTQTNYTNMTDYILLIISTALINNFVLVKFLGLCPFMGVSKKVETAIGMGLATTFVLTVASLCTYLADSYILAPLNASFLRTLVFILVIAVVVQFTEMVINKTSPTLYRLLGIFLPLITTNCAVLGVALLNINLAHNLTESVIYGFGASLGFALVLVLFASLRERLAAADVPAPFKGASIALVTAGLMSLVFMGFTGLIRV

SEQ ID NO: 20302 - DNA, 609 bp, Methylococcus capsulatus str. Bath
  CDS (1)..(609): transl_table=11
atggaagcctacatcaatctgttcatcaagtcggtcttcatcgagaacatggccctgtcgttcttcctgggcatgtgcaccttcatcgcggtgtcgaagaagatcgaaacggccgtgggcttgggcatcgccgtggtgatcgtgcagaccctgacggtgccggccaacaacctgatctacacctatctgctcaaggaaggtgccttgtcctgggctggcctgcacgacgtcgacctcagcttcatcgcgctgatggcctgtatcggcgtgatcgccgccatggtccagattctggagatggtgctcgacaagttcttcccggccctttacaacgccttgggtattttcctgccgctgattacggtgaactgtgccatcctggccggttcgctgttcatgatcgaacgtgattacaacttctcggagagcgtggtgtatggcgtgggcagcggtttcggctgggcgctcgccatcactgcgatggccggcgtgcgcgagaagctcaagtacagcgacgttccggcgggcctgcgcggcctgggcatcaccttcatctccgcgggtctgatggcactgggtttcatggccttctccggcatacagttataa

SEQ ID NO: 20303 - protein, 202 aa, Methylococcus capsulatus str. Bath
MEAYINLFIKSVFIENMALSFFLGMCTFIAVSKKIETAVGLGIAVVIVQTLTVPANNLIYTYLLKEGALSWAGLHDVDLSFIALMACIGVIAAMVQILEMVLDKFFPALYNALGIFLPLITVNCAILAGSLFMIERDYNFSESVVYGVGSGFGWALAITAMAGVREKLKYSDVPAGLRGLGITFISAGLMALGFMAFSGIQL

SEQ ID NO: 20304 - DNA, 660 bp, Methylococcus capsulatus str. Bath
  CDS (1)..(660): transl_table=11
atgaacgaagaatcgaagaaagttctcatcgaaccgctggtcgacaacaaccccatcaccctccaagtgctgggcatctgttccgccctagccgtcacttcacaattgtcgacggccttgatcatgagtctggcgctgacctcggtcaccgcctgttccagcgcgggcatcgctttgatccgcaaccacattccaagcagcgtgcgtatcatcgcgcagatggtgatcatcgcctcactggtgatcgtggtcgaccagctgctcaaggctttcgcctatgaaatcagcaagcagttgtcggtgttcgtcggactcatcatcaccaactgcatcgtgatggggcgcgccgaggcctatgccatgaagaatccgccctgggagagcttcctggacggcatcggcaatggcctgggttacagtctgatcctcgtcaccgtcgccaccatccgtgagctgctgggttccggcaaactgctggggatcgatgtgttgcccctggtcaaggatggcggctggtacgtgccgaatggcctgctgttgctgccccccagtgcattcttcctgatcggtctcctgatctgggcgatccgctcctggaaaacccagcaggtggaaaaggccgatttcgtgatcgccaccgcacacggggaggcacactga

SEQ ID NO: 20305 - protein, 219 aa, Methylococcus capsulatus str. Bath
MNEESKKVLIEPLVDNNPITLQVLGICSALAVTSQLSTALIMSLALTSVTACSSAGIALIRNHIPSSVRIIAQMVIIASLVIVVDQLLKAFAYEISKQLSVFVGLIITNCIVMGRAEAYAMKNPPWESFLDGIGNGLGYSLILVTVATIRELLGSGKLLGIDVLPLVKDGGWYVPNGLLLLPPSAFFLIGLLIWAIRSWKTQQVEKADFVIATAHGEAH

SEQ ID NO: 20306 - DNA, 687 bp, Methylococcus capsulatus str. Bath
  CDS (1)..(687): transl_table=11
atgaatccggactttcgcaaaatcacccgcgacggcttgtgggacaacaacatcgtcttcagtcagagcatcggcctgtgtccgctgctggccgtcaccggcaccgccaccaatgggctcggcatggggctggccaccctggcggtcatggtcgtatgcaacgttctggtttcctgggtacgggtattgatcccctccgagatccgcatcccggtgttcgtggtgctcatcgccatggtggtgacgctggtggacatgatgatgaatgcctggttgcacgagatgcacaaggtgctgggcctgttcatccccctgatcgtgaccaactgcgccatcctggggcgggtcgaggcctatgcttcgcgccatcccgtggcgcatgcggcgatggacgggctgatgatggggctgggtttcaccctggctctggtggtgctgggggcggcccgggaagcgctcggcgccggcacattgttcgccagtgcgcgccttttgatgggcgactcgttcgcgtggctggaaacgacgctcattcacggctaccgcgggttcctgctgatggcgctgccgccgggcgggttcctcatgctcggtttcctgctggcggggaaaaaactgatcgacaagcggttggccgcccgccagcgccggtcgatcgcggtgggcgaaacgctggtggagacttga

SEQ ID NO: 20307 - protein, 228 aa, Methylococcus capsulatus str. Bath
MNPDFRKITRDGLWDNNIVFSQSIGLCPLLAVTGTATNGLGMGLATLAVMVVCNVLVSWVRVLIPSEIRIPVFVVLIAMVVTLVDMMMNAWLHEMHKVLGLFIPLIVTNCAILGRVEAYASRHPVAHAAMDGLMMGLGFTLALVVLGAAREALGAGTLFASARLLMGDSFAWLETTLIHGYRGFLLMALPPGGFLMLGFLLAGKKLIDKRLAARQRRSIAVGETLVET

SEQ ID NO: 20308 - DNA, 582 bp, Methylococcus capsulatus str. Bath
  CDS (1)..(582): transl_table=11
gtgaacgactacctgatgctgctgctcggcacggccctggtcaacaacgtggtgctggtcaagttcctcggactgtgccctttcatgggggtgtccaggaagctcgattccgccgtcggcatgggattcgcgacgaccttcgtgctgaccctgaccgcggtggcgagctggctcatcgagcatttcgtcctgatgccgctgggcatcggcttcctgcgcatcctctcgttcatcctggtgatcgcagcggtggtccagttcaccgagatggtggtgaagaagaccagcccggtgctgtatcaggtgctgggcatcttcctgccgctgatcaccaccaactgcgcggtgctgggagtggcgctgctgaacatccagcaggaatacgatttcattcacagcgcgctgttcggtttcggttcggcgctggggttcaccctggtcatggtgatcttcgccggcatccgagagcggctggccctgatgagcgtgcccgaggcattcaccggcccgcccattgccttcatcaccgcgggcatcctctccctggcgttcatggggttcgcaggattggccacgcattga

SEQ ID NO: 20309 - protein, 193 aa, Methylococcus capsulatus str. Bath
MNDYLMLLLGTALVNNVVLVKFLGLCPFMGVSRKLDSAVGMGFATTFVLTLTAVASWLIEHFVLMPLGIGFLRILSFILVIAAVVQFTEMVVKKTSPVLYQVLGIFLPLITTNCAVLGVALLNIQQEYDFIHSALFGFGSALGFTLVMVIFAGIRERLALMSVPEAFTGPPIAFITAGILSLAFMGFAGLATH

SEQ ID NO: 20310 - DNA, 582 bp, Methylococcus capsulatus str. Bath
  CDS (1)..(582): transl_table=11
atgaaagactatctgttgatcctcgtcagcacgaccctggtgaacaacttcgtcctggtgaagttcctgggactttgccccttcatgggcgtgtcccgcaaatcggagacggcgatcggtatgggactggcgacgaccttcgtgctgaccctgtcttcggtcagcagttacctggtcgaccgtttcctactggagccgatggggctgcaatacctgcgcaccctggccttcatcgtggtgatcgcggtggtggtccagttcaccgaaatggtcgtaaaaaagaccagcccgctgctataccaggtgctggggatttttctgccgctgatcaccaccaactgtgcagtgctcggcgtggccttgctcaatgtccaggcgggccatgatttcatcgaatccttcctctacggcttcggcgccgccgccggcttcaccctggtgctggtgctgttcgccggcctgcgcgagcggatcgatgccgcggacgtgccggcgccgttccgcggcagtgccatcgcactggtcaccgcgggcctgatttccgtcgccttcatgggcttctccggcctggtcagaggctga

SEQ ID NO: 20311 - protein, 193 aa, Methylococcus capsulatus str. Bath
MKDYLLILVSTTLVNNFVLVKFLGLCPFMGVSRKSETAIGMGLATTFVLTLSSVSSYLVDRFLLEPMGLQYLRTLAFIVVIAVVVQFTEMVVKKTSPLLYQVLGIFLPLITTNCAVLGVALLNVQAGHDFIESFLYGFGAAAGFTLVLVLFAGLRERIDAADVPAPFRGSAIALVTAGLISVAFMGFSGLVRG

SEQ ID NO: 20312 - DNA, 702 bp, Methylococcus capsulatus str. Bath
  CDS (1)..(702): transl_table=11
atgaaactcggcccctaccgcaagatcgccctggatggcctctggcacaacaatcaggcgctggtcgccctgctcggcctgtgcccgctgctcgccgtcagcagcaccgtggtcaacagtctcgggctggggctggccaccaccgtcgcgctggtgttctccaacggggtggtttcactgatccgcaaccgcataaccccggacgtgcgcctgccggtcttcgtgctggtcatcgccgccaacgtcaccgtcatcgagttgctgatgaacgcgttcttccacgacctgtacaagatcctcggcatattcatcccgctgatcgtcaccaactgcgccatcatcggccgcgccgaagccttcgcctccaagaacgcggtcgaccgcgccgtcctggacggcttgttcatgggattgggattcaccgcggcactggtcgcgctcggcgccttccgcgaaatcgtcggcaccggggccctgctgaaccgggccgaactgatgttcggcgaaaccgcccggaattggagcgtgcggatcatcgagaactacgacggcttcctgctggccattctgccgcccggcgccttcatcggacttggactcatcatcgccttgaagaacgtgatcgacgcccgcgcaaaagttcgggcccaggccgcggcaggccaacccgtggcgttcacgcccgccgtccggaaagcatga

SEQ ID NO: 20313 - protein, 233 aa, Methylococcus capsulatus str. Bath
MKLGPYRKIALDGLWHNNQALVALLGLCPLLAVSSTVVNSLGLGLATTVALVFSNGVVSLIRNRITPDVRLPVFVLVIAANVTVIELLMNAFFHDLYKILGIFIPLIVTNCAIIGRAEAFASKNAVDRAVLDGLFMGLGFTAALVALGAFREIVGTGALLNRAELMFGETARNWSVRIIENYDGFLLAILPPGAFIGLGLIIALKNVIDARAKVRAQAAAGQPVAFTPAVRKA

SEQ ID NO: 20314 - DNA, 633 bp, Photobacterium profundum SS9
  CDS (1)..(633): transl_table=11
atggctgatactaaagaaatgaaaaagattctgtttgcgccgtttctggataataacccgattgcgcttcaggttcttggtgtatgttctgcattggcagtaacaactaaattggaaacagcgtttgttatgacgctagcggtaatgtttgttactgcattttctaacttatttgtatcgctaatacgtaaccatattcctaacagtgtacgtatcattgttcagatggcgattatcgcgtcattggtaatcgtggttgaccaagtacttaaagcgtttgtttacgatatttctaagcagctttctgtatttgttggcctgatcattacgaactgtatcgtaatgggtcgtgctgaagcatacgcaatgaaatcggcaccactaccgtcttttatcgatggtgttggtaatggcttaggctacggttttgtacttatcactgttgctttcttccgtgaattattaggttcaggcaagttgtttggtgttgaggttctacctctagtttctgatggcggttggtatcaaccaaacggtctgatgttacttgcaccgtctgctttcttcctaattggtttcatgatctgggcaattcgtattattcgtccagcacaagtagaagcgaaggagtaa

SEQ ID NO: 20315 - protein, 210 aa, Photobacterium profundum SS9
MADTKEMKKILFAPFLDNNPIALQVLGVCSALAVTTKLETAFVMTLAVMFVTAFSNLFVSLIRNHIPNSVRIIVQMAIIASLVIVVDQVLKAFVYDISKQLSVFVGLIITNCIVMGRAEAYAMKSAPLPSFIDGVGNGLGYGFVLITVAFFRELLGSGKLFGVEVLPLVSDGGWYQPNGLMLLAPSAFFLIGFMIWAIRIIRPAQVEAKE

SEQ ID NO: 20316 - DNA, 597 bp, Photobacterium profundum SS9
  CDS (1)..(597): transl_table=11
atggaacattatctaagccttttagttcgttcgatttttatcgagaacatggcactttcgttcttcttgggtatgtgtacattcctggctgtatcgaagaaagttaagacttcttttggtttgggtgttgcggtaatcgtcgtattgacgattgctatacctgtgaacaacttagtttacaacctattactgaaagatggtgcgattgttgatggagtggatttaacgttccttaacttcatcacgtttatcggtgtaattgcagcgttagtacagattctggaaatgattctggaccgcttcttcccgccgctatacaacgcactgggtatcttccttccgctgatcacagttaactgtgcaatcttcggtggtgtatctttcatggtacagcgtgactacaactttgttgaatcgattgtttacggtttcggctctggtgtgggttggatgctcgctatcgttgctcttgcgggtatccgtgagaagatgaagtattcagatgtacctcctggcctacgtggcctaggtattacattcatcactgttggtctaatggcgttaggctttatgtctttctccggcgtacagctgtaa

SEQ ID NO: 20317 - protein, 198 aa, Photobacterium profundum SS9
MEHYLSLLVRSIFIENMALSFFLGMCTFLAVSKKVKTSFGLGVAVIVVLTIAIPVNNLVYNLLLKDGAIVDGVDLTFLNFITFIGVIAALVQILEMILDRFFPPLYNALGIFLPLITVNCAIFGGVSFMVQRDYNFVESIVYGFGSGVGWMLAIVALAGIREKMKYSDVPPGLRGLGITFITVGLMALGFMSFSGVQL

SEQ ID NO: 20318 - DNA, 582 bp, Photobacterium profundum SS9
  CDS (1)..(582): transl_table=11
atgactgaataccttttattacttgtcggtacagtgttggtaaacaactttgtactcgttaaattcttaggtttatgcccatttatgggcgtatctaagaagctggaaactgcgattggtatgggcttggcgacgacatttgtcttaaccttggcttccgtgtctgcgtatctcgtggaaaattacattcttgcgcctcttggcattgaataccttcgtactcttagctttattcttgttattgccgttgtcgtgcaatttaccgaaatggtggtacataaaacgagcccaacgctataccgtttgctgggtattttcctaccgttaattacgactaactgcgcggtgttaggtgttgctctattgaatatcaatgagcaccacaactttatcgaatccgttatttatgggtttggtgccgcagttggtttttcgttggtcttgattttattcgcttctatgcgagaacgtattgccgcggcagatgttcctggcccttttaaaggcgcctctattgcgatgatcacagcaggtcttatgtctcttgccttcatgggctttactggattggtgaaactgtag

SEQ ID NO: 20319 - protein, 193 aa, Photobacterium profundum SS9
MTEYLLLLVGTVLVNNFVLVKFLGLCPFMGVSKKLETAIGMGLATTFVLTLASVSAYLVENYILAPLGIEYLRTLSFILVIAVVVQFTEMVVHKTSPTLYRLLGIFLPLITTNCAVLGVALLNINEHHNFIESVIYGFGAAVGFSLVLILFASMRERIAAADVPGPFKGASIAMITAGLMSLAFMGFTGLVKL

SEQ ID NO: 20320 - DNA, 702 bp, Photobacterium profundum SS9
  CDS (1)..(702): transl_table=11
atgagcacaaataaagaattaatgaaaaatggcatgtgggtcaataaccctgccattgtacaactattaggcttgtgtccgttattggccgtatcgtccacagtgaccaatgccttgggtttaggtttagcgacaacagctgtattagtcggttctaatctgatcgtatctttggttcgccaatggattccatcagaagttcgtattccagtatttgtgatgatcattgcggcactcgtcacatgcgttcaattactaatgaatgcatacacctatggtttataccaatcattaggtatcttcattccattgattgtaactaactgtattattattggtcgtgccgaagcatttgcctctaaaaatgatccaatccccgccaccttagatggactgtggatggggttaggcatgacagctgcgctcgtggtactcggtgccatgcgtgagattttaggcaacggtacactcttcgatggtgctgatcgcctattgggtgactgggctttgtcgttgcgtattgaagtgttcaactttgatagcagcttcttgcttgccatgctaccaccgggcgcattcctcggtgtcggctttatgattgcgttaaaaaatgtaatagataaaaaacgtgaagagaaaaaagcattaaccgccgataaaaagccagaaatagaacgcgtacgcattacatctgccgattag

SEQ ID NO: 20321 - protein, 233 aa, Photobacterium profundum SS9
MSTNKELMKNGMWVNNPAIVQLLGLCPLLAVSSTVTNALGLGLATTAVLVGSNLIVSLVRQWIPSEVRIPVFVMIIAALVTCVQLLMNAYTYGLYQSLGIFIPLIVTNCIIIGRAEAFASKNDPIPATLDGLWMGLGMTAALVVLGAMREILGNGTLFDGADRLLGDWALSLRIEVFNFDSSFLLAMLPPGAFLGVGFMIALKNVIDKKREEKKALTADKKPEIERVRITSAD

SEQ ID NO: 20322 - DNA, 609 bp, Idiomarina loihiensis L2TR
  CDS (1)..(609): transl_table=11
atggaaaactatatcaacctgttcatccgcgcggttttcattgaaaacctggcattgtccttcttcttaggtatgtgtacgtttttggctgtatctaagaaagtaaaaacagcatttggtctgggtgtcgcggttattgttgtattgggtatttcggtaccggttaacaacttaatttaccacaacattctggccccaggtgctctagaatgggctggcttcccggatgcggatctaagtttcctgaagtttctgacctttataggtgttattgccgctattgtgcagatattggaaatggcattggataaatatgtacctgcactttacaacgcactgggtattttcctgccactcattaccgttaactgcgctatttttggtggcgtagctttcatggtcgagcgtgattacaattttggcgaatccgttgttttcggaattggtagtggtgttggctgggctttagctattgttgctttggctgcagtgcgcgaaaaactgaaatatgcagatgtacctgatggcctgcgtggcttaggtatcacatttatttcagtgggtctgattggtttgggctttatgtcgttctccggcgtatccttataa

SEQ ID NO: 20323 - protein, 202 aa, Idiomarina loihiensis L2TR
MENYINLFIRAVFIENLALSFFLGMCTFLAVSKKVKTAFGLGVAVIVVLGISVPVNNLIYHNILAPGALEWAGFPDADLSFLKFLTFIGVIAAIVQILEMALDKYVPALYNALGIFLPLITVNCAIFGGVAFMVERDYNFGESVVFGIGSGVGWALAIVALAAVREKLKYADVPDGLRGLGITFISVGLIGLGFMSFSGVSL

SEQ ID NO: 20324 - DNA, 633 bp, Idiomarina loihiensis L2TR
  CDS (1)..(633): transl_table=11
atggctaatgtaaaagaaatgaagtccgtattattcggaccgatattcgccaacaaccccatcgcactacagattcttggtatctgttctgcattggctgtaacgtcgaaaatgagcaacaccttggttatgtgtattgcactaactgcggttgttgcgtgctctaacttatttatttcgattatccggaatcatattccgtcaagcgtacgtattattgtccaaatgacaattattgcgagcttggttattgtcgttgaccagatactaaaagcttacgcttactcaatttctaaagagttgtcagtgttcgttggcttaatcattactaactgtatcgttatggggcgcgcagaagcttacgctatgaagagcactccgtttatgtccttcctggacggactgggtaacggtttaggttactcagtggtgctgttggttgttggcttcattcgtgaactctttggttcaggcagcttgtttgatgtacagattttacctctggcatcacaaggtggttggttcgagcctgttggcttgttactgatgccacctagtgccttcttcatcattggcgggtttatctgggtactgcgtaccttccgcactgaacaagttgaacctaaggagtaa

SEQ ID NO: 20325 - protein, 210 aa, Idiomarina loihiensis L2TR
MANVKEMKSVLFGPIFANNPIALQILGICSALAVTSKMSNTLVMCIALTAVVACSNLFISIIRNHIPSSVRIIVQMTIIASLVIVVDQILKAYAYSISKELSVFVGLIITNCIVMGRAEAYAMKSTPFMSFLDGLGNGLGYSVVLLVVGFIRELFGSGSLFDVQILPLASQGGWFEPVGLLLMPPSAFFIIGGFIWVLRTFRTEQVEPKE

SEQ ID NO: 20326 - DNA, 582 bp, Idiomarina loihiensis L2TR
  CDS (1)..(582): transl_table=11
atgaccgattacttactgctactgataggcaccgtgctggttaataactttgtactggtgaagtttctgggtttatgcccctttatgggcgtttccggcaagctggacacggcaataggcatgtcagcagcgaccacctttgtgctgaccctggcctcggtctgtagctacctggttaaccaatacctacttgagccgctcgacttaatgtcgctgcaaacgctcagttttattctggttattgctgtggtcgtacaatttacagaaatggtggtacacaaaaccagtcctacgctgtatcggttactgggtattttcctgccacttattaccaccaactgtgctgtattaggtgtggctttgcttaacgtcaacgagcaacacaactttgtgcagtccattgtttatggcttgggagccgctattggtttctcgctggtacttattttgttctcagctctgcgtgagcgcttagctgccgccgacgtgccggtagcgtttaaaggttcagctattgcgatgataaccgcagggcttatgtctcttgcctttatgggctttagcggattggtgagcgcttaa

SEQ ID NO: 20327 - protein, 193 aa, Idiomarina loihiensis L2TR
MTDYLLLLIGTVLVNNFVLVKFLGLCPFMGVSGKLDTAIGMSAATTFVLTLASVCSYLVNQYLLEPLDLMSLQTLSFILVIAVVVQFTEMVVHKTSPTLYRLLGIFLPLITTNCAVLGVALLNVNEQHNFVQSIVYGLGAAIGFSLVLILFSALRERLAAADVPVAFKGSAIAMITAGLMSLAFMGFSGLVSA

SEQ ID NO: 20328 - DNA, 681 bp, Idiomarina loihiensis L2TR
  CDS (1)..(681): transl_table=11
atgaatgaatacaaacacttaaccaagcaaggcttatgggacaataacccagcattagttcagctattaggcttatgccctttattagcagttaccgcttcggtgaccaatgcgctgggtcttgggctggccaccttgtttgttctggttggctctaacattaccgtgtctctggtacgcgaatttgtgccatcggaaattcgtattccggtctttgttatggttatcgccacttttgtcaccattattcagttgttgatgaatgcgtatgtctttcagctttaccagtcactgggtattttcattccgctcattgtgaccaactgtgccattattggccgcgccgaagcttacgcttcgaaaaacccatggcaacgggccgccttcgatgggttggcaatgggcgcaggctttgccttagtactggttgtgctgggcgcaatgcgcgaaattatcggtaacggcacgctgtttaatggcgcagaactcttgttaggtgactgggctgcacaattgcgaattgagctattcacggtgaattacccattattgctggcgatactgccacccggagcctttattggtatgggttttattattgcgttgaaaaataaaattgatgcagtacgcagcgcccgcgctgaaaagaaaaccgttacccgtgcacgggttactgcctga

SEQ ID NO: 20329 - protein, 226 aa, Idiomarina loihiensis L2TR
MNEYKHLTKQGLWDNNPALVQLLGLCPLLAVTASVTNALGLGLATLFVLVGSNITVSLVREFVPSEIRIPVFVMVIATFVTIIQLLMNAYVFQLYQSLGIFIPLIVTNCAIIGRAEAYASKNPWQRAAFDGLAMGAGFALVLVVLGAMREIIGNGTLFNGAELLLGDWAAQLRIELFTVNYPLLLAILPPGAFIGMGFIIALKNKIDAVRSARAEKKTVTRARVTA

SEQ ID NO: 20330 - DNA, 582 bp, Azoarcus sp. EbN1
  CDS (1)..(582): transl_table=11
atgcacgaatatgcgctcctgctgctgtcgaccgcgctcgtcaacaacgtcgtgctggtcaaattcctcggcctgtgcccggcgatgggcgtatcgaaaagcatggatgccgcgctcggcatggggttggcgacgactttcgtcatcacgctcgcggcagcggcgagctggatgctcgagcactggctgctggcgccgttcgacctcggcttcctgcgcatcctgagcttcatcctggtcatcgcggcggcggtgcaattcaccgaaatggcgatccgcaagatgagcccggcgctgtaccagagcctcggcatctacttgccgctgatcacgacgaactgcgcagtgctgggcgttgcgctgctcaacgtccagcagggctacggcttcttcaagagcgtgctgttcggctttggttcggcgctcggcttcacgctcgtactgctgatcttcgccggcctgcgcgaacgcctcgccctcgcgtccgtcccggccgctttcgccggcgccccggccgcattcatcacgatcagcctgctgagcctcgccttcatggggctgtccgggctggtcgccacctga

SEQ ID NO: 20331 - protein, 193 aa, Azoarcus sp. EbN1
MHEYALLLLSTALVNNVVLVKFLGLCPAMGVSKSMDAALGMGLATTFVITLAAAASWMLEHWLLAPFDLGFLRILSFILVIAAAVQFTEMAIRKMSPALYQSLGIYLPLITTNCAVLGVALLNVQQGYGFFKSVLFGFGSALGFTLVLLIFAGLRERLALASVPAAFAGAPAAFITISLLSLAFMGLSGLVAT

SEQ ID NO: 20332 - DNA, 585 bp, Azoarcus sp. EbN1
  CDS (1)..(585): transl_table=11
atgagtagttacatctttgtcgtcatcggcgcggtcctggtcaataacgtcgtttttgtccgcatcctcgggctgtgtccgttcatgggggtgtcgaaaaaactcgagacggcgatcggcatgggtgcggcgacgacgttcgtgctgaccctgggctcgggcacgagctacctgatcgaccactacctgctgcagccgtacgacctcgcctacctgcgcacgctgtcgttcatcgtcgtgatcgcggcgatcgtgcagctcaccgagctggtgatccagaagacgagcccgctgctgcaccaggtgctgggaatctacctgccgttgatcacgacgaactgcgcagtgctcggcgtcccgctgctgagcgtcgcgctcgactacaacctgctcgagtcgctgctgttcggcttcggctcgtcgatcggattcacgctcgcgctgatcctgttcgccggcatccgcgagcgcctggacggcgccgacgtccccgcgcccttcaagggaaccgcgatcgcgatgatcaccgcgggattcatgagtctcgcgttcatgggtttcgcgggcctggaccggttccagtaa

SEQ ID NO: 20333 - protein, 194 aa, Azoarcus sp. EbN1
MSSYIFVVIGAVLVNNVVFVRILGLCPFMGVSKKLETAIGMGAATTFVLTLGSGTSYLIDHYLLQPYDLAYLRTLSFIVVIAAIVQLTELVIQKTSPLLHQVLGIYLPLITTNCAVLGVPLLSVALDYNLLESLLFGFGSSIGFTLALILFAGIRERLDGADVPAPFKGTAIAMITAGFMSLAFMGFAGLDRFQ

SEQ ID NO: 20334 - DNA, 582 bp, Zymomonas mobilis subsp. mobilis ZM4
  CDS (1)..(582): transl_table=11
gtgacggatatactacttctggtggtaagtgcctgtctggtcaacaatgttattctaacgcgctttttaggtttatgttcctttatgggtgtaactacgcgcgttgatactgctgtcgggatgggggcggcctgcacctttgttattaccacctcttctatggcaagttgggctttggagcattggttactcgccccctttggtctgggatatcttcggacggtcacttttattctgattatcgcttcggcggttcagctgacggaatcgttttttcgtaaattctcgccgactttgtttcggcttttgggcatttatctgccgcttatcacaaccaattgtgccgttttgggcattaccttgctgttggtagaacagcattatggatttgtggacagcacggttttcgcttttgcttcctcggttggatacagcctcgttatggtgctgtttgcgggattacgtgaaagattggcgttatcggtaacgcctcgtttatttgaaggccctcctatcggttttgtgacggcaagtttgctggcgctggcttttatgggtttttctggaatgtctgtccactag

SEQ ID NO: 20335 - protein, 193 aa, Zymomonas mobilis subsp. mobilis ZM4
MTDILLLVVSACLVNNVILTRFLGLCSFMGVTTRVDTAVGMGAACTFVITTSSMASWALEHWLLAPFGLGYLRTVTFILIIASAVQLTESFFRKFSPTLFRLLGIYLPLITTNCAVLGITLLLVEQHYGFVDSTVFAFASSVGYSLVMVLFAGLRERLALSVTPRLFEGPPIGFVTASLLALAFMGFSGMSVH

SEQ ID NO: 20336 - DNA, 654 bp, Silicibacter pomeroyi DSS-3
  CDS (1)..(654): transl_table=11
atgtcccagaccaagaaagaactgctgatcgatccgctggtcgacaacaacccgatcacgcttcaggtgctgggcatctgctcggcgctggcggtcacctcgtcgctgcaggttgcctttgtcatggcgctggcggtgaccttcgtgacggcgttctcgtccttcttcatctcgatcctgcgcaaccagatccccagctcgatccggatcatcgtgcaaatggtgatcattgccagcctcgtgatcctggtcgaccagatcctcaaggcctatgcctttgaaatctcgaagaccctgtcggtctttgttggcctgatcatcaccaactgcatcgtgatgggccgggccgaggcatttgcgatgaagaacccgccggttgcctcgttcatcgacggcttcggcaacggtctgggttacgggctgatcctgatgctggtgggcgtgatccgcgagctgttcggctcgggcagcctgtttggcgtgaccatcctgcaaaccgttaacaacggcggctggtacgtgcccaacggtctgttgctgctgccgccttcggcgtttttcgtgatcggcctgttgatctgggccttccgcacctggaagcccaagcagatcgaggaacgtgaattcaagatccagtcggtggaggcgcattga

SEQ ID NO: 20337 - protein, 217 aa, Silicibacter pomeroyi DSS-3
MSQTKKELLIDPLVDNNPITLQVLGICSALAVTSSLQVAFVMALAVTFVTAFSSFFISILRNQIPSSIRIIVQMVIIASLVILVDQILKAYAFEISKTLSVFVGLIITNCIVMGRAEAFAMKNPPVASFIDGFGNGLGYGLILMLVGVIRELFGSGSLFGVTILQTVNNGGWYVPNGLLLLPPSAFFVIGLLIWAFRTWKPKQIEEREFKIQSVEAH

SEQ ID NO: 20338 - DNA, 609 bp, Silicibacter pomeroyi DSS-3
  CDS (1)..(609): transl_table=11
atggaagggctgatttccctcgcggtcaaggccgtattcgtcgagaacctggcgctcagcttctttctcggcatgtgtaccttcatcgcggtgtccaagaagatctcgaccgcattgggcctgggtatctcggtcatggtggtgcaggcgatcaccgtgccggccaacaacctgctgctgaatacgctcttgaaaccgggagcgctggcctgggcgggtttcccggatgtggacctgaccttccttggtctgatctcgtatatcggggtgatcgcggcgatggtgcagatcctcgagatgatcctcgataagtatttcccgccgctctataacgcacttggcatcttcctgccgctgatcacggtgaactgcgccattctgggcggttctctgttcatggtggagcgtgactacaactttgccgaggcgacgacctatggcctgtcctcgggctttggctgggcgctggccatcaccgccatggcgggcgtgcgcgagaagctgaaatattccgacgtgccggacgggcttcagggtctgggcatcaccttcattaccgcggggctgatggcgatggccttcatgtccttctcgggcgtcaaactgtaa

SEQ ID NO: 20339 - protein, 202 aa, Silicibacter pomeroyi DSS-3
MEGLISLAVKAVFVENLALSFFLGMCTFIAVSKKISTALGLGISVMVVQAITVPANNLLLNTLLKPGALAWAGFPDVDLTFLGLISYIGVIAAMVQILEMILDKYFPPLYNALGIFLPLITVNCAILGGSLFMVERDYNFAEATTYGLSSGFGWALAITAMAGVREKLKYSDVPDGLQGLGITFITAGLMAMAFMSFSGVKL

SEQ ID NO: 20340 - DNA, 633 bp, Vibrio fischeri ES114
  CDS (1)..(633): transl_table=11
atggctagcgcaaaagatattaaaaagagcattttagcgccggtgttggataacaaccctatcgcgctacaagttcttggtgtttgttcagctctagctgtaacaactaagcttgaaacggctttcgttatgactttagcggtaatgtttgttactgctttatctaacttattcgtttcgctaattcgtaaccacatgccaaacagcgttcgtatcatcgttcagatggcgatcattgcttctttggtaatcgttgttgaccaagtattgaaagcatatctatacgatatctctaaacagctttcagtattcgtaagcttgatcattacaaactgtatcgtaatgggtcgtgcggaagcgttcgcaatgaagtctgctccattcccatcgtttatcgatggtattggtaacggtcttggttatggttttgtactgatgacagtagcatttttccgtgaacttcttggttctggtaagctatttggtgttgaagttcttccacttgtttctaacggtggttggtaccaaccaaatggtctaatgcttctagcaccatcagcattcttcttaattggttttatgatctgggctatccgtatccttaaaccagaacaagtagaagcgaaggagtaa

SEQ ID NO: 20341 - protein, 210 aa, Vibrio fischeri ES114
MASAKDIKKSILAPVLDNNPIALQVLGVCSALAVTTKLETAFVMTLAVMFVTALSNLFVSLIRNHMPNSVRIIVQMAIIASLVIVVDQVLKAYLYDISKQLSVFVSLIITNCIVMGRAEAFAMKSAPFPSFIDGIGNGLGYGFVLMTVAFFRELLGSGKLFGVEVLPLVSNGGWYQPNGLMLLAPSAFFLIGFMIWAIRILKPEQVEAKE

SEQ ID NO: 20342 - DNA, 684 bp, Vibrio fischeri ES114
  CDS (1)..(684): transl_table=11
atggcaagtcataaagaattagttaaaaacggtttatgggataacaaccctgccctagttcaactattaggtctttgtcccttacttgctgtttctgccacagtgactaacgcacttggtttaggcattgctaccatcctagttttggttggctcaaacctaattgtttctttggttcgtcagtggataccacaagaggtgcgtattcctgtattcgtaatgatcatcgcttcactagtaacttgtgtgcaattactgatgaacgcctatgcttatggtctttatttatctcttggaatatttattcctctaattgttaccaactgcattatcattggacgagcagaatcatttgcttcaaaaaatgacccacttcctgccgttttagatggattatggatgggtatgggaatgacagcggtcttggttttactcggcgcaatgcgtgagatccttggtaacggtactttgtttgatggtgccgatctgctgcttggtgattgggcaactatgctaagaattgaacttttccatgttgatagccacttcctactggctatgctacctccaggtgcattccttggcgttggatttcttattgctttaaaaaacgtcattgataagaaaatggccgatcgtcaacctaaagaaaaagcagagatagagcgagctcgtatttcgtaa

SEQ ID NO: 20343 - protein, 227 aa, Vibrio fischeri ES114
MASHKELVKNGLWDNNPALVQLLGLCPLLAVSATVTNALGLGIATILVLVGSNLIVSLVRQWIPQEVRIPVFVMIIASLVTCVQLLMNAYAYGLYLSLGIFIPLIVTNCIIIGRAESFASKNDPLPAVLDGLWMGMGMTAVLVLLGAMREILGNGTLFDGADLLLGDWATMLRIELFHVDSHFLLAMLPPGAFLGVGFLIALKNVIDKKMADRQPKEKAEIERARIS

SEQ ID NO: 20344 - DNA, 582 bp, Vibrio fischeri ES114
  CDS (1)..(582): transl_table=11
atgactgagtatctcttactacttattggtaccgttctagtaaacaactttgtactagttaagttcttaggactttgcccatttatgggcgtgtctaaaaaactagaaagcgctattggaatgggattagcaaccacatttgttcttaccttagcatcagtgtgttcgtatcttgtcgaaacatacatcttgtctccactaggtattgaatacctcagaacaatgagctttattcttgttattgcagttgtggtgcaattcaccgaaatggttgtacacaaaacaagcccaactttgtatcgtgtattgggtattttcttaccattaattacaaccaactgtgccgttcttggtgttgctcttctaaatgtcactgaaaatcataatttcgtagaatctattatttatggctttggtgctgccgttggtttttctttagttcttatcttattttctgcaatgcgtgaacgaattgctgctgccgatgtacctttaccttttaaaggtgcttctattgcgatgatcactgcaggtttaatgtctttagcctttatgggctttactggtttagtgaaattataa

SEQ ID NO: 20345 - protein, 193 aa, Vibrio fischeri ES114
MTEYLLLLIGTVLVNNFVLVKFLGLCPFMGVSKKLESAIGMGLATTFVLTLASVCSYLVETYILSPLGIEYLRTMSFILVIAVVVQFTEMVVHKTSPTLYRVLGIFLPLITTNCAVLGVALLNVTENHNFVESIIYGFGAAVGFSLVLILFSAMRERIAAADVPLPFKGASIAMITAGLMSLAFMGFTGLVKL

SEQ ID NO: 20346 - DNA, 594 bp, Neisseria gonorrhoeae FA 1090
  CDS (1)..(594): transl_table=11
atggaacactatttgagcctcttcatcaaatccgtcttcattgaaaatatggcgctatccttctttttgggtatgtgtacgtttttggcggtatccaaaaaagtatccaccgcattcggtttgggtgtggcggtaattttcgtactcgggctgtccgtccccgccaaccaattggtttactcgctgctcaaagacggcgcgattgtcgaaggcgtggatttgacctttttgaaattcatcacctttatcggcgtgattgccgctttggtgcagattttggaaatgttcttggacaaattcgtccccgccctctataacgcgctgggcatctacctgcctctgattaccgtaaactgcgcaattttcggtgccgtttcgtttatggcgcaacgcgaatacgacttcggcgagtccgtcgtgtacggcttcggcgcgggtttgggctggatgttggcgattgtcgctttagcgggcattaccgaaaaaatgaaatattcggacgctcccaaaggcctcaaaggcttgggcattacctttatcgccgccggcctgatggcaatggcgtttatgtcgttctccggcatccagttataa

SEQ ID NO: 20347 - protein, 197 aa, Neisseria gonorrhoeae FA 1090
MEHYLSLFIKSVFIENMALSFFLGMCTFLAVSKKVSTAFGLGVAVIFVLGLSVPANQLVYSLLKDGAIVEGVDLTFLKFITFIGVIAALVQILEMFLDKFVPALYNALGIYLPLITVNCAIFGAVSFMAQREYDFGESVVYGFGAGLGWMLAIVALAGITEKMKYSDAPKGLKGLGITFIAAGLMAMAFMSFSGIQL

SEQ ID NO: 20348 - DNA, 633 bp, Bacteroides fragilis NCTC 9343
  CDS (1)..(633): transl_table=11
atgagccaattattttctaaaaagaataaagaagtattcgctactccgctgggattgaataacccggtaaccgtgcaggtgctcggtatctgttcggcactggctgtaacggccaaactggaaccggctatcgtgatgggtctttcggtaactgtgattacggctttctcaaacgtcgttatctctttgctgcgtaagacgattcctaaccgtatccgtatcatcgtacagttggtggtagtagccgcattggtaactatagtaagtgaggtgctgaaagcgtttgcatacgatgtaagcgtacagctttcggtatacgtaggtctgatcattacaaactgtatcctgatgggacgcctcgaagcgtttgccatggcaaacggtccgtgggagtcattcctcgacggtgtaggtaatggtctgggatatgccaagatcctgatcatcgtggctttcttccgcgagttgctcggatcgggcacattgctcaacttccgtattatccctgagtcattctataagatgggttacatcaacaatggtttgatgttgatgccgccgatggcactgatcatctgtgcatgtatcatctggtatcagcgcagccgctgcaaagaactccaggaaaagtaa

SEQ ID NO: 20349 - protein, 210 aa, Bacteroides fragilis NCTC 9343
MSQLFSKKNKEVFATPLGLNNPVTVQVLGICSALAVTAKLEPAIVMGLSVTVITAFSNVVISLLRKTIPNRIRIIVQLVVVAALVTIVSEVLKAFAYDVSVQLSVYVGLIITNCILMGRLEAFAMANGPWESFLDGVGNGLGYAKILIIVAFFRELLGSGTLLNFRIIPESFYKMGYINNGLMLMPPMALIICACIIWYQRSRCKELQEK

SEQ ID NO: 20350 - DNA, 627 bp, Bacteroides fragilis NCTC 9343
  CDS (1)..(627): transl_table=11
atggaacaattattaagtttattcgtccgctccatctttgtggacaacatgatattcgccttcttcctgggtatgtgttcatatctggctgtgtcgaagaatgtgaaaactgctgtaggactgggtatcgccgtaactttcgtattggtggttacgttgccggtcaactacttgcttcaaactaaggtgctggctgccaatgcgatcattgaaggtgttgacctcagcttcctgagttttattctctttattgccgttattgccggtatcgtgcagttggtagaaatggtggtggaacgcttcagcccttcgctctacgcttcactgggtatcttccttccgctgatcgccgttaactgtgccatcatgggtgcttcactgttcatgcagcagagaatcacgatggatccgtcgaacccgcaggctattaccggcgtgggcagtgctgtagtatacgcactcggttccggtattggctggttgctggctatcgtcggtctggccgctatccgcgaaaagatggcttactctgatgttcccgctccgctgaaaggtctgggcattacgtttatcacagtaggactgatggctatggcctttatgtgtttctctggattgaaattataa

SEQ ID NO: 20351 - protein, 208 aa, Bacteroides fragilis NCTC 9343
MEQLLSLFVRSIFVDNMIFAFFLGMCSYLAVSKNVKTAVGLGIAVTFVLVVTLPVNYLLQTKVLAANAIIEGVDLSFLSFILFIAVIAGIVQLVEMVVERFSPSLYASLGIFLPLIAVNCAIMGASLFMQQRITMDPSNPQAITGVGSAVVYALGSGIGWLLAIVGLAAIREKMAYSDVPAPLKGLGITFITVGLMAMAFMCFSGLKL

SEQ ID NO: 20352 - DNA, 573 bp, Bacteroides fragilis NCTC 9343
  CDS (1)..(573): transl_table=11
atggaatatatattgatatttatctcggcaatctttgttaataacattgtgttgtcgcaatttctgggaatctgtcctttcttgggtgtttccaagaaggtggatactgcattgggtatgagtgcagcggtagctttcgtgcttaccattgctacgatcgtaacgttcctgatccagaagtttgtactcgatgccttcgggttgcagtacttgcagactatcacgtttatcttggttatcgctgcattggtgcagatggtagaaattattctgaagaaagtttctcccgcactttatcaggcattgggcgtattccttcccttgattacaacgaattgttgtatcttgggtgtggcaattcttgttatccaaaaagattatgacctactgacgggtgttgtatatgcattctctactgctattggtttcggtctggccctggtacttttcgccggactccgtgagcagatgagtcttgtgaaaattcccgaaggaatgaaaggtactccgattgctttaattacagccggattgctggctatggcatttatgggattctccggagttgtataa

SEQ ID NO: 20353 - protein, 190 aa, Bacteroides fragilis NCTC 9343
MEYILIFISAIFVNNIVLSQFLGICPFLGVSKKVDTALGMSAAVAFVLTIATIVTFLIQKFVLDAFGLQYLQTITFILVIAALVQMVEIILKKVSPALYQALGVFLPLITTNCCILGVAILVIQKDYDLLTGVVYAFSTAIGFGLALVLFAGLREQMSLVKIPEGMKGTPIALITAGLLAMAFMGFSGVV

SEQ ID NO: 20354 - DNA, 588 bp, Bacteroides fragilis NCTC 9343
  CDS (1)..(588): transl_table=11
atgaataactttaaagtattaatgaatgggattgttaaagagaatccgacatttgtgctcctgcttggtatgtgtcctacactcggtacgacttcctcggccataaatggtatgggtatggggcttgccactatgtttgtattgatctgttccaatgtagtgatttcattgataaagaacctgattccggacatggtgcgtattccgtcattcattgtagtcattgcatcttttgtgactttgcttcagatggtaatgcaagcatatgtacccggactgtacgctacattgggactttttattccattgattgttgtgaactgcattgtgttgggacgtgcagaagcatttgcagccaagaataatgcactttcttctatgttcgacggaatcggtatgggattgggctttacaattgcccttacattgctgggagctgttcgtgagttcctgggtacaggcaaggtattcaacttgtcaatcattccggaagaatacggtatgcttgtctttgtgcttgctccgggtgcgtttatcgcattgggatatctgattgcgttgattaacagccttaagaaagcgaattaa

SEQ ID NO: 20355 - protein, 195 aa, Bacteroides fragilis NCTC 9343
MNNFKVLMNGIVKENPTFVLLLGMCPTLGTTSSAINGMGMGLATMFVLICSNVVISLIKNLIPDMVRIPSFIVVIASFVTLLQMVMQAYVPGLYATLGLFIPLIVVNCIVLGRAEAFAAKNNALSSMFDGIGMGLGFTIALTLLGAVREFLGTGKVFNLSIIPEEYGMLVFVLAPGAFIALGYLIALINSLKKAN

SEQ ID NO: 20356 - DNA, 642 bp, Chlamydophila abortus S26/3
  CDS (1)..(642): transl_table=11
atggcagcaaataaatcctacaagagttactttcttgatcctctttggaacaataaccaacctcttattgctattttagggatttgctctgcgttggctgtaacaacaacggtaaatacagcattgaccatgggtctcgctgtgagtttcgttacagggtgttcttcgttcttcgtatctttattgcggaaagtcaccccggatagcgtacgtatgatcacccagctaattatcattagcttattcgtgattgtcattgatcaattcctcaaggcttttttctttgatatctcaaaaacactttctgtgttcgtcgggttaattatcaccaactgtatcgtcatgggaagagcagaaagtctagcaagaaatgttccacctattcctgcttttttggatggttttgcctcaggattaggttacggttgggtattagttactgtaagtatcatcagagaattcttcggttttgggacaattcttggattacaactgattcctaaatgtttttatgcctcagaagctcatcccgatgggtatgaaaactttggcttgatggttttagctccctcagcattcttccttttgggtataatgatttggggtgtcaatattctgagatctaagaaagaaagaaggtag

SEQ ID NO: 20357 - protein, 213 aa, Chlamydophila abortus S26/3
MAANKSYKSYFLDPLWNNNQPLIAILGICSALAVTTTVNTALTMGLAVSFVTGCSSFFVSLLRKVTPDSVRMITQLIIISLFVIVIDQFLKAFFFDISKTLSVFVGLIITNCIVMGRAESLARNVPPIPAFLDGFASGLGYGWVLVTVSIIREFFGFGTILGLQLIPKCFYASEAHPDGYENFGLMVLAPSAFFLLGIMIWGVNILRSKKERR

SEQ ID NO: 20358 - DNA, 597 bp, Haemophilus influenzae 86-028NP
  CDS (1)..(597): transl_table=11
atggaacattatattagcctatttgttaaggcagtcttcattgaaaatatggcactttctttcttcttaggaatgtgtactttcttagcggtatctaaaaaggtgtccactgcgtttggtcttgggattgcggtaactttcgttcttggtatcgcagtgccagtaaaccaattaatttatgcaaatgtactaaaagaaaatgctttaattgaaggtgtagatttatcattcttaaacttcatcactttcattggggttattgctggtttagtgcaaattcttgaaatggtgttagataaatttatgccatctctttataacgcattagggattttcttacctttaatcgcagtaaactgtgcgatctttggtggggtatctttcatggttcaacgtgattacaatttccctgaatctatcgtgtatggtttcggctcaggtttaggttggatgttagcgattgtagcgcttgctggcttaacggaaaaaatgaaatacgctgatattcctgctggattaaaaggtttaggtattacctttatctctgttggtttaatggcactaggctttatgtctttctctggtattcaattataa

SEQ ID NO: 20359 - protein, 198 aa, Haemophilus influenzae 86-028NP
MEHYISLFVKAVFIENMALSFFLGMCTFLAVSKKVSTAFGLGIAVTFVLGIAVPVNQLIYANVLKENALIEGVDLSFLNFITFIGVIAGLVQILEMVLDKFMPSLYNALGIFLPLIAVNCAIFGGVSFMVQRDYNFPESIVYGFGSGLGWMLAIVALAGLTEKMKYADIPAGLKGLGITFISVGLMALGFMSFSGIQL

SEQ ID NO: 20360 - DNA, 579 bp, Haemophilus influenzae 86-028NP
  CDS (1)..(579): transl_table=11
atgacgcactatattttattgattatcggcaccgcattaattaacaattttgtattggtaaaattcttaggactttgcccttttatgggtgtatccaaaaaaattgaaaccgctgtgggaatgggattagcaacaatgtttgttttaactgttgcttccctttgtgcatatttggtcgatcactatattctaattcccttaaatgccacttttttacgtacattagtgtttattttagttattgctgtagtggtgcaatttaccgaaatggcaataaacaaaacaagtccaacattatatcgtttactcggcattttcttgcctttgataactacaaactgcgcagtacttggtgtcgcattattaaatgtaaatctcgctcataatttaacagagtctgtcgtttatggttttggtgcatctctcggtttttccttagtattggtactttttgccgcacttcgtgaacgtttagtcgccgctgatatacctgccacttttcgcggttcagccattgctttaattaccgcaggcttaatgtccctcgcttttatgggatttacaggacttgtaaaataa

SEQ ID NO: 20361 - protein, 192 aa, Haemophilus influenzae 86-028NP
MTHYILLIIGTALINNFVLVKFLGLCPFMGVSKKIETAVGMGLATMFVLTVASLCAYLVDHYILIPLNATFLRTLVFILVIAVVVQFTEMAINKTSPTLYRLLGIFLPLITTNCAVLGVALLNVNLAHNLTESVVYGFGASLGFSLVLVLFAALRERLVAADIPATFRGSAIALITAGLMSLAFMGFTGLVK

SEQ ID NO: 20362 - DNA, 708 bp, Haemophilus influenzae 86-028NP
  CDS (1)..(708): transl_table=11
atgacagatttaactgaaaaaaataccgcacttgaagaagaaaaaatagaaagtgcggttgaaaatcaacaaaaatccatctggaaagaaatttttgctcaaggaatttggaaaaataaccctgcggttgtccaacttctcgggctttgtccacttttagcggtgtctagcacagccaccaacgcgcttggtttgggtttagcaacaatgcttgtactcacttgcacaaatacggtcatttcccttttccgtcaatatattcctaaggaaatccgtattccaatctacgtgatgatcattgcaaccacagtaacagcggttcaacttttaatgaatgcttacacttatacgctttatcaatcactggggatttttattccattaattgtgaccaactgtattattatcggtcgcgcagaagcattcgcctcaaaaaacagcttactccattccatctgggatgggttttcaatgggattaggaatggcacttagtctaaccattctcggcgcattacgtgaaattattggacaaggcacgatttttgagggcatagaaaatctattcggcgaacaagcaaaatttttaacgcaccatatttaccatacagacagtagctttttacttttcattctgccaccaggcgcatttataggcttaggcttgctcctcgccataaaaaatcgaattgataatgtaaaaaaataa

SEQ ID NO: 20363 - protein, 235 aa, Haemophilus influenzae 86-028NP
MTDLTEKNTALEEEKIESAVENQQKSIWKEIFAQGIWKNNPAVVQLLGLCPLLAVSSTATNALGLGLATMLVLTCTNTVISLFRQYIPKEIRIPIYVMIIATTVTAVQLLMNAYTYTLYQSLGIFIPLIVTNCIIIGRAEAFASKNSLLHSIWDGFSMGLGMALSLTILGALREIIGQGTIFEGIENLFGEQAKFLTHHIYHTDSSFLLFILPPGAFIGLGLLLAIKNRIDNVKK

SEQ ID NO: 20364 - DNA, 582 bp, Pseudomonas fluorescens Pf-5
  CDS (1)..(582): transl_table=11
atgaccgacttcctcctcgcccttgtcagcactgccctgatcaacaacttcgtgttgcagtggccgctgggcgtcgacccgctgctgcaggccccagccgatggcgctcggcttcggatccatgcgctgggcctggcaacgacggccttgatgctggtcagttgcgcactcggccatgttctctatcgtggtgtgctggtgccctcggggctgcagtcattgcagctgtttgcctggctgtccctgagtgtgctgctgatcgggccggcgctacactggctgccccgggccctgcccagtttgccattcgatggcctctggcccttgttgctggccaatgccgggatgctcggcctgctgttgatcgccagcggggaaaaccttgggctggcgaccctcggcgccatgagcctgggtgccgggctgggcttctggttggtactgagcctgttcaatgacctgcgccagcgtatttccaccaacgatattcccctgccctggcaaggcctgccgatcgacctgatcagcgccggcctgctggcagtggcgtttttcggcttcaacggactgctcaagacatga

SEQ ID NO: 20365 - protein, 193 aa, Pseudomonas fluorescens Pf-5
MTDFLLALVSTALINNFVLQWPLGVDPLLQAPADGARLRIHALGLATTALMLVSCALGHVLYRGVLVPSGLQSLQLFAWLSLSVLLIGPALHWLPRALPSLPFDGLWPLLLANAGMLGLLLIASGENLGLATLGAMSLGAGLGFWLVLSLFNDLRQRISTNDIPLPWQGLPIDLISAGLLAVAFFGFNGLLKT

SEQ ID NO: 20366 - DNA, 672 bp, Psychrobacter arcticum 273-4
  CDS (1)..(672): transl_table=11
atggctgatacaaaaagtattttaacctcgcccatttttgacaataaccctattgctctacagatcttaggtatctgttcggcattggcggtaacgaccagtgtggcaaatgcattggtgatgagcgtggcattgactttggtcacagcgttttcaagcttttttatctctattatccgtaagcaaatcccatcaagcattcgtattatcgtgcagatgacgattattgcttcattggttattttggttgatcagatactaaaagcagtcgcttatgatgtcagtaaaggcttgtcagtattcgttggtttgattattaccaactgtatcgtgatgggacgtgctgaagcgtttgccatgagcaatccgcctatacccagtttcttggatggtatcggtaatggtcttggttattcaaccgtactactatttatcgccagtatccgtgagattttgggtgcaggcagctggtttggtatcaccattttacaaaccgcgaccgatggtggctggtatgtaccaaatggtctattgctactaccgccgtcagcattctttatcattgccctgttcatcgtgattatccgtacatggaaacctgatcaggtcgaagacgctgaatttgtaatgaagccgcaatctaaaggcatggctcaagggggcggtcactaa

SEQ ID NO: 20367 - protein, 223 aa, Psychrobacter arcticum 273-4
MADTKSILTSPIFDNNPIALQILGICSALAVTTSVANALVMSVALTLVTAFSSFFISIIRKQIPSSIRIIVQMTIIASLVILVDQILKAVAYDVSKGLSVFVGLIITNCIVMGRAEAFAMSNPPIPSFLDGIGNGLGYSTVLLFIASIREILGAGSWFGITILQTATDGGWYVPNGLLLLPPSAFFIIALFIVIIRTWKPDQVEDAEFVMKPQSKGMAQGGGH

SEQ ID NO: 20368 - DNA, 609 bp, Psychrobacter arcticum 273-4
  CDS (1)..(609): transl_table=11
atgggacattatgtcagtttatttataacctcggtctttatcgagaatatggcactggcctacttcttaggcatgtgtacttttttagctgtatcaaaaaaagtctcaaccgctatcggtcttggggtggcagtggttgtcgtgatggcaattaccgtaccgctaaataacctactcttccagttcatcctaaaagatggtgcgctggcatgggcaggcttccctgatattgacttaagctttttgggtctgctcagttatattggtttgattgctgccaccgtacagattttagagatgttcttggataagttcgtcccgagtctatataacgcacttggtgtatttttgccgcttatcaccgtcaactgtgccatcttaggtggcgtattgtttatggtagaacgtgattataactttggtgaatcagtggtatacggtgttggtgcaggctttggttgggcactggctattaccgcattggcaggtatccgtgaaaagttaaaatactcagacattccagcgccactgcgcggtcttggtattacttttatcacggttggtctgatgtcacttggctttatgtcgtttggcggtatgtccatttaa

SEQ ID NO: 20369 - protein, 202 aa, Psychrobacter arcticum 273-4
MGHYVSLFITSVFIENMALAYFLGMCTFLAVSKKVSTAIGLGVAVVVVMAITVPLNNLLFQFILKDGALAWAGFPDIDLSFLGLLSYIGLIAATVQILEMFLDKFVPSLYNALGVFLPLITVNCAILGGVLFMVERDYNFGESVVYGVGAGFGWALAITALAGIREKLKYSDIPAPLRGLGITFITVGLMSLGFMSFGGMSI

SEQ ID NO: 20370 - DNA, 624 bp, Colwellia psychrerythraea 34H
  CDS (1)..(624): transl_table=11
atgtcttcagatactaaaaaagtcctcttcggacctgttgttgataataacccgattgcattacaagtattaggtgtttgttcagcgcttgctgtaacaagctcaatggctaatgcgttagttatgacacttgctgtaattgtggtaactgcattttctaacttgtttatttcgattatccgtaatcaaataccatcaagtgtacgtattattgtgcaaatggcgattattgcttcactagtaattgttgttgaccaagtactaaaagctttctcttaccaattatcgaaagaattatcggtttatattggtttgatcattactaactgtatcgttatgggtcgtgctgaagcttttgctatgaaagaaaagcctggcgtgagcttcttagacggtattggtaacggtttaggttatggcgcagtcttaatggttgtcgctttctttcgtgaattacttggctttggtaaagttttcggttttgaagttctaccattagttcaaaacggcggctggtaccaaggtaatggtctattagtgttaccgtttagctcattcttcattattggtttaatcatttgggctgtacgccaatggaaaccagaacaagttgagaaggattaa

SEQ ID NO: 20371 - protein, 207 aa, Colwellia psychrerythraea 34H
MSSDTKKVLFGPVVDNNPIALQVLGVCSALAVTSSMANALVMTLAVIVVTAFSNLFISIIRNQIPSSVRIIVQMAIIASLVIVVDQVLKAFSYQLSKELSVYIGLIITNCIVMGRAEAFAMKEKPGVSFLDGIGNGLGYGAVLMVVAFFRELLGFGKVFGFEVLPLVQNGGWYQGNGLLVLPFSSFFIIGLIIWAVRQWKPEQVEKD

SEQ ID NO: 20372 - DNA, 624 bp, Colwellia psychrerythraea 34H
  CDS (1)..(624): transl_table=11
atggaacattatttaagtatttttattaaaaccattttcattgagaatatggcgttaagcttcttcttaggtatgtgtactttcttagcagtatcaaagaaagttagcacagcgattggcttaggtgttgcagttgttgtagtgctcggtttagcggttcctgctaaccaaatcatctaccaagcaattttagcaccgggtgcacttgacagcttaatggggattactgatccgaaagaatcaattgaccttagctttttgtcatttattacctttatcggggtaattgctgctttagtacaaattttagaaatgcttttagataagtatttcccagctttgtatcaagcgcttggcatcttcctacctttaatcacggttaactgtgccatttttggtgccgtttcctttatggttgcgaaaaaccttacccttggcgaaagtgtcgtttacggcgttggctcaggtataggttggatgttagccattgtattgatggctggtttgcgcgaaaagatgaaatattctgatgtaccaaacggtttgaaaggtttaggtattacatttattactgctggattgatggcttttggctttctttctttcggtggtatttcgttataa

SEQ ID NO: 20373 - protein, 207 aa, Colwellia psychrerythraea 34H
MEHYLSIFIKTIFIENMALSFFLGMCTFLAVSKKVSTAIGLGVAVVVVLGLAVPANQIIYQAILAPGALDSLMGITDPKESIDLSFLSFITFIGVIAALVQILEMLLDKYFPALYQALGIFLPLITVNCAIFGAVSFMVAKNLTLGESVVYGVGSGIGWMLAIVLMAGLREKMKYSDVPNGLKGLGITFITAGLMAFGFLSFGGISL

SEQ ID NO: 20374 - DNA, 792 bp, Colwellia psychrerythraea 34H
  CDS (1)..(792): transl_table=11
atgagcaatgaaatagcaccaccaaatagtaatgacgctgatattactgacaacactgatgagcaagaagctgcggcagtacttaaagctgaacgtaaggcagagtataaagaactagccatacaaggtttatggaagaacaaccctggcttagtgcaactgcttggtttatgtcctctactggccgtaacatcaaccgtgaccaatgcattaggtcttggccttgccaccatgttagtactcatctgttccaatattaccgtgtcagcaatacgtcactgggtacctaaagaaattcgtatacccatttttgttttgattattgctgcctttgtaacttgcgtacaattgctaatgaatgcctttacttacggcatctatcaatcattagggatatttctcccgttaatcgtgactaactgcgccattattggtcgagctgaagcctacgcatcaaaaaacccaatcaaacaatcagcctttgatgggttaatgatgggatcaggctttgccattatcttaattttactcggtgtaataagagaaatccttgggcaaggaacactttttgatggtgcaaatttattacttggcgactgggctagtgtccttcgaattgaagtaatgcaactcgatagtcaatttttattagctattttaccccccggcgcctttatcgccatggggattttaattgcacttaaaaatgctattgatagccatataaaatccaaaaaagtagttgatactgaacaagtaatagagagagttcgagtaaattttgactcttaa

SEQ ID NO: 20375 - protein, 263 aa, Colwellia psychrerythraea 34H
MSNEIAPPNSNDADITDNTDEQEAAAVLKAERKAEYKELAIQGLWKNNPGLVQLLGLCPLLAVTSTVTNALGLGLATMLVLICSNITVSAIRHWVPKEIRIPIFVLIIAAFVTCVQLLMNAFTYGIYQSLGIFLPLIVTNCAIIGRAEAYASKNPIKQSAFDGLMMGSGFAIILILLGVIREILGQGTLFDGANLLLGDWASVLRIEVMQLDSQFLLAILPPGAFIAMGILIALKNAIDSHIKSKKVVDTEQVIERVRVNFDS

SEQ ID NO: 20376 - DNA, 582 bp, Colwellia psychrerythraea 34H
  CDS (1)..(582): transl_table=11
atgactgattatctgttacttctcgttggcactgtactcgtaaacaactttgttttagtacaatttcttggcctatgcccttttatgggtgtttcgtcacgtactgaaacagctataggcatgtcattcgccactgttttcgtcatgactttagcctctctactgagttatttagttaccacatatctgcttgtaccactaaaccttgaatacctaaccaccatgagttttatattggtgatagccgtcgtcgtacaatttactgaaatggttgttcataaaaccagtgctagcctttatcgcttattaggtattttcttacccttgatcaccacaaactgtgcggtcttgggtgttgccttgctgaatttaaggttacaacacggcttttttgaatcaattatttatggctttggtgctgcgctaggtttttcattggtattaattatgttttctgccatgcgtgaaaagttagccaatgccgatgtacctgcaccttttaaaggtactgctattgcaatgataaccgcaggtttaatgtcattagcattccttggttttaccggtttggtgaaaatttaa

SEQ ID NO: 20377 - protein, 193 aa, Colwellia psychrerythraea 34H
MTDYLLLLVGTVLVNNFVLVQFLGLCPFMGVSSRTETAIGMSFATVFVMTLASLLSYLVTTYLLVPLNLEYLTTMSFILVIAVVVQFTEMVVHKTSASLYRLLGIFLPLITTNCAVLGVALLNLRLQHGFFESIIYGFGAALGFSLVLIMFSAMREKLANADVPAPFKGTAIAMITAGLMSLAFLGFTGLVKI

SEQ ID NO: 20378 - DNA, 693 bp, Dechloromonas aromatica RCB
  CDS (1)..(693): transl_table=11
atgttgatcacgctcagcgaaatcaagcagatttccctcaacggagtctggaagcagaacagcagcctggtccagattctcggcatgtgtccgctgctggccattacgaccacgctggtcaatggcgtcatgctgtccttcgccacgctgctggtcatggccttctccaatttcttcgtcgcctgcctgcgcaatttcattccctacgaaattcgcatcccggtgttcatccttgtcgctgcagccgtcgtcaccgtcatcgacctcggcatgaacgcctacatgcacgacctgtacttgatcctcggcatcttcattccgctgatcatcaccaattgcctggtgctgggtcgcatcgaagcctttgccgccaaaaacagcccgctcggctcggcccttgacggcgcgatgatgggcgttggcatgatctggaccctgggcctgctcggcggtatccgcgagttcatcggagctggcaccgtgctcggtggtatcgagctggtcattcccggcacctcggcactgcagatcctgccggccgactacccgggtttcctggtcgccattcttccccccggcgcctttatctgcctgggttgcctggttgcctggaagaattgggttgaagcccgcgccgcccagcgagcccagttgcctccccccgcccccgttgctgccggcggctgccactaa

SEQ ID NO: 20379 - protein, 230 aa, Dechloromonas aromatica RCB
MLITLSEIKQISLNGVWKQNSSLVQILGMCPLLAITTTLVNGVMLSFATLLVMAFSNFFVACLRNFIPYEIRIPVFILVAAAVVTVIDLGMNAYMHDLYLILGIFIPLIITNCLVLGRIEAFAAKNSPLGSALDGAMMGVGMIWTLGLLGGIREFIGAGTVLGGIELVIPGTSALQILPADYPGFLVAILPPGAFICLGCLVAWKNWVEARAAQRAQLPPPAPVAAGGCH

SEQ ID NO: 20380 - DNA, 585 bp, Dechloromonas aromatica RCB
  CDS (1)..(585): transl_table=11
atgagccactatatattcatcctcatcggcacggtgctggtcaacaatgtggtgttggtcagaattctcggcctttgccccttcatgggcgtgtccaaaaagctggaaacagcctacggcatgggtgccgccacgacgttcgtgctcaccgtgggcacgggggccagctggatcatcgaccactacctgctgatgccgtttgacctgatgtatctgcgcatcatcgccttcatcgtcaccatcgccgcctttgtccagctgaccgaactggtcatccagaagaccagtccgatgctgcatcagacgctcggcatctacctgccactgatcaccaccaactgcgccgtactcggtgtgcccttgctggcgctcggcgccaagtacgatttcgtcgaatcactgctcttcggtgccggcagctccgtcggcttctcgctcgccctgatcctttttgccggcctgcgcgaacgtatcgagggcgccgacgtcccgacctatttcaagggcaccgccatcgccctcgtcaccggcggcttgatgtcgctggccttcatgggcttcgccggactggataaataccaatga

SEQ ID NO: 20381 - protein, 194 aa, Dechloromonas aromatica RCB
MSHYIFILIGTVLVNNVVLVRILGLCPFMGVSKKLETAYGMGAATTFVLTVGTGASWIIDHYLLMPFDLMYLRIIAFIVTIAAFVQLTELVIQKTSPMLHQTLGIYLPLITTNCAVLGVPLLALGAKYDFVESLLFGAGSSVGFSLALILFAGLRERIEGADVPTYFKGTAIALVTGGLMSLAFMGFAGLDKYQ

SEQ ID NO: 20382 - DNA, 675 bp, Dechloromonas aromatica RCB
  CDS (1)..(675): transl_table=11
atggccaacagcgactacaagacgatcgtcaaggacggtctgtgggacaacaacggcgtgttcagcatgctgcttggcatgtgtccctgcatggcgatgaccaccagcgccaccaacggcttcggcatggggctggcgacggcggtggtgatggccgcctcgagctacctggtggccgtgttccgcaaccggatcacgacggaagtgcggatcccggtgtatatcctgatcgttgccgccatggtgacggtggtcgatctgggcatgaacgcctggatgcatgagttgtacaaggtgctcggcctgttcatcccgctgatcgtctcaaactgcctgccgctggcccggcttgaagccttcgccgccaagcagtcgccgacgcctgccttcctggatggcttgttcatgggcctgggtttcacgattgccctgacggcgatcggcgccgttcgcgaaatcattggctccggcaccttgtttgccgatgcctcgctgctgctcgggccaagcttcaaggcgatcgagatgcgcctgctgccggcggacatgggcgtcctgatgatgatcctgccgccgggtggcttcatcgtcaccggtctgctcgtcgtcggcaagcgcctgatggatctggctgccggcaaggaaatccagatggccggtgcgcacgccctgtga

SEQ ID NO: 20383 - protein, 224 aa, Dechloromonas aromatica RCB
MANSDYKTIVKDGLWDNNGVFSMLLGMCPCMAMTTSATNGFGMGLATAVVMAASSYLVAVFRNRITTEVRIPVYILIVAAMVTVVDLGMNAWMHELYKVLGLFIPLIVSNCLPLARLEAFAAKQSPTPAFLDGLFMGLGFTIALTAIGAVREIIGSGTLFADASLLLGPSFKAIEMRLLPADMGVLMMILPPGGFIVTGLLVVGKRLMDLAAGKEIQMAGAHAL

SEQ ID NO: 20384 - DNA, 582 bp, Dechloromonas aromatica RCB
  CDS (1)..(582): transl_table=11
atgaaagaatttgccctgatgatgataggcgcggcactggtgaacaacgtgatcctggcgcgcttcctcggcctctgttcgttcatgggagtgacgacgcgggtcgataccgcggccggtatggggctggcgaccaccttcgtgatcactgtctcgtcgatggctgattgggcggtgcagacctacctgctcgatgcctacggcttgggcttcctgcgcacggtgaccttcatcctggtcattgccagcgcggtgcaatttaccgaaatgacgatcaagaaggtgtcgcccagcctgttccagatgctcggtatctacctgccgctgatcacgaccaattgcgcggtgctcggtgttgcgctgctgctggtcgaaggcaagatgggcttcctgagctcgacgatgttcgctttcgcctcgtcggtcggctacagcctggtcatgatcattttcgccggactgcgtgagcgccttgtcctggcccatgtcccccgcttgttcgccggtccccccatcgccttcatcgtcgccggcatgctggccatggcgttcatggggttttccggcatcgccacgagctga

SEQ ID NO: 20385 - protein, 193 aa, Dechloromonas aromatica RCB
MKEFALMMIGAALVNNVILARFLGLCSFMGVTTRVDTAAGMGLATTFVITVSSMADWAVQTYLLDAYGLGFLRTVTFILVIASAVQFTEMTIKKVSPSLFQMLGIYLPLITTNCAVLGVALLLVEGKMGFLSSTMFAFASSVGYSLVMIIFAGLRERLVLAHVPRLFAGPPIAFIVAGMLAMAFMGFSGIATS

SEQ ID NO: 20386 - DNA, 576 bp, Thiobacillus denitrificans ATCC 25259
  CDS (1)..(576): transl_table=11
gtggaaacctatatcctcattctcatctccacggtgttcgtgaacaacatcgtgatggccaagattctcggcttgtgtcccttcatgggggtgtcgaagaaactcgaaacggcgatcggcatggggctcgcgaccaccttcgtgctgacgctggcctcggggtcgagctacctgatcaacgaatacctgctcggcaccgacctgttctatctgcgcacgctgtccttcatcgtcgtgattgcgggcatcgtgcagttcaccgagatgttcatccacaagacgagcccggtgctgtatcaggtactcgggatctatctcccgctcatcacgacgaactgcgccgtgctcggaattccgctcctcaacgtccaggcgcagaacggcttcgtcgaatcgctgttcttcggcgccggcggcgcgatcggattcacgctcgtgctgatccttttcgccggcatccgcgagcgtctcgacacctgtgacgtgcctgccccgttcaagggcacgagcatcgcgatggtcaccgcgggactgatgtcgctcgccttcatgggcttctcgggcctggtcaagtaa

SEQ ID NO: 20387 - protein, 191 aa, Thiobacillus denitrificans ATCC 25259
METYILILISTVFVNNIVMAKILGLCPFMGVSKKLETAIGMGLATTFVLTLASGSSYLINEYLLGTDLFYLRTLSFIVVIAGIVQFTEMFIHKTSPVLYQVLGIYLPLITTNCAVLGIPLLNVQAQNGFVESLFFGAGGAIGFTLVLILFAGIRERLDTCDVPAPFKGTSIAMVTAGLMSLAFMGFSGLVK

SEQ ID NO: 20388 - DNA, 678 bp, Thiobacillus denitrificans ATCC 25259
  CDS (1)..(678): transl_table=11
atgatgaccctgagcgaattccgcagcctcttccacaacggcctcgtcaagcagaacacgggactcgtgcaactgctcggcctgtgcccgctgctcgcgatcagcaacaccgtcgtcaacgccctgtcgctcggcctggcgacgatgctcgtgatggcggcgtcgagcggcgcggtttcggccgcccgcaatttcgttccgaacgaaatccgcatcccggtcttcgtcctcatcatcgcggcgctggtgaccgtgatcgacctcgcgatgaacgccttcgtccatccgctctacctcgtgctcggcattttcattccgctcatcacgaccaactgcatcgtgctcgcccgcgccgacgccttcgccgccaagaaccggccgctgcacagcgtcgtcgacgcggtcgcgatgggcctcgggctgaccctggtgctgatcgtgctcggcgcgatgcgcgagctcgtcggacagggcacgctgttctcgggcatcgacctggtcttcggtgaagacgcgaagcagttcgtgctgcatgtgctgcccgattaccgcggcttcctgctcgcggtgctgccgcccggcgccttcattgcgctcggcctgctgatcgccgcgcacaactggaacaaggcgcgcgccgagcagcgcgcgcagctgaccgttcccgccacggcttga

SEQ ID NO: 20389 - protein, 225 aa, Thiobacillus denitrificans ATCC 25259
MMTLSEFRSLFHNGLVKQNTGLVQLLGLCPLLAISNTVVNALSLGLATMLVMAASSGAVSAARNFVPNEIRIPVFVLIIAALVTVIDLAMNAFVHPLYLVLGIFIPLITTNCIVLARADAFAAKNRPLHSVVDAVAMGLGLTLVLIVLGAMRELVGQGTLFSGIDLVFGEDAKQFVLHVLPDYRGFLLAVLPPGAFIALGLLIAAHNWNKARAEQRAQLTVPATA

SEQ ID NO: 20390 - DNA, 570 bp, Pseudomonas fluorescens PfO-1
  CDS (1)..(570)
atgaccgaactcgtgcttacgctcttcagtgctgcgctgatcaacaacttcgtgttgcactggccgctgggcgtcgttccgctgctgggcagtgagcgtcgacaagtgcatgcgctggggctggcaacgttgtgtctgatgctgcttgtcggtgtggcgggttacgtgctctggcattggctactggtgccgttgcaactggaattcctgcgcctgtttgtgtttatgccgttgagcatcttgctgatcacgccgttgctgaagctgttggcgcattggctcccggcgttgccattcgatggtttgtggccgctgctgctgggcaatgccggtgtgctggggctgatactgatcaacgcgcaagcggacaaaggcctgtttcatgcaattgcgctgagccttggcgccggcctgggtttctggctggtgttgagcctgttcagcgatttgcgtgagcgcacggccgacaacgatattcccctgccctttcgtggcctgccgatcctgttgatcggcgccggactgatggccgtggcttttctcggattcagtggactgatcaaaacatga

SEQ ID NO: 20391 - protein, 189 aa, Pseudomonas fluorescens PfO-1
MTELVLTLFSAALINNFVLHWPLGVVPLLGSERRQVHALGLATLCLMLLVGVAGYVLWHWLLVPLQLEFLRLFVFMPLSILLITPLLKLLAHWLPALPFDGLWPLLLGNAGVLGLILINAQADKGLFHAIALSLGAGLGFWLVLSLFSDLRERTADNDIPLPFRGLPILLIGAGLMAVAFLGFSGLIKT

SEQ ID NO: 20392 - DNA, 711 bp, Microbulbifer degradans 2-40
  CDS (1)..(711)
atggcaacttacagcgaaatcacctctaacggcttgtggaaaaacaaccccgcgctggtacaacttttgggtttatgcccacttctagcggtaactggctcggtagtaaatgctcttggtttaggcttggcaaccctgcttgtactcattgggtctaacgttgcggtttcgttaattcgcaatgcagttagcgatgctgtgcgcttaccggcctttgtgatgattattgctgcctttaccacctgcaccgaattagtgatgcaggcatttactttcgagctttatcaaatactaggtatttttattccgcttattgttaccaactgctctattctcggccgcgccgatgcctttgccagtaaaaacaaagtactgccttcagcagtagacggttttatgatgggtatgggctttttactagtgttactggtaattggcgcagtacgcgaaattattggcaacggcacacttttcgaaaacatgcatttgttgtttggtgaagcggcgcgcaactggcgactggatttatttggtgaaggctataaaggctttttggtggcggtattaccacccggcgcattcttagttacaggcctattaattgccgttaaaaatatggtggatgcagaattaaaacgccgcgaagatgcgcgtaaagccaaaccggtaaaaggctctaaacgcgtgcgtactacaggccaaatcgcttaa

SEQ ID NO: 20393 - protein, 236 aa, Microbulbifer degradans 2-40
MATYSEITSNGLWKNNPALVQLLGLCPLLAVTGSVVNALGLGLATLLVLIGSNVAVSLIRNAVSDAVRLPAFVMIIAAFTTCTELVMQAFTFELYQILGIFIPLIVTNCSILGRADAFASKNKVLPSAVDGFMMGMGFLLVLLVIGAVREIIGNGTLFENMHLLFGEAARNWRLDLFGEGYKGFLVAVLPPGAFLVTGLLIAVKNMVDAELKRREDARKAKPVKGSKRVRTTGQIA

SEQ ID NO: 20394 - DNA, 714 bp, Azotobacter vinelandii AvOP
  CDS (1)..(714): transl_table=11
atgagcaatcccagctatcgcgagctgagcgccaatgggctctggaagaacaatccggcactggtgcagcttctcggactctgtcctctgctcggcgtgagcaactccactgtcaatgccttgggactcgggctggccacgatcctggtattgggcagctccagcatggccgtatcgctggtacgcggggtggtgaatactgccgtgcgcctgccggttttcgtgatgatcatcgccgcactgaccacctgtatcgagctcctgatgcaggccttcacctatgagctttaccagatcctcggcatcttcatcccgttgattaccaccaactgcgtgatactcggtcgtgccgacggttttgccgctaggcattctctcctgctggcgggcttcgatggattgatgatggggttgggctttgccgtggtactcgtcatgctgggcggagtccgcgagatgttcggtaccggcggattgttcgccaacatgcatctgctgttcgggcccgcagcgaccgattggcatatcgcgctgatcgacgactacaaagggtttctgctagccatattgccgcccggggcctttatcgttctgggtctcctgatcgcggcaaagaaccggatcgacgagcaccgagccgaacgaagcaggacctttcagccacaaacctccagccccagccgccgcgtgcgagtgactggggtaatcgagtaa

SEQ ID NO: 20395 - protein, 237 aa, Azotobacter vinelandii AvOP
MSNPSYRELSANGLWKNNPALVQLLGLCPLLGVSNSTVNALGLGLATILVLGSSSMAVSLVRGVVNTAVRLPVFVMIIAALTTCIELLMQAFTYELYQILGIFIPLITTNCVILGRADGFAARHSLLLAGFDGLMMGLGFAVVLVMLGGVREMFGTGGLFANMHLLFGPAATDWHIALIDDYKGFLLAILPPGAFIVLGLLIAAKNRIDEHRAERSRTFQPQTSSPSRRVRVTGVIE

SEQ ID NO: 20396 - DNA, 579 bp, Shewanella baltica OS155
  CDS (1)..(579): transl_table=11
atgactgaatatctcctcttgttgatcagtacagtgctggtcaacaatttcgttttagtgaaattcttaggcctgtgcccttttatgggggtctccagcaaattggagtccgctattggcatgtctatggcgaccacttttgtgctgacgttagcctctattctcagttatctcgtcaaccagtatctgttattaccctttgacctgagttatctacgaaccatgagctttattttagtgattgccgttgttgtgcaatttactgaaatggtcgtgcaaaagaccagtgccgctctgcaccgtgccttagggatttacctgccgcttatcacgactaactgcgcggtattgggcgtagccttattaaacgtgaatgagaagcacgattttatccaatcggctatctatggctttggtgctgcgttaggcttctcattagtgttaattctcttctcggcgatgcgcgagcgtttagcggccgccgatgtccccttacctttcaaaggcggcgcgattgcgatgatcaccgcaggtcttatgtccctcgcctttatgggattcacaggattggttaagtaa

SEQ ID NO: 20397 - protein, 192 aa, Shewanella baltica OS155
MTEYLLLLISTVLVNNFVLVKFLGLCPFMGVSSKLESAIGMSMATTFVLTLASILSYLVNQYLLLPFDLSYLRTMSFILVIAVVVQFTEMVVQKTSAALHRALGIYLPLITTNCAVLGVALLNVNEKHDFIQSAIYGFGAALGFSLVLILFSAMRERLAAADVPLPFKGGAIAMITAGLMSLAFMGFTGLVK

SEQ ID NO: 20398 - DNA, 627 bp, Shewanella amazonensis SB2B
  CDS (1)..(627): transl_table=11
atggccaacgaactgaaaaaggttctgaccggacctattatcaataacaacccgattgcgctgcagatcctcggtgtttgtagtgcgctggcagtaaccagcaagctggaaactgcactggtgatgaccctggcgctgaccgcagtgactgcgttctcgaacctgttcatctccatgatccgtaaccacattccaagcagtgtgcgtattatcgtgcaaatggcgattatcgcctcgctggtaatcgtggttgatcaaatcctgcaagcttacgcctatgacgtggccaagcagctgtcagtattcgtgggccttatcatcactaactgtatcgtgatgggccgcgccgaagcctacgctatgaagactcctccaatgatgagctttatggatggtatcggtaacggtctgggctatggcgccatcctgctgtctgttggcttcgttcgtgaactgtttggtaacggttcgctgttcggcgtagagatcctgtccaagatctctgacggtggctggtatcagcccaacggtctgctcctgctgccgccaagtgcgttcttcctgatcggtgttctgatttggatcatccgcacctacaagcctgagcaagttgaagcaaaaggataa

SEQ ID NO: 20399 - protein, 208 aa, Shewanella amazonensis SB2B
MANELKKVLTGPIINNNPIALQILGVCSALAVTSKLETALVMTLALTAVTAFSNLFISMIRNHIPSSVRIIVQMAIIASLVIVVDQILQAYAYDVAKQLSVFVGLIITNCIVMGRAEAYAMKTPPMMSFMDGIGNGLGYGAILLSVGFVRELFGNGSLFGVEILSKISDGGWYQPNGLLLLPPSAFFLIGVLIWIIRTYKPEQVEAKG

SEQ ID NO: 20400 - DNA, 654 bp, Silicibacter sp. TM1040
  CDS (1)..(654): transl_table=11
atggcacaaacctatcgttcgcaactggtcgatccgctgatcgacaacaacccgatcacgttgcaggttctgggcatctgctcggcgcttgctgtgacctcctcgatgcaggtggcctttgtgatggcactggcggtgaccttcgtgaccggcttttcgtcgatgttcatctcgatgctgcgcaaccagatcccttcttcgatccggatcatcgtgcagatggtgatcatcgcctcgctggtgatcctggtggatcagctcctgaaggcctacgcctatgaaatctccaagacgctttcggtctttgtgggtctcatcatcaccaactgtatcgtgatgggccgcgccgaagcctttgcgatgaagaacccgcccgtggcgagctttatcgacggggttggcaatggtcttggttacgggcttttgctgctgatcgttgcattctttcgcgagcttttcggcgccggatcgctctttggtgtgaccattctggagaccgtgaacaacggcggctggtatgtgcccaacggcatgatgctgctgccgccgtcggccttctttgtgatcggccttctgatctgggggatccgcacatggaaaccggcacaggtcgaagagcgtgagtataaaattcagacggtggaggcccactga

SEQ ID NO: 20401 - protein, 217 aa, Silicibacter sp. TM1040
MAQTYRSQLVDPLIDNNPITLQVLGICSALAVTSSMQVAFVMALAVTFVTGFSSMFISMLRNQIPSSIRIIVQMVIIASLVILVDQLLKAYAYEISKTLSVFVGLIITNCIVMGRAEAFAMKNPPVASFIDGVGNGLGYGLLLLIVAFFRELFGAGSLFGVTILETVNNGGWYVPNGMMLLPPSAFFVIGLLIWGIRTWKPAQVEEREYKIQTVEAH

SEQ ID NO: 20402 - DNA, 579 bp, Shewanella denitrificans OS-217
  CDS (1)..(579): transl_table=11
atgacagagtatctcctgttgttgattggcactgtgctagtgaacaacttcgtattagttaaattcttaggtttatgtccctttatgggggtgtcgagcaagttggcttccgccatcggcatgtctatggcaaccaccttcgtattgaccttagcctcagtgctcagcttcctcactaatgagtttctactgcagcctttttcgctggaatacctgcgcaccatgagctttattctggtgattgctgtggtggtgcaatttactgaaatgctagtacaaaaaaccagtgccagtttgcatcgcgccttagggatttacttaccgcttattaccaccaattgcgccgtgttaggtgtggctttactcaatatcaatgaagatcataattttattgagtctgccatttatggttttggtgcggcggtgggcttttctatggtgctcattttattttccgccatgcgtgaacgcttagcggcggccgatgtaccactgccttttcgcggtggcgccattgctatgataacagcgggacttatgtcattagcctttatgggatttgcggggctgattaaataa

SEQ ID NO: 20403 - protein, 192 aa, Shewanella denitrificans OS-217
MTEYLLLLIGTVLVNNFVLVKFLGLCPFMGVSSKLASAIGMSMATTFVLTLASVLSFLTNEFLLQPFSLEYLRTMSFILVIAVVVQFTEMLVQKTSASLHRALGIYLPLITTNCAVLGVALLNINEDHNFIESAIYGFGAAVGFSMVLILFSAMRERLAAADVPLPFRGGAIAMITAGLMSLAFMGFAGLIK

SEQ ID NO: 20404 - DNA, 585 bp, Ectothiorhodospira halophila
  CDS (1)..(585): transl_table=11
atgacggaatacctgctactgctgctcggcgtcgccctggtgaacaatgtggtcctgacccagttcctggggctgtgcccgttcatgggtgtgtcgaaccgactggataccgccctgggcatgggcctggccaccaccttcgtactcacgttggcggcggcggccgggtgggtgatcgagcacgccctgctcatccccctggacctggagttcctgcgcatcctcagcttcatcctcgtcatcgccgggaccgtgcagttcaccgagatggccgtcgcccgggtcagccccgccctgcaccaggttctgggcgtcttcctgccgctgatcaccaccaactgcgccgtgctcggcgtggccctgctcaacatccaggaagcgcacacgttcgccgagagcctggtcttcggcgtcggagcggcgctcggtttcacgctggttctggtcctgttcgccggcctgcgcgagcggctggccacggcggcggtaccggccgcctttgccggtgcccccatcggcttcgtggtcgccgggctgctgtcgctggcgttcatgggactgaccggactgcccgaaggagggtga

SEQ ID NO: 20405 - protein, 194 aa, Ectothiorhodospira halophila
MTEYLLLLLGVALVNNVVLTQFLGLCPFMGVSNRLDTALGMGLATTFVLTLAAAAGWVIEHALLIPLDLEFLRILSFILVIAGTVQFTEMAVARVSPALHQVLGVFLPLITTNCAVLGVALLNIQEAHTFAESLVFGVGAALGFTLVLVLFAGLRERLATAAVPAAFAGAPIGFVVAGLLSLAFMGLTGLPEGG

SEQ ID NO: 20406 - DNA, 573 bp, Pseudomonas stutzeri
  CDS (1)..(573): transl_table=11
atggaatatgcgctgtttctgatcggcaccgtgctggtcaacaacgtggtgctggtctacttcctcggcctgtgtccgttcatgggggtctccggcaagctcgacccctcgctgggcatgggcttggcgacgaccctggtgatgaccctgggcggcgtcagcagctggctgctagaacgctacgtgctgcagccgctgggcatcggctttttgcgcatcctctcctacatcctggtgatcgccggcctggtgcagctgatcgagatgatcatccgcagggttagcccgccgctgtatcgctcgctgggcatctacctgccgctgatcaccaccaactgcgccgtgctgggcgtgccgctgatcagcgtgcgcgaaggccacaggctggccgaggcggggctgttcggcctgggctcggcgctgggcttcaccctggtcatggtgatcttcgccggcttgcgcgagcgcctggcgctggccagcgtgccggcggccttcgccggcgcaccgatcgctttcgtcaccgccgggttgctggcgatggctttcatgggcttcgccggcctgatctga

SEQ ID NO: 20407 - protein, 190 aa, Pseudomonas stutzeri
MEYALFLIGTVLVNNVVLVYFLGLCPFMGVSGKLDPSLGMGLATTLVMTLGGVSSWLLERYVLQPLGIGFLRILSYILVIAGLVQLIEMIIRRVSPPLYRSLGIYLPLITTNCAVLGVPLISVREGHRLAEAGLFGLGSALGFTLVMVIFAGLRERLALASVPAAFAGAPIAFVTAGLLAMAFMGFAGLI

SEQ ID NO: 20408 - DNA, 642 bp, Chlamydophila caviae
  CDS (1)..(642): transl_table=11
atggcagcaaataaatcatataagagttatttccttgatcctctttggggtaacaaccaaccgcttattgctattttagggatttgttctgcacttgctgtaacaacaacagtaaacacggcgattactatgggtcttgctgtaagctttgttacaggatgctcctcattctttgtatctttattacgcaaagcgactcctgatagcgtccgtatgatcacacagctcattattattagcttatttgtgattgttattgatcagtttttaaaagcctttttctttactatctcaaaaacgctttccgtttttgttggattgattatcaccaactgtatcgttatgggaagagctgaaagcctagcaagaaatgttccccctattccagcatttttagatggtcttgcatcgggattaggttacggttgggtattagttactgtgagtatagtcagagagttcttcggctttggtactattcttggattacaacttatcccaaaatgtttctacgcgtccgaaacccatcctgatggatatgaaaactttggtttgatggttttagcgccctcagcatttttccttttaggcattatgatttggggagtgaatattcttagatctaagaaagcaaaaaggtaa

SEQ ID NO: 20409 - protein, 213 aa, Chlamydophila caviae
MAANKSYKSYFLDPLWGNNQPLIAILGICSALAVTTTVNTAITMGLAVSFVTGCSSFFVSLLRKATPDSVRMITQLIIISLFVIVIDQFLKAFFFTISKTLSVFVGLIITNCIVMGRAESLARNVPPIPAFLDGLASGLGYGWVLVTVSIVREFFGFGTILGLQLIPKCFYASETHPDGYENFGLMVLAPSAFFLLGIMIWGVNILRSKKAKR

SEQ ID NO: 20410 - DNA, 642 bp, Chlamydia muridarum
  CDS (1)..(642): transl_table=11
atgacaaccaataaatcctctttaagctactttactgatgctttgtggatcaataaccagcctctcgtcgctattctagggatctgttcagctcttgctgttaccaccacagtaacaacggctttaacaatgggattagccgttagctttgttaccggattcgcttcttttgttgtatctttactaagaaaaattactccagaaagcgttcgaatgatcgctcagcttatcatcattagcctttttgtgatccttatcgaccaatttttaaaagccttttttttcaatatttccaaaacgctttctgtttttgttggtctaatcattactaactgtattgtcatgggacgagcagaaagtatggctagacatatttctcctattcctgcgtttttagatggtctgggatcgggacttggatatgggtgggttcttgtttgcatcagtatcattagagagttattcgggtttggaaccattttaggcttccacatcattcctaagattttttatgcttcagcagctcaccccgatggatatgaaaacttagggttgatggttttagctccatcagcatttttcctattaggaatcatggtttggctggtgaatattgttagagcttcaaagacaaagaggtaa

SEQ ID NO: 20411 - protein, 213 aa, Chlamydia muridarum
MTTNKSSLSYFTDALWINNQPLVAILGICSALAVTTTVTTALTMGLAVSFVTGFASFVVSLLRKITPESVRMIAQLIIISLFVILIDQFLKAFFFNISKTLSVFVGLIITNCIVMGRAESMARHISPIPAFLDGLGSGLGYGWVLVCISIIRELFGFGTILGFHIIPKIFYASAAHPDGYENLGLMVLAPSAFFLLGIMVWLVNIVRASKTKR

SEQ ID NO: 20412 - DNA, 642 bp, Chlamydia pneumoniae
  CDS (1)..(642): transl_table=11
atgacaagtaaaaagtcctataaaagctatttctttgatcctctatggagcaacaaccaaattctcattgcgattttggggatttgctcggctctggcagtgacaacaacagtacaaacggcaattactatgggaattgctgtcagcattgttacaggatgctcgtctttctttgtttccttattacgtaagttcactcctgacagtgtgagaatgattactcagctaattatcattagcttgtttgtgattgttatcgaccagtttttaaaagcttttttctttgatatttccaaaacactttctgtttttgtgggtcttatcatcaccaattgcatcgtgatgggaaggtctgaaagtctagctaggcatgtgactcctattccagcgttcttagatgggtttgcctctggcttaggatacggctgggtcttacttgtcattggagtcatcagagaactctttggttttggaactcttatggggtttcgcatcatccctcaatttgtttatgcttccgaaacccaccccgatggataccaaaatttaagtcttatggtgctagcaccgtcggcttttttcctacttggtattatgatttggcttgttaacattcgagactctaaaaagagaaaaaggtag

SEQ ID NO: 20413 - protein, 213 aa, Chlamydia pneumoniae
MTSKKSYKSYFFDPLWSNNQILIAILGICSALAVTTTVQTAITMGIAVSIVTGCSSFFVSLLRKFTPDSVRMITQLIIISLFVIVIDQFLKAFFFDISKTLSVFVGLIITNCIVMGRSESLARHVTPIPAFLDGFASGLGYGWVLLVIGVIRELFGFGTLMGFRIIPQFVYASETHPDGYQNLSLMVLAPSAFFLLGIMIWLVNIRDSKKRKR

SEQ ID NO: 20414 - DNA, 642 bp, Chlamydia trachomatis
  CDS (1)..(642): transl_table=11
atgaccactaataaatcctacttaacctattttacagatgcgttgtggatcaacaatcaacctttgatcgctatcttaggtatctgctcagctcttgcggttacgactacggtgactacagctctaactatgggattcgcggttagctttgtcactggctgttcctcttttgttgtttctttgcttaggaaaattactcccgaaagtgttcggatgatcgctcagctaattatcattagcctatttgtgatcttaattgaccagtttttgaaagcttttttctttactatttcgaaaaccctctccgtttttgttggattaatcattactaactgcattgtcatggggcgagcagaaagtatggctagacacgtttcacctattccagcgtttttagatggattaggatctggcctcggctatgggtgggtacttgtttgcattagtatcattagagagctatttggcttcggaactattctaggatttcgtgtcattcctgaaattctatacacttcagcagcacaccctgatggatacgaaaacctaggtctgatggttttagctccatccgcatttttccttttagggatcatgatttggatcgtaaacattattagagctccaaagacaaagaggtag

SEQ ID NO: 20415 - protein, 213 aa, Chlamydia trachomatis
MTTNKSYLTYFTDALWINNQPLIAILGICSALAVTTTVTTALTMGFAVSFVTGCSSFVVSLLRKITPESVRMIAQLIIISLFVILIDQFLKAFFFTISKTLSVFVGLIITNCIVMGRAESMARHVSPIPAFLDGLGSGLGYGWVLVCISIIRELFGFGTILGFRVIPEILYTSAAHPDGYENLGLMVLAPSAFFLLGIMIWIVNIIRAPKTKR

SEQ ID NO: 20416 - DNA, 624 bp, Haemophilus ducreyi
  CDS (1)..(624): transl_table=11
atggcaaataacaatcttaaaaagttattgttatctccaatctcagataacaatccaattgcattacagatcttaggtatttgttctgcgcttgctgtaactacacagttacaaacagcattcgtaatggccattgcggtgagtttagtaaccgcattctctagtatgtttatttcaatgatccgtaactatattccaaatagtattcgtattattgtacaaatggcaattattgcttctttggttattcttgtagaccaaatattgcgtgcctatgtttatgacttatcgaaacagctttctgtttttgttggtcttattattactaactgtatcgttatgggacgtgcagaagcatttgcaatgaaatcagctccgcttgaaagttttgtagatggtattggtaatggcttaggttatggtgcgatgttagttattgtcgcttttttacgcgaattaattggttcaggtaaaatctttggtgttactgttttacaaactatccaagatggtggttggtatcaagcgaatggtttattcttattagcaccaagtgcgttctttatcatcggttttgtgatttgggcgatcagaacttggaaaccagagcaagtggagaaataa

SEQ ID NO: 20417 - protein, 207 aa, Haemophilus ducreyi
MANNNLKKLLLSPISDNNPIALQILGICSALAVTTQLQTAFVMAIAVSLVTAFSSMFISMIRNYIPNSIRIIVQMAIIASLVILVDQILRAYVYDLSKQLSVFVGLIITNCIVMGRAEAFAMKSAPLESFVDGIGNGLGYGAMLVIVAFLRELIGSGKIFGVTVLQTIQDGGWYQANGLFLLAPSAFFIIGFVIWAIRTWKPEQVEK

SEQ ID NO: 20418 - DNA, 627 bp, Haemophilus influenzae
  CDS (1)..(627): transl_table=11
atgtctggaaaaacaagttataaagatctgttgttagcgccaattgctaaaaacaaccctattgcattgcaaatcttagggatttgttctgcattagctgtaacaacaaaattagaaactgcttttgttatggcgattgcagttaccttagtaactggattatcaaacttatttgtttccctaatccgcaattatatccctaacagcattcgtattattgtacagctcgcaatcatcgcttcgcttgttatcgtagtggatcaaattctaaaagcctatgcttatggtttatctaaacaactttcagtattcgttggtttgattattactaactgtatcgtaatggggcgtgctgaagcatttgcgatgaaatcccctccagttgaaagttttgtagatggtatcggaaatggcttaggttatggttcaatgttaattatcgtagcatttttccgtgaacttatcggttcaggtaaattatttggtatgacgattttcgaaactattcaaaatggtggctggtatcaagcaaatggtttattcctacttgcaccaagtgcattctttatcatcggatttgtgatctggggattaagaacttggaaaccagaacaacaggagaagtaa

SEQ ID NO: 20419 - protein, 208 aa, Haemophilus influenzae
MSGKTSYKDLLLAPIAKNNPIALQILGICSALAVTTKLETAFVMAIAVTLVTGLSNLFVSLIRNYIPNSIRIIVQLAIIASLVIVVDQILKAYAYGLSKQLSVFVGLIITNCIVMGRAEAFAMKSPPVESFVDGIGNGLGYGSMLIIVAFFRELIGSGKLFGMTIFETIQNGGWYQANGLFLLAPSAFFIIGFVIWGLRTWKPEQQEK

SEQ ID NO: 20420 - DNA, 627 bp, Neisseria meningitidis serogroup A
  CDS (1)..(627): transl_table=11
atggctgatatgaaacgcttgaaacatttgatgttttcaccctttatcgacaacaacccgattgccttgcaggttttgggtatttgttcggctttggcggttaccaccaaacttcagacggccatcgtgatgggtatttccgtagctttggtaaccggtttttccagcttcttcatttcgctggtacgcaactacatccccaacagcatccgcatcatcgtgcaaatggcgattatcgcgtcgctggttacgctggtcgaccaactcttgcaggcatttgcctacgaattgtccaaacagctttccgtattcgtcggtctgattattaccaactgtatcgtgatgggccgcgccgaagcatttgcgatgaaagagccgccgctggaaagcctgatcgacggcatcggcaacggcgcgggctacgggatgatgctgcttgtcgtcgccaccgtccgcgaactgattggctcgggcaaactcttgggctacaccgttttccaaaccgtgcaggacggcggctggtatcagaccaacggcttgttcctgctcgcccccagcgcgttcttcatcatcggctttttgatttggggactgcgtacctggaaacccgaacaggcggaggaataa

SEQ ID NO: 20421 - protein, 208 aa, Neisseria meningitidis serogroup A
MADMKRLKHLMFSPFIDNNPIALQVLGICSALAVTTKLQTAIVMGISVALVTGFSSFFISLVRNYIPNSIRIIVQMAIIASLVTLVDQLLQAFAYELSKQLSVFVGLIITNCIVMGRAEAFAMKEPPLESLIDGIGNGAGYGMMLLVVATVRELIGSGKLLGYTVFQTVQDGGWYQTNGLFLLAPSAFFIIGFLIWGLRTWKPEQAEE

SEQ ID NO: 20422 - DNA, 627 bp, Neisseria meningitidis serogroup B
  CDS (1)..(627): transl_table=11
atggctgatatgaaacgcttgaaacatttgatgttttcaccctttatcgacaacaacccgattgccttgcaggttttgggtatttgttcggctttggcggttaccaccaaacttcagacggccatcgtgatgggtatttccgtagctttggtaaccggtttttccagcttcttcatttcgctggtacgcaactacatccccaacagcatccgtattatcgtgcaaatggcgattatcgcgtcgctggttacgctggtcgaccaactcttgcaggcatttgcctacgaattgtccaaacagctttccgtattcgtcggtctgattattaccaactgtatcgtgatgggccgcgccgaagcatttgcgatgaaagagccgccgctggaaagcctgatcgacggcatcggcaacggcgcgggctacgggataatgctgcttgtcgtcgccaccgtccgcgaactgattggctcgggcaaactcttgggctacaccgttttccaaaccgtgcaggacggcggctggtatcagaccaacggcttgttcctgctcgcccccagcgcgttcttcatcatcggctttttgatttggggactgcgtacctggaaacccgaacaggcggaggaataa

SEQ ID NO: 20423 - protein, 208 aa, Neisseria meningitidis serogroup B
MADMKRLKHLMFSPFIDNNPIALQVLGICSALAVTTKLQTAIVMGISVALVTGFSSFFISLVRNYIPNSIRIIVQMAIIASLVTLVDQLLQAFAYELSKQLSVFVGLIITNCIVMGRAEAFAMKEPPLESLIDGIGNGAGYGIMLLVVATVRELIGSGKLLGYTVFQTVQDGGWYQTNGLFLLAPSAFFIIGFLIWGLRTWKPEQAEE

SEQ ID NO: 20424 - DNA, 627 bp, Pasteurella multocida
  CDS (1)..(627): transl_table=11
atggctgatactaaaaagttaaaaggcttgttgctatcgccagtgatggacaacaacccgattgcgttacaaattttagggatttgttctgcgttagcggtaacaaccaaattagaaacggcaattgtaatgacgtttgcggtaattttcgttacggcattctcaaacttatttatttctttgatccgtaactatattccaaacagtgtacgtattatcgtgcaaatggcgattatcgcctcgttggttatcttagttgaccaaatcttacgtgcttatgcctatggtttatcaaaacaactttcggttttcgtgggcttgattattactaactgtatcgttatgggacgagcagaagcctttgcgatgaaatcacaaccactagaaagtttcgttgatgggattggtaacggcttaggttatggcgcaattttagtgtcagttgcctttatccgtgaattaattggttcaggcaaattatttggtatgacggtattccaaactatccaagatggtggttggtatcaaaccaatggtttattcctacttgcaccaagtgcgttctttattattggttttattatttggggtattcgtaccttaaaaccaaatcaggtggagaagtag

SEQ ID NO: 20425 - protein, 208 aa, Pasteurella multocida
MADTKKLKGLLLSPVMDNNPIALQILGICSALAVTTKLETAIVMTFAVIFVTAFSNLFISLIRNYIPNSVRIIVQMAIIASLVILVDQILRAYAYGLSKQLSVFVGLIITNCIVMGRAEAFAMKSQPLESFVDGIGNGLGYGAILVSVAFIRELIGSGKLFGMTVFQTIQDGGWYQTNGLFLLAPSAFFIIGFIIWGIRTLKPNQVEK

SEQ ID NO: 20426 - DNA, 675 bp, Pseudomonas aeruginosa
  CDS (1)..(675): transl_table=11
gtgatggctgctcaacccacgatccgcgaagtcctgttcaatccggtcttccagaacaatccgatcggcctgcagatcctcgggatctgctcggcgctggcggtaacctcgaacctgaagaccgctaccgtcatggccatcgccctgaccctggtgaccggcttctccaacctgttcatctcgatgatccgccggcagattcccagctcgatccggatgatcgtgcagatggtgatcatcgcctcgctggtgatcgtcgtcgaccaggtgctcaaggcctatgcctatagcctgagcaagcagctctcggtgttcgtcgggctgatcatcaccaactgcatcgtgatgggccgcgccgaagccttcgccatggccaacccgccgctcgtgtcgttcttcgacggcatcggcaacggtctcggctacagcgccatgctgctggtgctgggcttcgtccgcgagctgttcggcgccggcaagctctacggcatcagcgtgttgccgacggtcaacgatggcggctggtaccagccgaacggcctgctcctgttgccgccttcggcgttcttcctgatcggcctgatcatctgggccctgcggacctggaagaaagaccaggtcgaggccccgacctacaagatggccccgcaggtatccagcaaggaggcttactga

SEQ ID NO: 20427 - protein, 224 aa, Pseudomonas aeruginosa
MMAAQPTIREVLFNPVFQNNPIGLQILGICSALAVTSNLKTATVMAIALTLVTGFSNLFISMIRRQIPSSIRMIVQMVIIASLVIVVDQVLKAYAYSLSKQLSVFVGLIITNCIVMGRAEAFAMANPPLVSFFDGIGNGLGYSAMLLVLGFVRELFGAGKLYGISVLPTVNDGGWYQPNGLLLLPPSAFFLIGLIIWALRTWKKDQVEAPTYKMAPQVSSKEAY

SEQ ID NO: 20428 - DNA, 633 bp, Vibrio alginolyticus
  CDS (1)..(633)
atgtctagtgcacaaaacgttaaaaagagcattctagcgccagtattggataacaacccaatcgcgctacaagttcttggtgtatgttctgctcttgcagtaacaactaaactagaaacagcttttgtaatgacgctagcggtaacatttgtaactgcgctgtctaacttctctgtttcattgatccgtaaccacattcctaacagtgtgcgtatcatcgttcagatggcaattatcgcatcgctagtaatcgtggtagaccaggtgctaaaagcttacctatacgatatctctaaacagctatctgtattcgttggtctgattatcactaactgtatcgtaatgggtcgtgctgaagcattcgcaatgaagtctgcgccagtaccatctcttattgacggtattggtaacggtctaggttacggtttcgttcttatcactgtaggtttcttccgtgagctatttggctcaggcaagctatttggcctagaagttctacctctagtgagcaacggtggttggtaccagcctaacggcctaatgctactagcaccatcagcattcttcctaatcggcttccttatctgggtaatccgtattctgaaaccagaacaagtagaagcgaaggagtaa

SEQ ID NO: 20429 - protein, 210 aa, Vibrio alginolyticus
MSSAQNVKKSILAPVLDNNPIALQVLGVCSALAVTTKLETAFVMTLAVTFVTALSNFSVSLIRNHIPNSVRIIVQMAIIASLVIVVDQVLKAYLYDISKQLSVFVGLIITNCIVMGRAEAFAMKSAPVPSLIDGIGNGLGYGFVLITVGFFRELFGSGKLFGLEVLPLVSNGGWYQPNGLMLLAPSAFFLIGFLIWVIRILKPEQVEAKE

SEQ ID NO: 20430 - DNA, 633 bp, Vibrio anguillarum
  CDS (1)..(633): transl_table=11
atgtctagcgcaaaagagattaaaaagagcattctagcgccagtgttggataacaacccaattgcacttcaagtgcttggtgtctgttctgcccttgcggtaaccactaaattggaaacggcgtttgttatgacgctagccgttatgtttgtaacggctttctctaacttattcgtttcgttaattcgtcaccacatacctaacagtgtgcgtatcatcgttcagatggcgatcattgcttcattggttattgttgttgaccagatcctacgtgcttatttatacgatatctcgaaacagctatcggtgttcgtagggttgatcattactaactgtatcgtaatgggccgtgctgaagcatttgcaatgaagtcggcaccgattccttcctttatcgatggtatcggtaatggtctgggttatggttttgtattgatcactgttggtttcttccgcgaacttcttggttcaggcaagctatttggaatggaagttctacctcttgtgaaagatggtggctggtatcaacctaacggtttgatgctgctagcaccttcggcattcttcctaattggcttcatgatttgggcgattcgcacgttcaaacctgaacaactagaagcgaaggagtaa

SEQ ID NO: 20431 - protein, 210 aa, Vibrio anguillarum
MSSAKEIKKSILAPVLDNNPIALQVLGVCSALAVTTKLETAFVMTLAVMFVTAFSNLFVSLIRHHIPNSVRIIVQMAIIASLVIVVDQILRAYLYDISKQLSVFVGLIITNCIVMGRAEAFAMKSAPIPSFIDGIGNGLGYGFVLITVGFFRELLGSGKLFGMEVLPLVKDGGWYQPNGLMLLAPSAFFLIGFMIWAIRTFKPEQLEAKE

SEQ ID NO: 20432 - DNA, 633 bp, Vibrio cholerae
  CDS (1)..(633): transl_table=11
atgtctagcgcaaaagagctgaaaaagagtgtgttagccccagttttggacaacaacccgattgcactgcaagttctgggtgtgtgttctgcactggcggtaaccactaagctggaaacggcatttgttatgacgctagcggtaatgtttgttactgcattgtctaacttcttcgtttctctgatccgtaaccacattcctaacagtgtgcgtattatcgtacaaatggcgattatcgcttcgttagttatcgtggtagaccagattctgaaagcgtatctgtacgatatttctaagcaactgtcggtattcgttggtctgattatcaccaactgtatcgtaatgggtcgtgcagaagcgtttgcaatgaagtctgaaccaattccttctttcattgatggtattggtaacggtttaggatacggtttcgtgctgatgacggttggtttcttccgtgagcttttaggctcaggtaagctatttggcttggaagttctgcctctgatcagcaacggtggttggtatcagccaaacggcctgatgctactcgcaccttcagcattcttcctgatcggcttcatgatttgggcgattcgcacgttcaaaccagaacaagtagaagcgaaggagtaa

SEQ ID NO: 20433 - protein, 210 aa, Vibrio cholerae
MSSAKELKKSVLAPVLDNNPIALQVLGVCSALAVTTKLETAFVMTLAVMFVTALSNFFVSLIRNHIPNSVRIIVQMAIIASLVIVVDQILKAYLYDISKQLSVFVGLIITNCIVMGRAEAFAMKSEPIPSFIDGIGNGLGYGFVLMTVGFFRELLGSGKLFGLEVLPLISNGGWYQPNGLMLLAPSAFFLIGFMIWAIRTFKPEQVEAKE

SEQ ID NO: 20434 - DNA, 633 bp, Vibrio harveyi
  CDS (1)..(633): transl_table=11
atgtctagcgcacaaaacattaaaaagagcattatggcgccggtgttggacaacaacccgatcgcgctgcaggttcttggtgtatgttctgctcttgcagtaacaactaaactagaaacagcatttgtaatgacactagcggtaactttcgtaactgcactgtctaacttctctgtttctttaatccgtaaccacattcctaacagtgtgcgtatcatcgtacagatggcaatcatcgcatcgctagtaatcgtggtagaccaagtgcttaaagcttacctatacgatatctctaaacagctatctgtattcgtaggtcttatcatcacgaactgtatcgtaatgggtcgtgctgaagcattcgcaatgaaatctgcaccagtaccatcgctaatcgacggtatcggtaacggtctaggttacggcttcgttcttatcactgtaggcttcttccgtgaactatttggttcaggcaagctattcggtatggaagttctaccactagtgagcaacggtggttggtaccagccaaacggtctaatgctactagcaccatctgcattcttcctaatcggcttcctgatctgggtaatccgtattctgaagccagaacaagtagaagcgaaggagtaa

SEQ ID NO: 20435 - protein, 210 aa, Vibrio harveyi
MSSAQNIKKSIMAPVLDNNPIALQVLGVCSALAVTTKLETAFVMTLAVTFVTALSNFSVSLIRNHIPNSVRIIVQMAIIASLVIVVDQVLKAYLYDISKQLSVFVGLIITNCIVMGRAEAFAMKSAPVPSLIDGIGNGLGYGFVLITVGFFRELFGSGKLFGMEVLPLVSNGGWYQPNGLMLLAPSAFFLIGFLIWVIRILKPEQVEAKE

SEQ ID NO: 20436 - DNA, 633 bp, Vibrio parahaemolyticus
  CDS (1)..(633): transl_table=11
atgtctagcgcacaaaacattaaaaagagcattatggcgccggtgttggataacaacccgatcgcgctacaagttcttggtgtatgttctgctcttgcagtaacaactaaactagaaacggcgtttgtaatgacactagcggtaacattcgtaactgctctgtctaacttctctgtttctctgatccgtaaccacattcctaacagtgtgcgtatcatcgttcaaatggcgatcatcgcatctctagtaatcgtggtagaccaggtgctaaaagcttacctatacgatatctctaaacagctatcagtattcgttggcctgatcatcacaaactgtatcgtaatgggtcgtgctgaagcattcgcaatgaagtctgcgccagtaccttctctaatcgacggtattggtaacggtctaggttacggtttcgttcttatcactgttggtttcttccgtgagctattcggctcaggcaaactatttggtatggaagtactacctctagtgagcaacggtggttggtaccagcctaacggtctaatgctactagcaccatctgcattcttcctaatcggcttcctgatctgggtaatccgtgtgtttaaaccagaacaagtagaagcgaaggagtaa

SEQ ID NO: 20437 - protein, 210 aa, Vibrio parahaemolyticus
MSSAQNIKKSIMAPVLDNNPIALQVLGVCSALAVTTKLETAFVMTLAVTFVTALSNFSVSLIRNHIPNSVRIIVQMAIIASLVIVVDQVLKAYLYDISKQLSVFVGLIITNCIVMGRAEAFAMKSAPVPSLIDGIGNGLGYGFVLITVGFFRELFGSGKLFGMEVLPLVSNGGWYQPNGLMLLAPSAFFLIGFLIWVIRVFKPEQVEAKE

SEQ ID NO: 20438 - DNA, 633 bp, Vibrio vulnificus
  CDS (1)..(633): transl_table=11
atgtctagtgcacaaaacattaaaaagagcattcttgcgccagtattggataacaacccaatcgcgctacaagttcttggtgtatgttctgcgcttgcagtaactaccaaactagaaacagcgtttgttatgacactagcggtaacgtttgtaactgcattgtctaacttctttgtttctttaatccgtaaccacattcctaacagtgtgcgtatcatcgttcaaatggcgatcatcgcatctctagtaatcgtggtagaccagatcttgaaagcttacttgtacgatatctctaaacagctatcggtattcgtaggtcttatcattactaactgtatcgtaatgggtcgtgcagaagcgttcgcgatgaaatctgcaccagttccatcattgatcgacggtattggtaacggtcttggttatggttttgttcttattactgtgggcttcttccgtgaactattcggtagcggtaagttgtttggtatggaagtactaccactagtgaacaatggtggttggtatcagccaaatggtctgatgcttctagcgccatctgcattcttcctaatcggcttcatgatttgggcgatccgtacgttcaaaccagagcaagtagaagcgaaggagtaa

SEQ ID NO: 20439 - protein, 210 aa, Vibrio vulnificus
MSSAQNIKKSILAPVLDNNPIALQVLGVCSALAVTTKLETAFVMTLAVTFVTALSNFFVSLIRNHIPNSVRIIVQMAIIASLVIVVDQILKAYLYDISKQLSVFVGLIITNCIVMGRAEAFAMKSAPVPSLIDGIGNGLGYGFVLITVGFFRELFGSGKLFGMEVLPLVNNGGWYQPNGLMLLAPSAFFLIGFMIWAIRTFKPEQVEAKE

SEQ ID NO: 20440 - DNA, 633 bp, Vibrio vulnificus
  CDS (1)..(633): transl_table=11
atgtctagtgcacaaaacattaaaaagagcattcttgcgccagtattggataacaacccaatcgcgctacaagttcttggtgtatgttctgcgcttgcagtaactaccaaactagaaacagcgtttgttatgacattagcggtaacgtttgtaactgcattgtctaacttctttgtttctgtaatccgtaaccacattcctaacagtgtgcgtatcatcgttcaaatggcgatcatcgcatctctagtaatcgtggtagaccagatcttgaaagcttacttgtacgatatctctaaacagctatcggtattcgtaggtcttatcattactaactgtatcgtaatgggtcgtgcagaagcgttcgcgatgaaatctgcaccagttccatcactgatcgacggtattggtaacggtcttggttatggttttgttcttattactgtgggcttcttccgtgaactattcggtagcggtaagttgtttggtatggaagtactaccactagtgaacaatggtggttggtatcagccaaatggtctgatgcttctagcgccatctgcattcttcctaatcggcttcatgatttgggcgatccgtacgttcaaaccagagcaagtagaagcgaaggagtaa

SEQ ID NO: 20441 - protein, 210 aa, Vibrio vulnificus
MSSAQNIKKSILAPVLDNNPIALQVLGVCSALAVTTKLETAFVMTLAVTFVTALSNFFVSVIRNHIPNSVRIIVQMAIIASLVIVVDQILKAYLYDISKQLSVFVGLIITNCIVMGRAEAFAMKSAPVPSLIDGIGNGLGYGFVLITVGFFRELFGSGKLFGMEVLPLVNNGGWYQPNGLMLLAPSAFFLIGFMIWAIRTFKPEQVEAKE

SEQ ID NO: 20442 - DNA, 630 bp, Yersinia pestis
  CDS (1)..(630): transl_table=11
atggctgatagcaaagagattaaacgggtcttattaagcccattgtttgataacaacccgattgccttgcaaatccttggggtttgctcagcactggcggtgaccactaagctggagacagcattagtgatgactctggcagtcacgctggtgactgcgttttcgagtttcttcatctcattgattcgaaatcacatcccaaacagcgtaaggattatcgttcagatggtcatcattgcttcgctggtgattgtggtagaccaagtattacgtgcttatgcctatgaaatttccaagcagttgtcggtgttcgttggcttgattattacgaactgtatcgtcatgggccgtgctgaagcttatgcgatgaaatcaccgccaattgaaagttttatggatggtatcggtaatggcctggggtacggcgtaatactggttctggtcggttttgtccgcgaattggttggttcaggcaagctatttggcgtgacggtattggaaacggtgcaaaacggtgggtggtatctacctaacggattattcctgctggcacctagtgcattctttattattggtctgctgatttggggcctacggaccttgaaacctgcgcagattgagaaggagtaa

SEQ ID NO: 20443 - protein, 209 aa, Yersinia pestis
MADSKEIKRVLLSPLFDNNPIALQILGVCSALAVTTKLETALVMTLAVTLVTAFSSFFISLIRNHIPNSVRIIVQMVIIASLVIVVDQVLRAYAYEISKQLSVFVGLIITNCIVMGRAEAYAMKSPPIESFMDGIGNGLGYGVILVLVGFVRELVGSGKLFGVTVLETVQNGGWYLPNGLFLLAPSAFFIIGLLIWGLRTLKPAQIEKE

SEQ ID NO: 20444 - DNA, 795 bp, Chlamydophila caviae
  CDS (1)..(795): transl_table=11
atgtggttaggcgaatatacatggctaaatgtctttggtatctttttacaagcaaccttcatccaaaacatccttctatcgaatttccttgggatgtgtagctatcttgcctgttccgcgcgagtttctactgctaatggcttaggaatgtctgtagccttagtactgacagttactggaagcattaactgggtcgtgcatacatttattaccgggcctaaagctttaacttggatatccccctcattagccaatgtaaatctaaatttccttgagctgattatcttcattgtagttattgctgccttcacacagatcttggaactacttttagaaaaggtatccagaaatctctatctttccttagggatcttcctaccgttaattgctgtaaattgtgcaattttaggaggcgtgctctttgggattacacggaattatccatttatccctatgatgatattctctttaggagcaggatgcggttggtggttagctattgtcttatttgcaactattaaagaaaaacttgcctattctgatattcctaaaaaccttcaaggcatggggatctccttcattaccacaggacttatagctatggcctttatgagtcttacaggtattgatatctctaagccatcagcagcagcaccaacatcggatattctagaaacaccaaatgcttcttcgataacaacaacaaatctaaaacctgtgaaaaaagtacgaatagcacaacaacgtgctgctaaggaaaaagcaataaatataaaaagaggaaaaactcagtaa

SEQ ID NO: 20445 - protein, 264 aa, Chlamydophila caviae
MWLGEYTWLNVFGIFLQATFIQNILLSNFLGMCSYLACSARVSTANGLGMSVALVLTVTGSINWVVHTFITGPKALTWISPSLANVNLNFLELIIFIVVIAAFTQILELLLEKVSRNLYLSLGIFLPLIAVNCAILGGVLFGITRNYPFIPMMIFSLGAGCGWWLAIVLFATIKEKLAYSDIPKNLQGMGISFITTGLIAMAFMSLTGIDISKPSAAAPTSDILETPNASSITTTNLKPVKKVRIAQQRAAKEKAINIKRGKTQ

SEQ ID NO: 20446 - DNA, 735 bp, Chlamydia muridarum
  CDS (1)..(735): transl_table=11
atgtggttaggagactattctttaataaatctcttaggcatctttttgcaagccacctttatccaaaatattttgctttccacatttttagggatgtgcagctatttagcctgttcttctcgcttgtcaacagccaacggcttagggatgtctgtagctctcgtacttaccattacaggaagtattaactggttgatccaccattttgtcacagggcctcatgccttatcctggctatctcctgcattagcaaatatagatctcagctttttagaattgattacatttattgttgttatcgcagcattcacacaaattttagagctccttctggagcgattttcaagaaacctctatttagctttaggaatctttctaccccttattgcagtaaactgtgctattttaggcggagtattatttggaattacccgaaactatccttttcttcctatggttgtattttctttaggatcaggatgtggttggtggttagctattgttctctttgcaaccattagagaaaagttagcctattccgatatccctcaacatttacaaggaatggggatctccttcattacaacaggccttatagctatggcattcatgggattaacaggaattgacatctcaaaacctacagctaaatctgtagtgatttcagacacttccaccaataaatcaaaaacaacctccgcgcaagaacgcctcagctcaaaccacaaagcttaa

SEQ ID NO: 20447 - protein, 244 aa, Chlamydia muridarum
MWLGDYSLINLLGIFLQATFIQNILLSTFLGMCSYLACSSRLSTANGLGMSVALVLTITGSINWLIHHFVTGPHALSWLSPALANIDLSFLELITFIVVIAAFTQILELLLERFSRNLYLALGIFLPLIAVNCAILGGVLFGITRNYPFLPMVVFSLGSGCGWWLAIVLFATIREKLAYSDIPQHLQGMGISFITTGLIAMAFMGLTGIDISKPTAKSVVISDTSTNKSKTTSAQERLSSNHKA

SEQ ID NO: 20448 - DNA, 771 bp, Chlamydia pneumoniae
  CDS (1)..(771): transl_table=11
atgtggttaggtgcgtatacttggcttaatgtctttggtattcttctacaagcagcctttattcagaatatccttcttgcgaatttcttggggatgtgtagttaccttgcttgctctactagggtttctacagccaatggcttggggatgtccgtagcccttgttctcactgtaacagggagcatcaactggtttgtccatgctttcatcacgggccctaaagctctaacttggatctctccatctttagcttctgtaaacctaggttttctggagctgattattttcatcgtggtgattgcggcattcacgcaaatcttagagcttcttttagaaaaggtctccaggaatctatatctctccttagggatcttccttcccttgattgctgtgaactgcgcgatcctagggggtgtgctcttcggaatcacacgtagttatccttttattcctatgatgatcttctctttaggagcgggatgtgggtggtggctcgctattgttattttagccactatcaaagaaaaactcgcctactctgatattcccaaaaacctccagggaatggggatctccttcattacaacaggcctcattgctatggcttttatgagcttaacaggtattgatatttctaaaccttcagcaaagattcaaagagctcctctagagactgaagttgttgaaaacacgaccaatccactaaaagaatcttcgtccaaacaccagccaagtatttctaaagcacgaacgcagcgtcgctctctctag

SEQ ID NO: 20449 - protein, 256 aa, Chlamydia pneumoniae
MWLGAYTWLNVFGILLQAAFIQNILLANFLGMCSYLACSTRVSTANGLGMSVALVLTVTGSINWFVHAFITGPKALTWISPSLASVNLGFLELIIFIVVIAAFTQILELLLEKVSRNLYLSLGIFLPLIAVNCAILGGVLFGITRSYPFIPMMIFSLGAGCGWWLAIVILATIKEKLAYSDIPKNLQGMGISFITTGLIAMAFMSLTGIDISKPSAKIQRAPLETEVVENTTNPLKESSSKHQPSISKARTQRRSL

SEQ ID NO: 20450 - DNA, 735 bp, Chlamydia trachomatis
  CDS (1)..(735): transl_table=11
atgtggttgggagactattctttattaaatctcttagggatctttttacaagccacgtttattcagaatattttgctgtccacatttttaggaatgtgtagctatttggcctgttcatctcgcttgtcaacagccaacggcttggggatgtctgtggctctcgtgcttacaattacaggaagcattaactggttggtacattattttatcacaaaaccgggcgccttggcttggttatcacctgcattagcaaatattgatctcagcttcctagaattaatcatgtttattgttgttatcgcagcattcacacaaattttagaagtactcctcgaaagattttccagaaacctttacctagctttgggaatatttcttccccttattgcagtaaactgcgctatcctaggtggagtattatttggaattactcgaaactatccttttctacctatggtggtattctccttgggctcaggatgtggctggtggcttgcgatcgttctttttgcaactattagagaaaaattagcttactccgatgttcctcaacacttacgagggacagggatttccttcattacgacaggactgatggctatggcttttatgggattaacaggaattgatatttccaaacccacaacatctaaacctgcatttgtcacgaatatagccactgatagcccacaaccaaatacacattctagctcagaagaacccaaggcttcataa

SEQ ID NO: 20451 - protein, 244 aa, Chlamydia trachomatis
MWLGDYSLLNLLGIFLQATFIQNILLSTFLGMCSYLACSSRLSTANGLGMSVALVLTITGSINWLVHYFITKPGALAWLSPALANIDLSFLELIMFIVVIAAFTQILEVLLERFSRNLYLALGIFLPLIAVNCAILGGVLFGITRNYPFLPMVVFSLGSGCGWWLAIVLFATIREKLAYSDVPQHLRGTGISFITTGLMAMAFMGLTGIDISKPTTSKPAFVTNIATDSPQPNTHSSSEEPKAS

SEQ ID NO: 20452 - DNA, 597 bp, Haemophilus ducreyi
  CDS (1)..(597): transl_table=11
atggaacatcttttaagtatcttcgttaagtccgtatttattgaaaatatggcgctttctttcttccttggcatgtgtacattccttgcggtgtctaagaaagtttcgaccgcttttggcttagggattgcggttattgtagtattaggcatagctgtacctgtaaatcaacttgtttatactcatatattaaaagacggtgtgttagttgatggcgtagatttaagtttcttaaacttcattacttttatcggggtcattgccgcacttgttcaaatccttgaaatgattttagacaagttcttccctgcgctttacagtgcactagggattttcttaccgcttattacagtaaactgtgcgatttttggtggggtatcatttatggttcaacgtgaatatgatctagttgaatcagtagtttatggtattggtgccggtacggggtggatgttagcaattgttgcccttgcaggtttaaccgagaaaatgaaatattcagatgtaccagcaggcttacgtggtttaggcattacatttattactgttggcctaatggcattaggttttatgtctttctcaggcattcaattataa

SEQ ID NO: 20453 - protein, 198 aa, Haemophilus ducreyi
MEHLLSIFVKSVFIENMALSFFLGMCTFLAVSKKVSTAFGLGIAVIVVLGIAVPVNQLVYTHILKDGVLVDGVDLSFLNFITFIGVIAALVQILEMILDKFFPALYSALGIFLPLITVNCAIFGGVSFMVQREYDLVESVVYGIGAGTGWMLAIVALAGLTEKMKYSDVPAGLRGLGITFITVGLMALGFMSFSGIQL

SEQ ID NO: 20454 - DNA, 597 bp, Haemophilus influenzae
  CDS (1)..(597): transl_table=11
atggaacattatattagcctatttgttaaggcagtcttcattgaaaatatggcactttctttcttcttaggaatgtgtactttcttagcggtatctaaaaaggtgtcccctgcgtttggtcttgggattgcggtaactttcgttcttgggatcgcagtgccagtaaaccaattaatttatgcaaatgtactaaaagagaatgctttaattgaaggtgtagatttatcattcttaaacttcatcactttcattggggttattgctggtttagtgcaaattcttgaaatggtattagataaatttatgccatctctttataacgcattagggattttcttacctttaatcgcagtaaactgtgcgatctttggtggggtatctttcatggttcaacgtgattacaatttccctgaatctatcgtgtatggtttcggctcaggtttaggttggatgttagcgattgtagcgcttgctggcttaacggaaaaaatgaaatacgctgatattcctgctggattaaaaggtttaggtattacctttatctctgttggtttaatggcactaggctttatgtctttctctggtattcaattataa

SEQ ID NO: 20455 - protein, 198 aa, Haemophilus influenzae
MEHYISLFVKAVFIENMALSFFLGMCTFLAVSKKVSPAFGLGIAVTFVLGIAVPVNQLIYANVLKENALIEGVDLSFLNFITFIGVIAGLVQILEMVLDKFMPSLYNALGIFLPLIAVNCAIFGGVSFMVQRDYNFPESIVYGFGSGLGWMLAIVALAGLTEKMKYADIPAGLKGLGITFISVGLMALGFMSFSGIQL

SEQ ID NO: 20456 - DNA, 594 bp, Neisseria meningitidis serogroup A
  CDS (1)..(594): transl_table=11
atggaacactatttgagcctctttatcaaatccgtcttcatcgaaaatatggcgctatccttctttttgggtatgtgtacgtttttggcggtatccaaaaaagtatccaccgcattcggtttgggtgtggcggtgattttcgtactcggactgtccgtccccgccaaccaattggtttactcgctgctcaaagacggcgcgattgtcgaaggcgtggatttgacctttttgaaattcatcaccttcatcggcgtgattgccgctttggtgcagattttggaaatgttcttggataaattcgtccccgccctctataacgcgctgggcatctacctgccgctgattaccgtaaactgcgcgattttcggtgccgtatcgtttatggcgcagcgcgaatacggcttcggcgaatccgtcgtgtacggcttcggtgcgggcttgggctggatgttggcgattgtcgctttggcgggcattaccgaaaaaatgaaatattcggacgctcccaaaggcctcaaaggcttgggcattacctttatcgccgccggcctgatggcgatggcgtttatgtcgttctctggcatccagttataa

SEQ ID NO: 20457 - protein, 197 aa, Neisseria meningitidis serogroup A
MEHYLSLFIKSVFIENMALSFFLGMCTFLAVSKKVSTAFGLGVAVIFVLGLSVPANQLVYSLLKDGAIVEGVDLTFLKFITFIGVIAALVQILEMFLDKFVPALYNALGIYLPLITVNCAIFGAVSFMAQREYGFGESVVYGFGAGLGWMLAIVALAGITEKMKYSDAPKGLKGLGITFIAAGLMAMAFMSFSGIQL

SEQ ID NO: 20458 - DNA, 594 bp, Neisseria meningitidis serogroup B
  CDS (1)..(594): transl_table=11
atggaacactatttgagcctcttcatcaaatccgtcttcattgaaaatatggcactatccttctttttgggtatgtgcacgtttttggcggtatccaaaaaagtatccaccgcattcggtttgggtgtggcggtaattttcgtactcgggctgtccgtccctgtcaaccaactcgtttactcgctgctcaaagacggcgcgattgccgaaggcgtggatttgacctttttgaaattcatcaccttcatcggcgtgattgccgctttggtgcagattttggaaatgttcttggataaattcgtccccgccctctataacgcattgggcatctacctgccgctgattaccgtgaactgcgcgattttcggcgccgtatcgtttatggcgcaacgcgaatacaacttcggcgagtccgttgtatacggcttcggcgcgggcttgggctggatgttggcgattgtcgctttggcgggcattaccgaaaaaatgaaatattcggacgctcccaaaggcctcaaaggcttgggcattacctttatcgccgccggcctgatggcgatggcgtttatgtcgttctctggcatccagttataa

SEQ ID NO: 20459 - protein, 197 aa, Neisseria meningitidis serogroup B
MEHYLSLFIKSVFIENMALSFFLGMCTFLAVSKKVSTAFGLGVAVIFVLGLSVPVNQLVYSLLKDGAIAEGVDLTFLKFITFIGVIAALVQILEMFLDKFVPALYNALGIYLPLITVNCAIFGAVSFMAQREYNFGESVVYGFGAGLGWMLAIVALAGITEKMKYSDAPKGLKGLGITFIAAGLMAMAFMSFSGIQL

SEQ ID NO: 20460 - DNA, 597 bp, Pasteurella multocida
  CDS (1)..(597): transl_table=11
atggaacattatattagccttttcgttaaatccgtttttatcgaaaacatggcactttctttcttcttaggaatgtgtactttccttgctgtatcgaaaaaagtgtctactgcatttggtttggggattgcggttatcgtggtattaggtattgcggtacctgtaaaccaattagtgtatagctttatcttaaaagacagtgcattagttcaaggtattgatctcagtttcttaaacttcattacctttatcggtgtgattgccgcattagttcaaattcttgagatggtattggataagtatttccctgcactttataacgcgttagggatcttcttaccattaattaccgtaaactgtgcgatttttggtggggtatccttcatggttcaacgtgattatacctttgttgaatccgttgtatacggtattggcgcagggacgggttggatgttagccattgttgcgcttgcaggcatcacggaaaaaatgaaatatgctgatgtaccagcagggttacgtggtttaggcattacctttatcactgtaggtctgatggcacttggttttatgtcattttcaggtattcagttgtaa

SEQ ID NO: 20461 - protein, 198 aa, Pasteurella multocida
MEHYISLFVKSVFIENMALSFFLGMCTFLAVSKKVSTAFGLGIAVIVVLGIAVPVNQLVYSFILKDSALVQGIDLSFLNFITFIGVIAALVQILEMVLDKYFPALYNALGIFLPLITVNCAIFGGVSFMVQRDYTFVESVVYGIGAGTGWMLAIVALAGITEKMKYADVPAGLRGLGITFITVGLMALGFMSFSGIQL

SEQ ID NO: 20462 - DNA, 609 bp, Pseudomonas aeruginosa
  CDS (1)..(609): transl_table=11
atggagcactacatcagcctgttcgtgaaagccgtgttcgtcgagaacatggcgctggcgttcttcctcggcatgtgtaccttcatcgccatctcgaagaaggtggagaccgccatcggcctgggtatcgcggtgatcgtggtgcagaccatcaccgtgccggccaacaacctgatctacacctacctgctcaaggacggcgcgctggcctgggccgggctgcccgaggtggacctgagcttcctcggcctgctcagctacatcggggtgatcgccgccatcgtgcagatcctcgagatgctcctcgacaagtacgtacccagcctctacaacgcgctgggcgtgttcctgccgctgatcacggtgaactgcgcgatcatggccggctcgctgttcatggtcgagcgcgactacaaccttgccgagagcacggtgtacggcgtcggctcgggcttttcctgggcgctggcgatcgccgcgctggcgggtatccgcgagaagctcaagtacagcgacgtccccgagggcctgcagggcctggggatcaccttcatcaccatcggcctgatgtcgttgggcttcatgtcgttctccggcgtgcagttgtaa

SEQ ID NO: 20463 - protein, 202 aa, Pseudomonas aeruginosa
MEHYISLFVKAVFVENMALAFFLGMCTFIAISKKVETAIGLGIAVIVVQTITVPANNLIYTYLLKDGALAWAGLPEVDLSFLGLLSYIGVIAAIVQILEMLLDKYVPSLYNALGVFLPLITVNCAIMAGSLFMVERDYNLAESTVYGVGSGFSWALAIAALAGIREKLKYSDVPEGLQGLGITFITIGLMSLGFMSFSGVQL

SEQ ID NO: 20464 - DNA, 597 bp, Vibrio alginolyticus
  CDS (1)..(597): transl_table=11
atggaacattacattagtctgttagttaaatcgattttcatcgaaaacatggctctgtctttcttcctaggtatgtgtactttccttgccgtatctaagaaggttaagacctctttcggcctaggtgttgcagttgtggtagtactgactatcgctgttcctgtgaacaacctagtatacaacctagttctgagagagaacgcgttagttgagggcgtggaccttagcttcctaaacttcatcacctttatcggtgtaattgcagcacttgtacagattctagagatggttctagaccgtttcttcccacctttgtacaacgcgctaggcatcttcctaccgctgatcacagtaaactgtgcaatcttcggtggtgtatctttcatggtacaacgtgactacaactttgctgaatctatcgtttacggtttcggctctggtgtgggctggatgctagcaatcgttgctcttgcaggtatccgtgagaagatgaagtactctgacgtacctccaggtctacgtggtcttggtatcacatttatcactgtaggtcttatggcgttaggctttatgtctttctctggtgttcaactgtaa

SEQ ID NO: 20465 - protein, 198 aa, Vibrio alginolyticus
MEHYISLLVKSIFIENMALSFFLGMCTFLAVSKKVKTSFGLGVAVVVVLTIAVPVNNLVYNLVLRENALVEGVDLSFLNFITFIGVIAALVQILEMVLDRFFPPLYNALGIFLPLITVNCAIFGGVSFMVQRDYNFAESIVYGFGSGVGWMLAIVALAGIREKMKYSDVPPGLRGLGITFITVGLMALGFMSFSGVQL

SEQ ID NO: 20466 - DNA, 597 bp, Vibrio anguillarum
  CDS (1)..(597): transl_table=11
atggaacattatatcagtttgcttgttcgatcgatttttatcgaaaacatggcactctctttcttcttgggtatgtgtacatttcttgctgtatctaagaaagtaaagacatcgtttggtttagggattgcggttactgttgttctgaccatttcagtaccagtgaataacttggtttataacttgttacttaaaccgggtgcattgggtgaaaatattgatcttacatttctaaatttcattacctttatcggtgttattgccgcattggtacagatcttagagatgatattggatcgttttttcccacctttgtataacgcgctgggcattttcttacctttaatcacagtgaactgcgccatttttggtggtgtatctttcatggttcagcgtgattataactttgctgaatccgtcgtttacggtttcggttcgggtgtgggttggatgttagcgattgtcgctcttgccggtatccgtgagaaaatgaaatattcagatgtacctccgggtttacgtggtttagggattaccttcatcacggcgggtctaatggcgttaggctttatgtctttctctggtgttcaactgtaa

SEQ ID NO: 20467 - protein, 198 aa, Vibrio anguillarum
MEHYISLLVRSIFIENMALSFFLGMCTFLAVSKKVKTSFGLGIAVTVVLTISVPVNNLVYNLLLKPGALGENIDLTFLNFITFIGVIAALVQILEMILDRFFPPLYNALGIFLPLITVNCAIFGGVSFMVQRDYNFAESVVYGFGSGVGWMLAIVALAGIREKMKYSDVPPGLRGLGITFITAGLMALGFMSFSGVQL

SEQ ID NO: 20468 - DNA, 597 bp, Vibrio cholerae
  CDS (1)..(597): transl_table=11
atggaacattatattagtctgctggtgaaatcgattttcatcgagaacatggcactctctttcttcctagggatgtgtacattcttggcggtgtcgaagaaagttaagacatcattcggcttaggtattgcggtaatcgtagtactgactatctctgtaccagttaacaatctggtgtacaaccttgtgcttaagccagatgcactggttgaaggggtagatcttagcttcctcaactttattacctttatcggtgttattgcggcattagtacagattctggaaatgatcctcgatcgcttcttcccgcctctgtataacgcactgggcatcttccttccgctgatcacagtaaactgtgcgatcttcggtggtgtgtctttcatggtgcagcgcgactacagctttgctgaatcagtggtatacggtttcggttctggtgtgggttggatgctggctatcgtcgctcttgcaggtatccgtgagaagatgaagtattcagacgttcctccaggtctgcgtggtttaggtattacctttatcacggctggcttgatggcgttgggcttcatgtctttctctggtgttcaactgtaa

SEQ ID NO: 20469 - protein, 198 aa, Vibrio cholerae [sequence omitted]

SEQ ID NO: 20470 - DNA, 597 bp, Vibrio harveyi
  CDS (1)..(597): transl_table=11
atggaacattacatcagtctgctagttaaatcgattttcatcgaaaacatggcactgtctttcttcctaggtatgtgtactttccttgccgtatctaagaaagttaagacctctttcggtctgggtgttgcagttgtggtagtactaactatcgcggttcctgtgaacaacctagtttacaacctagttctgaaagagaacgcgttagttgagggcgtagaccttagcttcctaaacttcatcacctttatcggtgtaatcgctgcacttgtacagattctagagatggttcttgaccgtttcttcccacctttgtacaacgcgcttggcatcttcctaccgctgatcacagtaaactgtgcgatcttcggtggtgtatctttcatggtacaacgtgactacaactttgctgaatctatcgtttacggtttcggttctggtgtgggctggatgctagcgatcgtcgctcttgcaggtatccgtgagaagatgaagtactcagatgtacctcctggtctacgtggtctaggtatcacgttcatcactgtaggtctaatggcgttaggctttatgtctttctctggtgttcaactgtaa

SEQ ID NO: 20471 - protein, 198 aa, Vibrio harveyi
MEHYISLLVKSIFIENMALSFFLGMCTFLAVSKKVKTSFGLGVAVVVVLTIAVPVNNLVYNLVLKENALVEGVDLSFLNFITFIGVIAALVQILEMVLDRFFPPLYNALGIFLPLITVNCAIFGGVSFMVQRDYNFAESIVYGFGSGVGWMLAIVALAGIREKMKYSDVPPGLRGLGITFITVGLMALGFMSFSGVQL

SEQ ID NO: 20472 - DNA, 597 bp, Vibrio parahaemolyticus
  CDS (1)..(597): transl_table=11
atggaacattacatcagtctgttagttaaatcgattttcatcgagaacatggcactgtctttcttcctaggtatgtgtactttccttgccgtatctaagaaagttaagacctctttcggtctaggtgttgcagttgtggtagttttgactatcgctgttcctgtgaacaacctagtttacaacctagttctgaaagaaaatgcgttagttgagggcgtggaccttagcttcctaaacttcatcacctttatcggtgtaattgcagcacttgtacagatcctagagatggttcttgaccgtttcttcccacctttgtacaacgcgctaggcatcttcctaccgttgatcacagtaaactgtgcgatcttcggtggtgtatctttcatggtacaacgtgactacaactttgctgaatctgttgtttacggtttcggttctggtgtgggttggatgctagcaatcgttgctcttgcaggtatccgtgagaagatgaagtactctgacgtacctccaggtctacgtggtcttggtatcacattcatcactgtaggtcttatggcgttaggctttatgtctttctctggtgttcaactgtaa

SEQ ID NO: 20473 - protein, 198 aa, Vibrio parahaemolyticus
MEHYISLLVKSIFIENMALSFFLGMCTFLAVSKKVKTSFGLGVAVVVVLTIAVPVNNLVYNLVLKENALVEGVDLSFLNFITFIGVIAALVQILEMVLDRFFPPLYNALGIFLPLITVNCAIFGGVSFMVQRDYNFAESVVYGFGSGVGWMLAIVALAGIREKMKYSDVPPGLRGLGITFITVGLMALGFMSFSGVQL

SEQ ID NO: 20474 - DNA, 597 bp, Vibrio vulnificus
  CDS (1)..(597): transl_table=11
atggaacattacatcagtctgttaattaaatcgattttcatcgagaacatggctctgtctttcttcttgggtatgtgtaccttcttggcggtatctaagaaagtaaagacctctttcggtctaggtgttgcagtagtggttgttttgactatcgctgtaccagtaaacaacctggtttacaacctagtacttaaggaaaacgcgctggtcgaaggcgtggatctgagcttcctaaacttcatcacctttatcggtgtaattgcggcacttgtacagattctagagatgattcttgaccgtttcttcccgcctttgtacaacgcgctaggcatcttcctaccgctgatcacagtaaactgtgcgatcttcggtggtgtatctttcatggtacaacgtgactacaacttcgctgaatctgttgtttatggtttcggtgcaggtgtgggttggatgctcgcgatcgtggcccttgcaggtatccgtgagaagatgaagtactcagatgtacctcctggtctacgtggtttaggtattacctttatcactgtaggtttgatggcgttaggctttatgtctttctctggtgttcaactgtaa

SEQ ID NO: 20475 - protein, 198 aa, Vibrio vulnificus
MEHYISLLIKSIFIENMALSFFLGMCTFLAVSKKVKTSFGLGVAVVVVLTIAVPVNNLVYNLVLKENALVEGVDLSFLNFITFIGVIAALVQILEMILDRFFPPLYNALGIFLPLITVNCAIFGGVSFMVQRDYNFAESVVYGFGAGVGWMLAIVALAGIREKMKYSDVPPGLRGLGITFITVGLMALGFMSFSGVQL

SEQ ID NO: 20476 - DNA, 600 bp, Yersinia pestis
  CDS (1)..(600): transl_table=11
atgaccgagagttatttgaccatttttattagagctgtttttgttgaaaatatggcattaaatttctttcttggaatgtgcacatttctggcaatatctaaaaaagtagaaacagcctttggccttgggttgacagttacagccctgctggcgatagcaacacctctcaataatcttatttacacctatatactcagagagaatgctctgattgatggagtggatcttagttttcttgatttcattaccttcatcggggtgcttgcggcattagtccaaatacttgaaatggtacttgagcgatttttgccaagcttacatcacaccctgggggcctttttaccactactgacgatccactgtgcaatatttggtgcaaccatttttatggttcagcgagaatatacgttcaccgaatcttttgtttacgggactggctgtggtttaggttggatgctggccattatatccatggcaggtttacgagaaaaaatgaagtactctaacattccaaaagggttgcaagggctcggcatcgtctttatgacggcagggctgatgtccttaggatttatgtcattttcaggtattcggctctaa

SEQ ID NO: 20477 - protein, 199 aa, Yersinia pestis
MTESYLTIFIRAVFVENMALNFFLGMCTFLAISKKVETAFGLGLTVTALLAIATPLNNLIYTYILRENALIDGVDLSFLDFITFIGVLAALVQILEMVLERFLPSLHHTLGAFLPLLTIHCAIFGATIFMVQREYTFTESFVYGTGCGLGWMLAIISMAGLREKMKYSNIPKGLQGLGIVFMTAGLMSLGFMSFSGIRL

SEQ ID NO: 20478 - DNA, 582 bp, Buchnera aphidicola subsp
  CDS (1)..(582): transl_table=11
atgaaacattatattttattttttatttctaatatattaattgaaaattttattctagtaaaatttctcggtttgtgtccttttttaggagcgtcgagtaatattgaaactgcttttggaatgagttgcgcaactactttcgttatactcacatcatcagtattattatggtgtgttaattttttcattttgttacctctggatttaatttatttgagaattattgcttatatgttaattgtttcagttagtgttcaatttttagaaatagtgttacgaaagacgagtcctattttatatcgtttacttgggatttttctcccattaattacaactaattgtacagtgttagctattccattattcagtttatatgaacatcatacatttttagaatctatattttatgggttaagtgcatcgttaggatttgctttagtgatgattattttttcttgtattcgtgaacgtatagtattatctgatattcctttgccatttcaaggtgctcctattattttaattactgtaagtttaatatctattacatttatgggttttaagggtttgataaaaatttga

SEQ ID NO: 20479 - protein, 193 aa, Buchnera aphidicola subsp
MKHYILFFISNILIENFILVKFLGLCPFLGASSNIETAFGMSCATTFVILTSSVLLWCVNFFILLPLDLIYLRIIAYMLIVSVSVQFLEIVLRKTSPILYRLLGIFLPLITTNCTVLAIPLFSLYEHHTFLESIFYGLSASLGFALVMIIFSCIRERIVLSDIPLPFQGAPIILITVSLISITFMGFKGLIKI

SEQ ID NO: 20480 - DNA, 582 bp, Buchnera aphidicola subsp
  CDS (1)..(582): transl_table=11
atgaaaagttactttttttttattttatcaaatatattaattgataattttattttagtaaaatttcttggtttatgtcccttcataggtgcgtcaaatcaaataaaacaagcttttggaataagtttcgccacttcttttgttgtagttgtatcgacagttttattatggtttgttaacttttttattttgttaccttttgatttagtttatttaagaattatagtgtatatgttaattatttcttttggtgttcaattaatagaaattattttacgagggactagtcctatcttatatcgtatacttggtatttttctccctttaattacaactaattgtgccgttttagctattccattgtttagtctctatttaaatcatacattcttagaatctattctttatgcagtcagtgcctcttttggttttactttagtgatggttatattttctagtattcgtgaacgtatattattatctgacgttcctttagcatttcaagggtcgcctattgttcttattactgtaagtttaatatctattgtatttatggggtttaaaggtttagtgagaatttaa

SEQ ID NO: 20481 - protein, 193 aa, Buchnera aphidicola subsp
MKSYFFFILSNILIDNFILVKFLGLCPFIGASNQIKQAFGISFATSFVVVVSTVLLWFVNFFILLPFDLVYLRIIVYMLIISFGVQLIEIILRGTSPILYRILGIFLPLITTNCAVLAIPLFSLYLNHTFLESILYAVSASFGFTLVMVIFSSIRERILLSDVPLAFQGSPIVLITVSLISIVFMGFKGLVRI

SEQ ID NO: 20482 - DNA, 585 bp, Buchnera aphidicola subsp
  CDS (1)..(585): transl_table=11
atggtgatgcatttttttttgctttttgtaagtaatatacttattaataattttatattagttagatttcttggattgtgtcctttcatgggaatttctagaacaatagattcagctataggaatgggattagcaactacatgtgtgattgtttttgtttcaataatttcatggttaatcaatttttatattttaatcccttttcatttgattcatctttgcacgatgacgtatatgttgataatagcagtaagtgtacagatttttgaaattatagtgaaaaaagtaagttctactttatatcgattattaggtatatatttgccattaataacaactaattgttctgtattagcaatacccttaatgaacactaaattaaattctaattttatagaatcggttttatatgggtttagttcttctttgggtttttttttggtattagtaatattttctagtatacgagaacgtatttctgaatctgatgtacccatgtattttcgaggttatccaattgcattaattacagctagcttattagctattgcttttatgggatttgatggattaattaaattttaa

SEQ ID NO: 20483 - protein, 194 aa, Buchnera aphidicola subsp
MVMHFFLLFVSNILINNFILVRFLGLCPFMGISRTIDSAIGMGLATTCVIVFVSIISWLINFYILIPFHLIHLCTMTYMLIIAVSVQIFEIIVKKVSSTLYRLLGIYLPLITTNCSVLAIPLMNTKLNSNFIESVLYGFSSSLGFFLVLVIFSSIRERISESDVPMYFRGYPIALITASLLAIAFMGFDGLIKF

SEQ ID NO: 20484 - DNA, 582 bp, Haemophilus ducreyi
  CDS (1)..(582): transl_table=11
atggtcgattatattctgttagtgatcagtacagccttaattaataactttgtacttgtgaagtttttagggctttgtccatttatgggcgtatcaaaaaaagtggaaaccgcaattggtatgggaatggcgactacatttgtgttaacacttgcttcgttatctgcttatttagttgaaaggtttatcttgatcccattagatgcacaattcttgcggactttagtgtttattttggttattgcagttattgtgcaattgactgaaatgatcgtacataaaacgagcccaacgctatatcgtttactcgggatctatttaccgctgattactacaaattgtgccgtgcttggtgttgccttattgaatgtgaatttatcgaataatttaattgagtctgtcttatatggttttggtgcagcggttggtttttcattagtgttagtcttattcgcagcattacgtgagcgtttagctgccgcggatgtgcctcgtcctttccaaggagcgtcgattgccttgatcacggcaggtttgatgtctttggcgtttatgggctttacgggcttggtgaaactctaa

SEQ ID NO: 20485 - protein, 193 aa, Haemophilus ducreyi
MVDYILLVISTALINNFVLVKFLGLCPFMGVSKKVETAIGMGMATTFVLTLASLSAYLVERFILIPLDAQFLRTLVFILVIAVIVQLTEMIVHKTSPTLYRLLGIYLPLITTNCAVLGVALLNVNLSNNLIESVLYGFGAAVGFSLVLVLFAALRERLAAADVPRPFQGASIALITAGLMSLAFMGFTGLVKL

SEQ ID NO: 20486 - DNA, 579 bp, Haemophilus influenzae
  CDS (1)..(579): transl_table=11
atgacgcactatattttattgattatcggcaccgcattaattaacaattttgtattggtaaaattcttaggtctttgcccttttatgggtgtatccaaaaaaattgaaacggctgtgggaatgggattagcaacaatgtttgttttaactgttgcttccctttgtgcatatttggtcgatcactatattctaattcccttaaatgccacttttttacgtacattagtgtttattttagttattgctgtagtggtgcaatttaccgaaatggcaataaacaaaacaagtccaacattatatcgtttactcggcattttcttgcctttgataactacaaactgcgcagtacttggtgtcgcattattaaatgtaaatctcgctcataatttaacagagtctgtcgtttatggttttggtgcatctctcggcttttccttagtattggtactttttgccgcgcttcgtgaacgtttagtcgccgctgatatacctgccacttttcgcggttcatccattgctttaattaccgcaggcttaatgtccctcgcttttatgggatttacaggacttgtaaaataa

SEQ ID NO: 20487 - protein, 192 aa, Haemophilus influenzae
MTHYILLIIGTALINNFVLVKFLGLCPFMGVSKKIETAVGMGLATMFVLTVASLCAYLVDHYILIPLNATFLRTLVFILVIAVVVQFTEMAINKTSPTLYRLLGIFLPLITTNCAVLGVALLNVNLAHNLTESVVYGFGASLGFSLVLVLFAALRERLVAADIPATFRGSSIALITAGLMSLAFMGFTGLVK

SEQ ID NO: 20488 - DNA, 579 bp, Pasteurella multocida
  CDS (1)..(579): transl_table=11
atgacagaatacattctccttattattagtacagccttaattaataactttgtcctggtgaaatttctagggctttgtccttttatgggcgtttctaaaaaaattgaaaccgcaattggcatgagtttagcgaccatgtttgtccttactgttgcctcaatctctgcttatttaattgatacctatattcttactcccttaagcgcgacttttttacgtactctcgtctttattttagtaattgctgtggtggtacaatttactgaaatggtaatcaataaaaccagtcctacactgtatcgtttattagggatttttctcccactcattacgacaaattgtgctgtacttggcgtcgcactgttaaatattaatcaagcacacaccctgacccaatcagtgatttatggttttggtgcgtcattaggttttggcttagtgcttgttctctttgctgccttacgtgaacgcttagccgcggcagacgtgcctcatgtttttaaaggtgcctcgattgccttaatcacagcagggttaatgtcacttgcctttatgggctttacaggattggtgagatga

SEQ ID NO: 20489 - protein, 192 aa, Pasteurella multocida
MTEYILLIISTALINNFVLVKFLGLCPFMGVSKKIETAIGMSLATMFVLTVASISAYLIDTYILTPLSATFLRTLVFILVIAVVVQFTEMVINKTSPTLYRLLGIFLPLITTNCAVLGVALLNINQAHTLTQSVIYGFGASLGFGLVLVLFAALRERLAAADVPHVFKGASIALITAGLMSLAFMGFTGLVR

SEQ ID NO: 20490 - DNA, 585 bp, Pseudomonas aeruginosa
  CDS (1)..(585): transl_table=11
atgactgaactcgccctgatcctggtcagcgccatcctggtcaacaactttgtcctggtgcagttcctcggcctgtgcccgttcatgggcgtgtcgcggaagatcgagacggccatcggcctgtccctcgccaccaccttcgtcctgaccctggcggcgatgtgcagccatatcctgcaacgctacgtgctgcgcccgctggacctggagtacctgcgcaccatcggctttatcctggtgatcgcggtggtggtgcagttcaccgagatgctggtgaagaagaccagcccgctgctgtaccgggtgctcggcatcttcctgccgctgatcaccaccaattgcatcgtcctcggcgtcgccctgctcaacgccaacaaggctgaatacggcttcctccaggccactacccagggcttcggcgccgggctgggcttttccctggtactggtgctgttcgccgccctgcgcgagcgcatcgccatcgccgacgtgccggcgccgttccgcggcgcggccatcggcatgatcaccgccggcctgatgtcgctggcgttcatgggcttcagcgggttggtccggccatga

SEQ ID NO: 20491 - protein, 194 aa, Pseudomonas aeruginosa
MTELALILVSAILVNNFVLVQFLGLCPFMGVSRKIETAIGLSLATTFVLTLAAMCSHILQRYVLRPLDLEYLRTIGFILVIAVVVQFTEMLVKKTSPLLYRVLGIFLPLITTNCIVLGVALLNANKAEYGFLQATTQGFGAGLGFSLVLVLFAALRERIAIADVPAPFRGAAIGMITAGLMSLAFMGFSGLVRP

SEQ ID NO: 20492 - DNA, 582 bp, Rhodobacter capsulatus
  CDS (1)..(582): transl_table=11
atgcaagacttccttctcgtcctcttgagcaccgcgctcgtgaacaacgtcgtgctggtgaaattcctcgggctctgcccgttcatgggcgtctcgcgcaagaccgatgccgcgatcggcatggggctggccacgaccttcgtgatcaccgtcgcctcggccgcctgctggctggtcgaggcgctgatcctggaaccgctcgacctgaaattcctgcgcatcctgagcatgatcctggtcatcgccgcgatcgtgcagttcatcgagacggtgatgcgcaaggtcacccccgacctgcacaaggcgctcggcatctatctgccgctgatcaccacgaactgcgccgtcctcggcctgccgctgatgtacattcagggccatctgagccttgcgatgagcacgctgagcggctttggcgcctcggtcggtttcacgctcgttctggtgatctttgcgggcatgcgcgaacggctggcgcagctttcggtgcccgcggcctttgccggaacccccatcgccttcgtgtccgcagggcttctgggcctcgccttcatgggctttgccgggctcgtgcacgtctga

SEQ ID NO: 20493 - protein, 193 aa, Rhodobacter capsulatus
MQDFLLVLLSTALVNNVVLVKFLGLCPFMGVSRKTDAAIGMGLATTFVITVASAACWLVEALILEPLDLKFLRILSMILVIAAIVQFIETVMRKVTPDLHKALGIYLPLITTNCAVLGLPLMYIQGHLSLAMSTLSGFGASVGFTLVLVIFAGMRERLAQLSVPAAFAGTPIAFVSAGLLGLAFMGFAGLVHV

SEQ ID NO: 20494 - DNA, 717 bp, Azotobacter vinelandii
  CDS (1)..(717): transl_table=11
atgagtcattgcggagcacccagcgttcccgagcccgaaaagaaggtgccgtggcagtacttcacctcggccctgtggcaatacaacgtcgccctggtgcagatgctcgcgctctgcccgaccctggcggtgaccaccaccgccaccaacggcctgggcatgggcctggccaccaccctggtgctggtcatgaccaacgcgctcatctcgtcgatgcgccataccatttctcccgaggtgcgcaacccggtgatgatcggcgtgatcgccggcgtggtgaccctgaccgacatggcgatgaacgcctggatgcacgagctgtacaaggtgctcggcctgttcatcgcgctgatcgtgaccaactgcgcggtgctcggccgtgccgagtccttctgcctgaggaacccggtgatcccctcgatcctagacggcgccggcatgggcgccggcttcaccgccgtactggtggtgatcggcggcatccgcgagatcctcggcagcggcaccctgttctcccaggcgtcctcgctgctcggctcgcacttcaagtggatggagatcaccgtgatccccgacttccagggcatcctgctggccatcctgccgccgggcgccttcatcgtcctgggcttcctgctggccgccaagcgggcgatcgatcgcaagcgtgccgagcgtcgccagcagacccatggcgagctggtggttctgcagtga

SEQ ID NO: 20495 - protein, 238 aa, Azotobacter vinelandii
MSHCGAPSVPEPEKKVPWQYFTSALWQYNVALVQMLALCPTLAVTTTATNGLGMGLATTLVLVMTNALISSMRHTISPEVRNPVMIGVIAGVVTLTDMAMNAWMHELYKVLGLFIALIVTNCAVLGRAESFCLRNPVIPSILDGAGMGAGFTAVLVVIGGIREILGSGTLFSQASSLLGSHFKWMEITVIPDFQGILLAILPPGAFIVLGFLLAAKRAIDRKRAERRQQTHGELVVLQ

SEQ ID NO: 20496 - DNA, 672 bp, Buchnera aphidicola subsp
  CDS (1)..(672): transl_table=11
atggaattcaaaaaattttttaaaaagagattgtggaataataattcttctttagtacagcttttaggtttatgtccaattttagccatgactacaaatactattaatgctataggattaggaataacaactacctttgtattaactataacaaatagtattatttcaattttaaaaaactttatacctaaagatattagaattcctatttatatgataatagtttcttcgacagttacttgtatagaaatgctattgcatgcttatcaatttaatttatatcagtcattaggcgtcttcattccgttaatagtaactaattgtattgttgttggaagagctgattgtattgcttataaaagttcttttgtaatttcttttttagacggtatgtcaataggcttagggtcaacctttgcaatgtttgtaattggttccatacgtgaaatactgggaaatggaacttttttatttggtgcaaataaaatttttaatgttttagatcattcatttttttttacgttcatagataaaaactctacaataattttagctatgttaccttcaggtggatttttagtattaggttttgtaattgctttcaaaaattatttagatttaggtaaaaaaaattgtttaaaatgttttcattcgtgtaaactaaaaaaataa

SEQ ID NO: 20497 - protein, 223 aa, Buchnera aphidicola subsp
MEFKKFFKKRLWNNNSSLVQLLGLCPILAMTTNTINAIGLGITTTFVLTITNSIISILKNFIPKDIRIPIYMIIVSSTVTCIEMLLHAYQFNLYQSLGVFIPLIVTNCIVVGRADCIAYKSSFVISFLDGMSIGLGSTFAMFVIGSIREILGNGTFLFGANKIFNVLDHSFFFTFIDKNSTIILAMLPSGGFLVLGFVIAFKNYLDLGKKNCLKCFHSCKLKK

SEQ ID NO: 20498 - DNA, 726 bp, Buchnera aphidicola subsp
  CDS (1)..(726): transl_table=11
atgagtaatattttaaaaatttttgttgatggattatggaaaaaaaattcatcgttagtacaattgttaggattgtgtcctgtattagcaattacagtaaatgctattaatgctattggtttaggtttagcaactactttagtattaatttgctctaatgcaacaatttctttaattaagaacaatattcaaaaagattttcgtattcctatttatataattattattagctctgtagttagttctattgatttagttattaaagcttatgcatttaatttatatcagtcattaggaatttttatcccgttaattattactaattgcattgtttgtaatcgtgctgatttaattgctgttcataattctgttttagtttctattttagatggattgagtataggtttaggttctacgttaacaatgtttttattgggatcaattcgtgaaattataggtcacggaacgctgttttttgggattgaacatgtattaggtgagtcttttaggtttctttatattgaagtactagataaaaattcagtatttttattgtttgcatttccatctggagcttttatgattttaggtattgtattagcaggaaaaaattttttagatgaagttttgggtattatagaacataaaaatgtttgtgtatgttcaaataaagttttagtttataaagatggaaataaaaaaattgaatcacaaaaatcgttataa

SEQ ID NO: 20499 - protein, 241 aa, Buchnera aphidicola subsp
MSNILKIFVDGLWKKNSSLVQLLGLCPVLAITVNAINAIGLGLATTLVLICSNATISLIKNNIQKDFRIPIYIIIISSVVSSIDLVIKAYAFNLYQSLGIFIPLIITNCIVCNRADLIAVHNSVLVSILDGLSIGLGSTLTMFLLGSIREIIGHGTLFFGIEHVLGESFRFLYIEVLDKNSVFLLFAFPSGAFMILGIVLAGKNFLDEVLGIIEHKNVCVCSNKVLVYKDGNKKIESQKSL

SEQ ID NO: 20500 - DNA, 696 bp, Escherichia coli O157
  CDS (1)..(696): transl_table=11
gtgagcgaaattaaagacgttattgttcaggggttgtggaaaaacaactctgcgctggtccagttgctcggcctttgtcctctgttggctgtcacgtctactgccactaacgctctgggtttaggacttgcgactacgctggtactgacgctgaccaacctgaccatttcgacgctgcgtcactggacgccagccgagatccgcattcccatttacgtgatgatcatcgcctcggtggtcagcgctgtacagatgctgatcaacgcctacgcctttggcctgtatcaatcattagggatttttattccgctgattgtcactaactgtatcgttgtgggccgcgctgaagccttcgctgccaaaaaaggtccggcgctttcggcactggacggcttttcaattggtatgggcgcaacctgcgccatgttcgtgctgggttcactacgcgaaattatcggcaatggcacattgtttgacggtgcagatgcgctgttaggtagctgggcaaaagtattacgcgtggagattttccacaccgactcccctttcctgctggcgatgctgccaccaggtgcatttattggcctgggactgatgctggcaggaaaatacctgattgatgaaagaatgaaaaagcgccgtactgaagcagctgccgaacgtgcattgccaaacggtgaaacagggaatgtctga

SEQ ID NO: 20501 - protein, 231 aa, Escherichia coli O157
MSEIKDVIVQGLWKNNSALVQLLGLCPLLAVTSTATNALGLGLATTLVLTLTNLTISTLRHWTPAEIRIPIYVMIIASVVSAVQMLINAYAFGLYQSLGIFIPLIVTNCIVVGRAEAFAAKKGPALSALDGFSIGMGATCAMFVLGSLREIIGNGTLFDGADALLGSWAKVLRVEIFHTDSPFLLAMLPPGAFIGLGLMLAGKYLIDERMKKRRTEAAAERALPNGETGNV

SEQ ID NO: 20502 - DNA, 696 bp, Escherichia coli O6
  CDS (1)..(696): transl_table=11
gtgagcgaaattaaagacgttattgttcaggggttgtggaaaaacaactctgcgctggtccagttgctcggcctttgtccgctgttggcggtcacgtccactgccactaacgctctgggtttaggacttgcgactacgctggtactgacgctaaccaacctgaccatttcgacgctgcgtcactggacgcccgccgagatccgcattcccatttacgtgatgatcatcgcctcggtggtcagcgctgtacagatgctgatcaacgcctacgcctttggcctgtatcaatcattagggatttttattccgctgattgtcactaactgtatcgttgtgggccgcgctgaagccttcgccgccaaaaaaggtccggcgctttcggcactggacggcttttcaattggtatgggcgcaacctgcgccatgttcgtgctgggttcactacgcgaaattatcggcaatggcacgttgtttgacggtgcagatgcgctgttaggtagctgggcgaaagtattacgcgtggagattttccacaccgactcccctttcctgctggcgatgctgccaccaggtgcatttattggcctgggactgatgctggcaggaaaatacctgattgatgaaaaaatgaaaaagcgccgtactgaagcagttgccgaacgtgcattgccaaacggtgaaacagggaatgtctga

SEQ ID NO: 20503 - protein, 231 aa, Escherichia coli O6
MSEIKDVIVQGLWKNNSALVQLLGLCPLLAVTSTATNALGLGLATTLVLTLTNLTISTLRHWTPAEIRIPIYVMIIASVVSAVQMLINAYAFGLYQSLGIFIPLIVTNCIVVGRAEAFAAKKGPALSALDGFSIGMGATCAMFVLGSLREIIGNGTLFDGADALLGSWAKVLRVEIFHTDSPFLLAMLPPGAFIGLGLMLAGKYLIDEKMKKRRTEAVAERALPNGETGNV

SEQ ID NO: 20504 - DNA, 696 bp, Escherichia coli
  CDS (1)..(696): transl_table=11
gtgagcgaaattaaagacgttattgttcaggggttgtggaaaaacaactctgcgctggtccagttgctcggcctttgtcctctgttggcggtcacgtccactgccactaacgctctgggtttaggacttgcgactacgctggtactgacgctgaccaacctgaccatttcgacgctgcgtcactggacgccagccgagatccgcattcccatttacgtgatgatcatcgcctcggtggtcagcgctgtacagatgctgatcaacgcctacgcctttggcctgtatcaatcattagggatttttattccgctgattgtcactaactgtatcgttgtgggccgcgctgaagccttcgccgccaaaaaaggtccggcgctttcggcactggacggcttttcaattggtatgggcgcaacctgcgccatgttcgtgctgggttcactacgcgaaattatcggcaatggcacattgtttgacggtgcagatgcgctgttaggtagctgggcaaaagtattacgcgtggagattttccacaccgactcccctttcctgctggcgatgctgccaccaggtgcatttattggcctgggactgatgctggcaggaaaatacctgattgatgaaagaatgaaaaagcgccgtgctgaagcagctgcagaacgtgcattgccaaacggtgaaacagggaatgtctga

SEQ ID NO: 20505 - protein, 231 aa, Escherichia coli
MSEIKDVIVQGLWKNNSALVQLLGLCPLLAVTSTATNALGLGLATTLVLTLTNLTISTLRHWTPAEIRIPIYVMIIASVVSAVQMLINAYAFGLYQSLGIFIPLIVTNCIVVGRAEAFAAKKGPALSALDGFSIGMGATCAMFVLGSLREIIGNGTLFDGADALLGSWAKVLRVEIFHTDSPFLLAMLPPGAFIGLGLMLAGKYLIDERMKKRRAEAAAERALPNGETGNV

SEQ ID NO: 20506 - DNA, 684 bp, Haemophilus ducreyi
  CDS (1)..(684): transl_table=11
atggcggataatcaaattccaattactcaaattgaagatggcacagtaaaacagccgtctgtttggcgaaatttattgattgatggattatggaaaaataatggtgccttagtgcaattgttaggcctttgccctttattggctgtatcgaatagtgtgactaatgcactggggcttgggctagcaaccttatttgtattgttgtgtactaatgtaactatttctttatttcgtcaaatgatcccgcatgatattcgtattcctatttatgtgatggtgattgcaacagtggtaacggcggtgcaattgttgatgaatgcttttgcgtatcctgtttatcaatcattaggcatctttattccattaattgtgactaattgtattgtgattggtcgagcagaggcttatgcatctaagcatcaagttcatcattctgcttttgatgggctagcaacaggtttgggaatgacactgagtttagtgttgcttggggcaatccgtgaattaattggtaatggcacattatttgatggattagatttgctgtttggtgattgggcaaaagtgttacggcttgatctcttacagttagattcaggcttattgttagctattttgccaccgggtgcttttattggccttggtttaattttagcggtcaaaaatctttttgatcataaataa

SEQ ID NO: 20507 - protein, 227 aa, Haemophilus ducreyi
MADNQIPITQIEDGTVKQPSVWRNLLIDGLWKNNGALVQLLGLCPLLAVSNSVTNALGLGLATLFVLLCTNVTISLFRQMIPHDIRIPIYVMVIATVVTAVQLLMNAFAYPVYQSLGIFIPLIVTNCIVIGRAEAYASKHQVHHSAFDGLATGLGMTLSLVLLGAIRELIGNGTLFDGLDLLFGDWAKVLRLDLLQLDSGLLLAILPPGAFIGLGLILAVKNLFDHK

SEQ ID NO: 20508 - DNA, 708 bp, Haemophilus influenzae
  CDS (1)..(708): transl_table=11
atgacagatttaactgaaaaaaataccgcacttgaagaagaaaaaatagaaagtgcggttgaaaatcaacaaaaatccatctggaaagaaatttttgctcaaggaatttggaaaaataatcctgcggttgtccaacttctcgggctctgtccgctgttagcggtgtctagcaccgccaccaatgcacttggtttaggtttagcgacaatgcttgtactcacttgcacaaatacggtcatttcccttttccgtcaatatattcctaaggaaatccgtattccaatctacgtaatgatcattgcaaccacagtaacagcggttcaacttttaatgaatgcttacacttatacgctttatcaatcactggggatttttattccattaattgtgaccaactgtattattatcggtcgcgcagaagcattcgcctcaaaaaacagcttactccattccatctgggatgggttttcaatgggattaggaatggcacttagtctaaccatactcggcgcattacgtgaaattattggacaaggcacgatttttgagggcatagaaaatctattcggcgaacaagcaaaatttttaacgcaccatatttaccatacagacagtagctttttacttttcattctgccaccaggcgcatttataggcttaggcttgctcctcgccataaaaaatcgaattgataatataaaaaaataa

SEQ ID NO: 20509 - protein, 235 aa, Haemophilus influenzae
MTDLTEKNTALEEEKIESAVENQQKSIWKEIFAQGIWKNNPAVVQLLGLCPLLAVSSTATNALGLGLATMLVLTCTNTVISLFRQYIPKEIRIPIYVMIIATTVTAVQLLMNAYTYTLYQSLGIFIPLIVTNCIIIGRAEAFASKNSLLHSIWDGFSMGLGMALSLTILGALREIIGQGTIFEGIENLFGEQAKFLTHHIYHTDSSFLLFILPPGAFIGLGLLLAIKNRIDNIKK

SEQ ID NO: 20510 - DNA, 723 bp, Pseudomonas aeruginosa
  CDS (1)..(723): transl_table=11
atgagtgaacaagatttccgcgagatcgcccgcaacggcctgtggcgcaacaacccgggcctggtccagttgctcggcctgtgcccgctgctgggcaccagcaactcgacggtcaacgccctcggcctgggcctggccaccatgctcgtgctggcctgctccaatgccgcggtatcgttggtgcgcggcgcggtgagcgaggcgatccggctaccggcgttcgtcatgatcatcgccgtgctgaccacctgcatcgaactgctgatgcaggcctggacctacgagctgtaccaggtcctcggcatcttcatcccgctgatcaccaccaactgcgtgatcctcggtcgcgccgaggccttcgcggcgaagaacggcgtgctgcgcgccagcttcgacggactgctgatgggcctcggcttcgccctggtcctgctggtcctcggcggcctgcgcgagctgctcggccagggtaccctgctggccgacatgcacttgctgttcggcccggcggcggcggactggaagatccagccgttcccgcagtaccagggcttcctgctggcgatcctgccgccgggcgcgttcatcatgctcggcctgctgatcgccctgaagaaccgtatcgatgaaagcctggcggaacgcgccaaggtgcaggcgggcgacgtacccgccacccagcgccagcgccagcgcgtccgcgtcaccggagtgattgaatga

SEQ ID NO: 20511 - protein, 240 aa, Pseudomonas aeruginosa
MSEQDFREIARNGLWRNNPGLVQLLGLCPLLGTSNSTVNALGLGLATMLVLACSNAAVSLVRGAVSEAIRLPAFVMIIAVLTTCIELLMQAWTYELYQVLGIFIPLITTNCVILGRAEAFAAKNGVLRASFDGLLMGLGFALVLLVLGGLRELLGQGTLLADMHLLFGPAAADWKIQPFPQYQGFLLAILPPGAFIMLGLLIALKNRIDESLAERAKVQAGDVPATQRQRQRVRVTGVIE

SEQ ID NO: 20512 - DNA, 726 bp, Pseudomonas stutzeri
  CDS (1)..(726): transl_table=11
atgagcagccaatgcggatcagcggatgtcacggcgcccaagcccaaggggctgttcaactacttcagctcggcgctgtgggactacaacgtcgccctggtgcaaatgctcgcgttgtgcccggcgctggcggtgaccaccaccgctaccaacggcctgggcatgggcctggccaccaccctggtgctgatgatcaccaatgcgatcatttccgcgctgcgccacagcatttcgccggcggtgcgcaacccgctgatgatcggcatcatcgccggcgtggtgaccctcatcgacatggcgatcaatgcctggatgcacgaactgtacaaggtgctggggctgttcatcgccttgatcgtgaccaactgcgcggtactcggccgtgccgaatcgttctgcagccgcaacccggtgctgccctcgatcctcgacgggcgccgggcatgggcatcgggcttcacctgggtactggtggtgatcggcgggatacgcgagatcctcgggcagcgggcacgttgttcgcccaggcctcgcttgctgctcggtgagcacttccgctggctggagatcaccgtcctgcccggcttccagggcatcctgctggcgatcctgccgcccggggcgttcattgttctgggcttcgtgctggcgttcaagcgagtagttgatcgccggcgcgccgagcgacggatcaggacccatggcgaactggtagtgttgcagtga

SEQ ID NO: 20513 - protein, 241 aa, Pseudomonas stutzeri
MSSQCGSADVTAPKPKGLFNYFSSALWDYNVALVQMLALCPALAVTTTATNGLGMGLATTLVLMITNAIISALRHSISPAVRNPLMIGIIAGVVTLIDMAINAWMHELYKVLGLFIALIVTNCAVLGRAESFCSRNPVLPSILDGRRAWASGFTWVLVVIGGIREILGQRARCSPRPRLLLGEHFRWLEITVLPGFQGILLAILPPGAFIVLGFVLAFKRVVDRRRAERRIRTHGELVVLQ

SEQ ID NO: 20514 - DNA, 732 bp, Rhodobacter capsulatus
  CDS (1)..(732): transl_table=11
atgtcggagagttacgccaagatcgcccgcgacggcttgtgggacaagaacatcgtgacgggccagatgctggcgctgtgcccgacgctggccatcaccggcaccgccacgaacgggctgggcatggggctggcgacgacggtggtgctgatcctgtcgaacgtggtgatttccgcgctgcgcaagaccatcgccccggagatccgcattccggccttcatcctgatcatcgccgccatcgtgaccgtggtcgatctggcgctgaacgcctggctgcacgatctgcacaaggtgctgggcctcttcatcgcgctgatcgtgaccaactgcgccatcctgggccgggccgaggcctttgcctcgcgctttggcgtgctcgcctcggcgcttgacgggctgatgatggggatcggcttcacgcttgcgctggtggtggtgggggcgatccgggaaatcctgggttcggggacgcttttcgcccaggcctcgctgcttctggggccgcatttcgccttcatggagctgcagatctttcccgactaccccggctttctgatcatgatcctgccgccgggcggctttctggtggtgggggggcttttcgcgctcaagcgcatcatcgatgcccgcaagccgacgatcgaacaggaaatcaagcagatgcgcaccgaacgcgtgttcaccgcggcgggcgtgctgaaaccgaaactggaaaccggagaagaggcatga

SEQ ID NO: 20515 - protein, 243 aa, Rhodobacter capsulatus
MSESYAKIARDGLWDKNIVTGQMLALCPTLAITGTATNGLGMGLATTVVLILSNVVISALRKTIAPEIRIPAFILIIAAIVTVVDLALNAWLHDLHKVLGLFIALIVTNCAILGRAEAFASRFGVLASALDGLMMGIGFTLALVVVGAIREILGSGTLFAQASLLLGPHFAFMELQIFPDYPGFLIMILPPGGFLVVGGLFALKRIIDARKPTIEQEIKQMRTERVFTAAGVLKPKLETGEEA

SEQ ID NO: 20516 - DNA, 693 bp, Salmonella choleraesuis
  CDS (1)..(693): transl_table=11
atgagcgaaataaaagacattgttgttcaggggttatggaaaaataactctgctctggtgcagctacttggcctgtgccctctactggcggtgacgtctacggcaaccaacgctctggggctgggtctggccacaacgctggtattaacgctgaccaaccttacggtgtccgcactacgtcgctggacgccggcagaaatccgtatcccgatttacgttatgatcattgcctcggtggtaagcgcagtacagatgctgatcaatgcgtatgcgttcggtttgtatcagtctttagggatttttattccgctgattgtaacgaactgcattgttgttggtcgcgccgaagcgtttgccgcgaaaaaaggaccgtggctttccgcgttggacggtttttctatcggcatgggcgcgacaggcgcgatgttcgtgctgggctcactgcgcgagatcctcgggaatggtacgcttttcgatggcgcggatagcctgctgggaggctgggcaaaagtattacgggtcgagatatttcacaccgactcgcctttcctgctggcgatgctgccgccaggcgcgtttatcggtctgggactcatgctggcggtaaaatatcttattgatgaaaaaatgaagaaacgccgcgccgaaaccgcgccttccgcagttccggcaggtgaaacagggaaagtctga

SEQ ID NO: 20517 - protein, 230 aa, Salmonella choleraesuis
MSEIKDIVVQGLWKNNSALVQLLGLCPLLAVTSTATNALGLGLATTLVLTLTNLTVSALRRWTPAEIRIPIYVMIIASVVSAVQMLINAYAFGLYQSLGIFIPLIVTNCIVVGRAEAFAAKKGPWLSALDGFSIGMGATGAMFVLGSLREILGNGTLFDGADSLLGGWAKVLRVEIFHTDSPFLLAMLPPGAFIGLGLMLAVKYLIDEKMKKRRAETAPSAVPAGETGKV

SEQ ID NO: 20518 - DNA, 693 bp, Salmonella paratyphi
  CDS (1)..(693): transl_table=11
atgagcgaaataaaagacattgttgttcaggggttatggaaaaataactctgctctggtgcagctacttggcctgtgccctttactggcagtgacgtctacggcaaccaacgctctggggctgggtctcgccacaacgctggtattaacgctgaccaaccttacggtgtccacactacgtcgctggacgccggcagaaatccgtatcccgatttacgttatgatcattgcttcggtggtcagcgcagtacagatgctgatcaatgcatatgcgttcggtctgtatcagtctttagggatttttattccgctgattgtaacgaactgcatagttgttggtcgcgccgaagcgtttgccgcgaaaaaaggaccgtggctttccgcgttggacggtttttccatcggcatgggcgcgacaggcgcgatgttcgtgctgggctcactgcgcgagatcctcgggaatggtacgcttttcgatggcgcggatagcctgctgggaggctgggcaaaagtattacgggtcgagatatttcacaccgactcgcctttcctgctggcgatgctgccgccaggcgcgtttatcggtctgggactcatgctggcggtaaaatatcttattgatgaaaaaatgaagaaacgccgcgccgaaaccgcgccttccgctgttccggccggtgaaacagggaaagtctga

SEQ ID NO: 20519 - protein, 230 aa, Salmonella paratyphi
MSEIKDIVVQGLWKNNSALVQLLGLCPLLAVTSTATNALGLGLATTLVLTLTNLTVSTLRRWTPAEIRIPIYVMIIASVVSAVQMLINAYAFGLYQSLGIFIPLIVTNCIVVGRAEAFAAKKGPWLSALDGFSIGMGATGAMFVLGSLREILGNGTLFDGADSLLGGWAKVLRVEIFHTDSPFLLAMLPPGAFIGLGLMLAVKYLIDEKMKKRRAETAPSAVPAGETGKV

SEQ ID NO: 20520 - DNA, 693 bp, Vibrio cholerae
  CDS (1)..(693): transl_table=11
atgaatgaaaaccgaactctgatgttaaatggcatgtggaacaacaacccagccttagtgcaattactgggattgtgtccgctgctcgccgtttcctccaccgtgaccaatgccctcggattaggcattgctacgcttcttgttctcgtcggctcgaatgtcaccgtctctctcgtgcgtgattatgtgccgaaagaagtccgaattccggtgttcgtgatgatcatcgcttcgctggtgacttgcgtacagttactgatgaacgcctacgcttacgggctttatctctcgctcggcatttttattccgctgattgtgacaaactgcatcatcataggccgtgctgaagcgtttgcttcaaaaaatgatgtgctcccagccgcgttagacggattttggatgggattggggatgacctcagtactggttgtgctcggatcactgcgcgaaatcatcggcaatggcacgctgttcgatggcgcggacctgctactcggagaatgggctaaagtcctacgcatcgaagtgtttcactttgacagcgcctttttgctggcactgctgccccccggtgccttcatcggcgttggctttttgatcgccgctaaaagcgtgattgataaacagactgccgctcgccaaccaaaacaacaaaagcaagccatagagcgtgcacgcgtgaccaatgtctaa

SEQ ID NO: 20521 - protein, 230 aa, Vibrio cholerae
MNENRTLMLNGMWNNNPALVQLLGLCPLLAVSSTVTNALGLGIATLLVLVGSNVTVSLVRDYVPKEVRIPVFVMIIASLVTCVQLLMNAYAYGLYLSLGIFIPLIVTNCIIIGRAEAFASKNDVLPAALDGFWMGLGMTSVLVVLGSLREIIGNGTLFDGADLLLGEWAKVLRIEVFHFDSAFLLALLPPGAFIGVGFLIAAKSVIDKQTAARQPKQQKQAIERARVTNV

SEQ ID NO: 20522 - DNA, 693 bp, Vibrio parahaemolyticus
  CDS (1)..(693): transl_table=11
atgagcgaaaacaaacaattgatgaagaacggcatgtggagcaacaacccagcattggttcagctgctcggtttatgtcctctactcgccgtttcatcgacgatcaccaacgcgctgggtcttggtattgccacattactggtactagtggggtctaacgtaacggtttcactgatccgtaactatgttcctaaagagatacgaattccggttttcgttatgatcattgcgtcactcgtaacctgcgtccagctattaatgaatgcttacgcttacggattgtacctatcactgggtatctttatcccgttgatcgtaaccaactgtatcatcatcggtcgcgccgaagcttacgcttcaaaaaatgatgtgcttcctgccgcattggacggcttatggatgggactgggcatgaccagtgtgctagttgtgttgggctcaatgcgcgagcttatcggcaacggcacattgtttgacggcgcagacttgctattgggtgactgggctgcagcgctgcgcattcaagtattccaatttgatagcagcttcttattagcactattaccaccaggtgctttcatcggtgtaggacttttgattgcgttgaaaaatgttatcgacagctcaattcaggctcgtcagccgaaagaagaaaaaccggccattgagcgtgctcgcgtaactaacgcataa

SEQ ID NO: 20523 - protein, 230 aa, Vibrio parahaemolyticus
MSENKQLMKNGMWSNNPALVQLLGLCPLLAVSSTITNALGLGIATLLVLVGSNVTVSLIRNYVPKEIRIPVFVMIIASLVTCVQLLMNAYAYGLYLSLGIFIPLIVTNCIIIGRAEAYASKNDVLPAALDGLWMGLGMTSVLVVLGSMRELIGNGTLFDGADLLLGDWAAALRIQVFQFDSSFLLALLPPGAFIGVGLLIALKNVIDSSIQARQPKEEKPAIERARVTNA

SEQ ID NO: 20524 - DNA, 693 bp, Vibrio vulnificus
  CDS (1)..(693): transl_table=11
atgagtgagcataaaaaattacttaaaaatggcatgtgggacaacaaccctgcactggtccagctacttggtctgtgtccgctactggcggtatcgtcaaccgtcaccaacgcacttggtctcggcatagcaacattattggttctcgttggctccaacgtcactgtttctctgattcgtaactacgtaccaaaagaaattcgtattccggtattcgttatgatcattgcctcactggtcacgtgcgttcaattactgatgaacgcctacgcctatggcttatacctatcattgggcattttcattcctttgattgtgaccaactgcatcatcatcggccgtgctgaagcgtacgcatcaaaaaatgatcctttgcctgcggcattagatggcttttggatgggcatgggtatgaccaccgtgcttgtcgttctgggcgcaatgcgcgaaatcatcggcaacggtacccttttcgatggcgcggatcttctgctgggtgaatgggcgagcgcactgcggattcaagtattccaatttgacagtagcttcctactggcgctgttaccgcccggggcatttattggtgtcggcctgctcatcgcgttgaaaaatgtcatcgatacacagttaaaagctcgccaacctaaacaagaaaaacccgcgattgaacgcgctcgcgtgactaacgcataa

SEQ ID NO: 20525 - protein, 230 aa, Vibrio vulnificus
MSEHKKLLKNGMWDNNPALVQLLGLCPLLAVSSTVTNALGLGIATLLVLVGSNVTVSLIRNYVPKEIRIPVFVMIIASLVTCVQLLMNAYAYGLYLSLGIFIPLIVTNCIIIGRAEAYASKNDPLPAALDGFWMGMGMTTVLVVLGAMREIIGNGTLFDGADLLLGEWASALRIQVFQFDSSFLLALLPPGAFIGVGLLIALKNVIDTQLKARQPKQEKPAIERARVTNA

SEQ ID NO: 20526 - DNA, 702 bp, Yersinia pestis
  CDS (1)..(702): transl_table=11
atgagtgaagcgaaaaacctgttagcacaagggttgtggaaaaataactctgcgctggtgcaactgttggggctctgtccattattggcagtctcttccacggcaaccaacgcattggggctggggttagcgaccacgctagtccttgtgtgtaccaataccgcagtttccgcattgcgccgttgggtaccgtctgaaatccgtattcctatttatgtcatgattattgcgtcggtcgtcagtaccgtgcaaatgctgatcaacgcttatgcctttggtttatatcaatcattggggatatttatcccattgattgtgaccaactgtatcgtgattggccgggcagaggcctatgcagcgaagaatccggtggggctatccgcattggatggttttgccatggggatgggagcaacctgtgccttatttgttttaggggcactgcgcgaaattttgggtaacggtaccttatttgacggcgcagacatgttgctaggcagttgggctacagtactgcgcattgacatcttgcatttagatacccctttcctgctggcgatgttgccaccaggtgcgtttatcggcctgggtttactgctggccggtaaatatgtcattgacgagaaaatgaaagcgcgcaaagccaatacacgggttagcgtaccgcaacttcaggatggagatgccgagaaagccttatga

SEQ ID NO: 20527 - protein, 233 aa, Yersinia pestis
MSEAKNLLAQGLWKNNSALVQLLGLCPLLAVSSTATNALGLGLATTLVLVCTNTAVSALRRWVPSEIRIPIYVMIIASVVSTVQMLINAYAFGLYQSLGIFIPLIVTNCIVIGRAEAYAAKNPVGLSALDGFAMGMGATCALFVLGALREILGNGTLFDGADMLLGSWATVLRIDILHLDTPFLLAMLPPGAFIGLGLLLAGKYVIDEKMKARKANTRVSVPQLQDGDAEKAL

SEQ ID NO: 20528 - DNA, 25 bp, Artificial sequence
  Primer sequence
atgactgactacctgttactgtttg

SEQ ID NO: 20529 - DNA, 25 bp, Artificial sequence
  Primer sequence
ttacaacttcaccaaaccactaaag

SEQ ID NO: 20530 - protein, 232 aa, Artificial sequence
  Consensus
  Variant (2)..(5): Xaa in position 2 to 5 is any amino acid
  Variant (7)..(9): Xaa in position 7 to 9 is any amino acid
  Variant (11)..(15): Xaa in position 11 to 15 is any amino acid
  Variant (16)..(16): Xaa in position 16 is any or no amino acid
  Variant (21)..(22): Xaa in position 21 to 22 is any amino acid
  Variant (27)..(29): Xaa in position 27 to 29 is any amino acid
  Variant (30)..(33): Xaa in position 30 to 33 is any or no amino acid
  Variant (35)..(36): Xaa in position 35 to 36 is any or no amino acid
  Variant (41)..(43): Xaa in position 41 to 43 is any amino acid
  Variant (45)..(53): Xaa in position 45 to 53 is any amino acid
  Variant (56)..(58): Xaa in position 56 to 58 is any amino acid
  Variant (60)..(62): Xaa in position 60 to 62 is any amino acid
  Variant (63)..(87): Xaa in position 63 to 87 is any or no amino acid
  Variant (89)..(93): Xaa in position 89 to 93 is any amino acid
  Variant (95)..(95): Xaa in position 95 is any amino acid
  Variant (99)..(100): Xaa in position 99 to 100 is any amino acid
  Variant (102)..(103): Xaa in position 102 to 103 is any amino acid
  Variant (106)..(107): Xaa in position 106 to 107 is any amino acid
  Variant (109)..(114): Xaa in position 109 to 114 is any amino acid
  Variant (116)..(116): Xaa in position 116 is any amino acid
  Variant (117)..(118): Xaa in position 117 to 118 is any or no amino acid
  Variant (120)..(120): Xaa in position 120 is any amino acid
  Variant (124)..(124): Xaa in position 124 is any amino acid
  Variant (127)..(128): Xaa in position 127 to 128 is any amino acid
  Variant (131)..(131): Xaa in position 131 is any amino acid
  Variant (135)..(147): Xaa in position 135 to 147 is any amino acid
  Variant (148)..(158): Xaa in position 148 to 158 is any or no amino acid
  Variant (160)..(160): Xaa in position 160 is any amino acid
  Variant (162)..(162): Xaa in position 162 is any amino acid
  Variant (164)..(166): Xaa in position 164 to 166 is any amino acid
  Variant (171)..(173): Xaa in position 171 to 173 is any amino acid
  Variant (176)..(177): Xaa in position 176 to 177 is any amino acid
  Variant (179)..(179): Xaa in position 179 is any amino acid
  Variant (183)..(183): Xaa in position 183 is any amino acid
  Variant (185)..(188): Xaa in position 185 to 188 is any amino acid
  Variant (189)..(203): Xaa in position 189 to 203 is any or no amino acid
  Variant (205)..(219): Xaa in position 205 to 219 is any amino acid
  Variant (220)..(220): Xaa in position 220 is any or no amino acid
  Variant (222)..(224): Xaa in position 222 to 224 is any amino acid
  Variant (227)..(231): Xaa in position 227 to 231 is any amino acid
LXXXXVXXXNXXXXXXLGLCXXLAVSXXXXXXXAXXMGLAXXXVXXXXXXXXXLIXXXIXXXXXXXXXXXXXXXXXXXXXXXXXXXXLXXXXXIXVIAXXVXXVEXXLXXXXXXLXXXLXIFLXLIXXNCXVLGXXXXXXXXXXXXXXXXXXXXXXXXSXVXGXXXGLGFXXXLVXXAXIREXLXXXXXXXXXXXXXXXXXXXVXXXXXXXXXXXXXXXXLXXXAFXXXXXL

SEQ ID NO: 20531 - protein, 30 aa, Artificial sequence
  Consensus
  Variant (2)..(4): Xaa in position 2 to 4 is any or no amino acid
  Variant (7)..(7): Xaa in position 7 is Ile, Leu, Met or Val
  Variant (9)..(9): Xaa in position 9 is Pro, Ser or Thr
  Variant (10)..(10): Xaa in position 10 is any amino acid
  Variant (11)..(11): Xaa in position 11 is Leu or Met
  Variant (12)..(12): Xaa in position 12 is Ala or Gly
  Variant (13)..(13): Xaa in position 13 is any amino acid
  Variant (14)..(14): Xaa in position 14 is Ser or Thr
  Variant (15)..(18): Xaa in position 15 to 18 is any amino acid
  Variant (19)..(19): Xaa in position 19 is Asn, Ser, Thr or Val
  Variant (20)..(20): Xaa in position 20 is Ala, Gly, Ser or Thr
  Variant (21)..(22): Xaa in position 21 to 22 is any amino acid
  Variant (23)..(23): Xaa in position 23 is Leu or Met
  Variant (24)..(24): Xaa in position 24 is Ala, Cys, Gly, Ser or Thr
  Variant (25)..(25): Xaa in position 25 is any amino acid
  Variant (26)..(26): Xaa in position 26 is Ala, Cys, Gly, Ser or Thr
  Variant (27)..(29): Xaa in position 27 to 29 is any amino acid
  Variant (30)..(30): Xaa in position 30 is Ala, Ile, Leu or Val
LXXXLGXCXXXXXXXXXXXXXXXXXXXXXX

SEQ ID NO: 20532 - protein, 38 aa, Artificial sequence
  Consensus
  Variant (3)..(4): Xaa in position 3 to 4 is any amino acid
  Variant (6)..(8): Xaa in position 6 to 8 is any amino acid
  Variant (9)..(9): Xaa in position 9 is Asp, Glu or Gln
  Variant (10)..(11): Xaa in position 10 to 11 is any amino acid
  Variant (12)..(12): Xaa in position 12 is Phe, Ile, Leu, Met or Val
  Variant (13)..(18): Xaa in position 13 to 18 is any amino acid
  Variant (19)..(19): Xaa in position 19 is Ile, Leu, Met or Val
  Variant (20)..(22): Xaa in position 20 to 22 is any amino acid
  Variant (24)..(24): Xaa in position 24 is Gly or Ser
  Variant (25)..(25): Xaa in position 25 is Ile, Leu or Val
  Variant (26)..(26): Xaa in position 26 is Phe or Tyr
  Variant (27)..(27): Xaa in position 27 is Ile, Leu or Val
  Variant (28)..(28): Xaa in position 28 is Ala, Gly, Pro or Ser
  Variant (30)..(30): Xaa in position 30 is Ile or Leu
  Variant (31)..(31): Xaa in position 31 is any amino acid
  Variant (32)..(32): Xaa in position 32 is Thr or Val
  Variant (35)..(35): Xaa in position 35 is any amino acid
  Variant (36)..(36): Xaa in position 36 is Ile or Val
  Variant (37)..(37): Xaa in position 37 is Phe, Ile, Leu, Met or Val
  Variant (38)..(38): Xaa in position 38 is Ala or Gly
IAXXVXXXXXXXXXXXXXXXXXLXXXXXLXXXNCXXXX

SEQ ID NO: 20533 - protein, 14 aa, Artificial sequence
  Consensus
  Variant (2)..(4): Xaa in position 2 to 4 is any amino acid
  Variant (5)..(5): Xaa in position 5 is Ala, Ile or Val
  Variant (6)..(6): Xaa in position 6 is Ile, Leu or Met
  Variant (7)..(8): Xaa in position 7 to 8 is any amino acid
  Variant (9)..(9): Xaa in position 9 is Phe, Ile, Leu, Met or Val
  Variant (10)..(10): Xaa in position 10 is Ala, Gly or Ser
  Variant (11)..(12): Xaa in position 11 to 12 is any amino acid
GXXXXXXXXXXXRE

SEQ ID NO: 20534 - DNA, 627 bp, Escherichia coli K12
  CDS (1)..(627): transl_table=11
gtgcctgtgctagaccgccatcttcatccccggattaaaccgttgttgcatcagtgcgtgcgggttcttgataaaccgggcattacgccagatggtttaacattagtgggatttgccatcggcgtgctggctctgccgtttctggcgctgggctggtatctggcggcgctagtcgtcattttgttgaacaggctgcttgatggtctggacggtgcgctggcgcggcgcagagagcttaccgacgcgggcggctttcttgatatttctctcgattttctcttttacgcgctggtgccgtttggctttattcttgctgcaccggagcaaaatgcgctggcaggcggctggttgttgtttgcgtttatcggcacgggcagcagttttctcgcctttgctgcactggcagcaaaacatcagattgataaccccggttatgcacataagtcgttttactatctggggggattaaccgaaggcacagaaacgatcttactgtttgtgctgggatgtttattccctgcatggtttgcgtggtttgcgtggatcttcggtgcgttgtgctggatgacgacctttacgcgggtgtggagtgggtatctgacgctgaagtcgctccagcgtcagtaa

SEQ ID NO: 20535 - protein, 208 aa, Escherichia coli K12
MPVLDRHLHPRIKPLLHQCVRVLDKPGITPDGLTLVGFAIGVLALPFLALGWYLAALVVILLNRLLDGLDGALARRRELTDAGGFLDISLDFLFYALVPFGFILAAPEQNALAGGWLLFAFIGTGSSFLAFAALAAKHQIDNPGYAHKSFYYLGGLTEGTETILLFVLGCLFPAWFAWFAWIFGALCWMTTFTRVWSGYLTLKSLQRQ

SEQ ID NO: 20536 - DNA, 519 bp, Archaeoglobus fulgidus DSM 4304
  CDS (1)..(519): transl_table=11
gtggcattaagactgtccaaactcggagtaaagcccaaccacctcacactcgccggtctggtttttgctctcatctcctcttacctgataattgagggcaggatattgcatgcaagcatcttcgtcctgctcagcagcctttgcgatttgcttgacggggcgctggcgagaaaggcagagttaaccacaaagtttgggggctaccttgattcagtgactgacagatacgttgacgtcatcctcttcatctccctcggaatctacggcgttgactgggttgccatcgcaatggcgatgagcggagctttgcttgtgagctacacgagggcgagggccgaaacaattatcgagaagtgcgatgttggtatagcagagaggagcgagaggcttttgattctgcttctggggatgcttacaggatacatttacgaggctgttttgattatagctgttttaagccacatcactgccctgcacagggttgtttatacttactcaagaacaaaggagggggattag

SEQ ID NO: 20537 - protein, 172 aa, Archaeoglobus fulgidus DSM 4304
MALRLSKLGVKPNHLTLAGLVFALISSYLIIEGRILHASIFVLLSSLCDLLDGALARKAELTTKFGGYLDSVTDRYVDVILFISLGIYGVDWVAIAMAMSGALLVSYTRARAETIIEKCDVGIAERSERLLILLLGMLTGYIYEAVLIIAVLSHITALHRVVYTYSRTKEGD

SEQ ID NO: 20538 - DNA, 561 bp, Pyrococcus abyssi GE5
  CDS (1)..(561): transl_table=11
atgctaagcaagctgaggccagcggtgaaggagcctctagaaagaacggccagttacctagctaaaataggcctaacgccgaatcaagtcacccttctcggctttctcttgacgcttatagcatcttacgagttttatcttggtaatcaaatcgttgcaggtacaataatggccatcggctccctattggatgccttagatggagcgttagctagggccaccggaaaggtgtcaaggttcggtggattcctagattctacattggataggctgagcgatggagcgcttttagttggaatagccctaggtaacttaatcgactggagggtagcatttttagcattgattggctcgtacatggtgagctatgctaggtgtagagcggagctcgcgggttcgggaacgctagctgttggaattgccgaaaggggagagaggctcataataataatgatcttctcgctcattaatagggtttggatcggggtttatttagttgcggtgctctcctgggttaccttcattcaaagggtttatgaggcgaggaaaagactccaatga

SEQ ID NO: 20539 - protein, 186 aa, Pyrococcus abyssi GE5
MLSKLRPAVKEPLERTASYLAKIGLTPNQVTLLGFLLTLIASYEFYLGNQIVAGTIMAIGSLLDALDGALARATGKVSRFGGFLDSTLDRLSDGALLVGIALGNLIDWRVAFLALIGSYMVSYARCRAELAGSGTLAVGIAERGERLIIIMIFSLINRVWIGVYLVAVLSWVTFIQRVYEARKRLQ

SEQ ID NO: 20540 - DNA, 621 bp, Vibrio cholerae O1 biovar eltor str. N16961
  CDS (1)..(621): transl_table=11
atgcttgatcgctacgcgataaaaatcattcgctggccacttcatcaagccgcaggattgctggatgaagcgggcgtcaccgccaatcaaaccacggtattcggctttgtgattggggcattagcattacctgcgcttgcaatgcagcaatactggctcgccttgttattgattgtggttaatcggatctgtgatggactggatggtgccctcgcgcgccgccaagggctgacagatgcgggaggatttctcgatattagcctcgactttctgttctactctttagtgccgtttggctttgtccttgcaaacccagaacataacgcggtcgcgggcgctttcttgatttttgcttttatcgggacgggtagtagctttcttgcttttgcagtcatggccagtaaacgtaacatcaccaatccggtgtatcagcacaaatccttgtattacatgagcggtctgacagagggcacggaaaccatcgcctgcttcatgttgatgtgtttattgcctcactctttttcaaccctagcttggctgtttggtgctgcctgttggtttactacggcaacccgcatctattacggttttcaaaccttgcaacacgtcgaacaaaggtaa

SEQ ID NO: 20541 - protein, 206 aa, Vibrio cholerae O1 biovar eltor str. N16961
MLDRYAIKIIRWPLHQAAGLLDEAGVTANQTTVFGFVIGALALPALAMQQYWLALLLIVVNRICDGLDGALARRQGLTDAGGFLDISLDFLFYSLVPFGFVLANPEHNAVAGAFLIFAFIGTGSSFLAFAVMASKRNITNPVYQHKSLYYMSGLTEGTETIACFMLMCLLPHSFSTLAWLFGAACWFTTATRIYYGFQTLQHVEQR

SEQ ID NO: 20542 - DNA, 588 bp, Methanothermobacter thermautotrophicus str. Delta H
  CDS (1)..(588): transl_table=11
gtgccagatataaatgagtccatgttaaaccagttcagaccggtgatccggagattcattgaccccattgcagatagaattgccctgccagcagattacataacactgacgggtttccttgttgcatgtgctgccagcgcaggatatgcatctggaagcctgatcactggagcggccctgcttgcagcaagtggattcatagatgtgcttgacggggccgtggcacggagaagattcaggcccacagccttcggtggtttccttgactctacccttgacagactctccgatggtataatcatcatcgggataaccgcggggggattcacaggactgctaaccgggctcctcgcactccattccggactcatggtgagctatgtgagggcccgtgcagaatctctgggcattgaatgcgctgttggaatcgctgaaagggctgagagaatcattataatccttgcagggtcccttgcagggtaccttatccatccgtggttcatggacgctgcgattattgtgctcgcagctctcggttactttaccatgatccagaggatgatctacgtgtggcaaaggctgaaataa

SEQ ID NO: 20543 - protein, 195 aa, Methanothermobacter thermautotrophicus str. Delta H
MPDINESMLNQFRPVIRRFIDPIADRIALPADYITLTGFLVACAASAGYASGSLITGAALLAASGFIDVLDGAVARRRFRPTAFGGFLDSTLDRLSDGIIIIGITAGGFTGLLTGLLALHSGLMVSYVRARAESLGIECAVGIAERAERIIIILAGSLAGYLIHPWFMDAAIIVLAALGYFTMIQRMIYVWQRLK

SEQ ID NO: 20544 - DNA, 678 bp, Halobacterium sp. NRC-1
  CDS (1)..(678): transl_table=11
atgcaaccgcgcttcgtcggtcggttaggggtggccgacgccgtgaccacggcgaacgcggcgctggggtttctcgcggtcgtcacggcacccagcaacccccggctcgccgcccggatcgtgctggtggcggcgatcgccgacggcctcgatggggtggtggcgcgccgcctcggctcgacgccggcgggcaaacacctcgattcgcttgccgacgtggcgtcgttcggcgttgcgccggcgtgcatcgtggtcgccgccacggggaacacctggcaggcgggggcaccggtggggatcggggcgctcgtcgtcggggcggggttcgtcgccagcgcggtcgtccggctgggcctgtacacggcctacgacaccggccacgagcacacggagggcgtgcagacaacgcttgccgccacgctgttggcggcgggcgtgctcgcgggcgtcgagcagccgacggtcatcgttggggctgcgggggtgctggctgtgttgatggtgtcgacgatcgagtacccagatctgttggttcgggacgcgctcgcgatgggcgtcgtgcaggcgggcgcggtggttgcaccggcggcgctggcgggcgcgttcccgaaggcgttgttcgggtgggcgggcgcgtacctggtgttcgcaccgcggttctactggcgagcggcgtag

SEQ ID NO: 20545 - protein, 225 aa, Halobacterium sp. NRC-1
MQPRFVGRLGVADAVTTANAALGFLAVVTAPSNPRLAARIVLVAAIADGLDGVVARRLGSTPAGKHLDSLADVASFGVAPACIVVAATGNTWQAGAPVGIGALVVGAGFVASAVVRLGLYTAYDTGHEHTEGVQTTLAATLLAAGVLAGVEQPTVIVGAAGVLAVLMVSTIEYPDLLVRDALAMGVVQAGAVVAPAALAGAFPKALFGWAGAYLVFAPRFYWRAA

SEQ ID NO: 20546 - DNA, 612 bp, Sinorhizobium meliloti 1021
  CDS (1)..(612): transl_table=11
atgcttgacggcgcgcttcgcaggcggctcgatccggttctggacaggctcggcgccgcactggccggccgcggggtcagtgccgatgccgtcacgatcctcggcctttgccttggccttgcggcagccctgctcatcggtctcggcgcttatctgcctgccgccgccctgatccttgtgagccggctctgcgacggccttgacggagccgtcgcccgcgcgagccggaaaacggatttcggcggctttctcgacatcgttctcgatttcaccttttacggcgccgttccacttggtttcatcatcgcagatccggccgcaaacggtcttgccggcgggtttttgctcttcgccttctatgtcaacggcgcgagcttcctcgcctatgccgtgatggccgagaagcgcgccctgacgaccgcggtgcgcggtgcgaagtcgctctacttcacgacggggctcgcagaggcgacggagacgatcgtcttttttctgctctcgtgccttttccctgggtggttcccgttattcgcaacggtcttcgcgctcgtctgcctctataccgcgctgtcgcggatcgttctcgcaagactgacttttcggcaagactga

SEQ ID NO: 20547 - protein, 203 aa, Sinorhizobium meliloti 1021
MLDGALRRRLDPVLDRLGAALAGRGVSADAVTILGLCLGLAAALLIGLGAYLPAAALILVSRLCDGLDGAVARASRKTDFGGFLDIVLDFTFYGAVPLGFIIADPAANGLAGGFLLFAFYVNGASFLAYAVMAEKRALTTAVRGAKSLYFTTGLAEATETIVFFLLSCLFPGWFPLFATVFALVCLYTALSRIVLARLTFRQD

SEQ ID NO: 20548 - DNA, 588 bp, Clostridium perfringens str. 13
  CDS (1)..(588): transl_table=11
atgttagatacttatggaagaaagtatgtaaatccaataatagatttaggtgctaatacattattaaagttaagattaacaccaaatggagttagtataatagctctaattataggagttttaagttctgtatttctttatttcgataaattgattttatcagtagtttttctttggatatcaggatacttagattctgttgatggtgctatggcaagaaaaaagaatttaactagcccctttggaacacttttagatataacctttgatagaattgttgaacttagcataatatttgtcttagctttaaaatttcaaaatagtagattatatcttttaatattaacaatgatgattttaatatctatgaccatatttttaacagtaggagccttagctcaaaataatggtatgaagtcttttagataccaagcaggacttgcagaaagatcagaaggatttatttgtttttcacttatgattttactatcatctataaaattaaatttagttacaaatatattttccttaataatatttataaccataatacaaagagctttagaggctaaaaggcttttaaaataa

SEQ ID NO: 20549 - protein, 195 aa, Clostridium perfringens str. 13
MLDTYGRKYVNPIIDLGANTLLKLRLTPNGVSIIALIIGVLSSVFLYFDKLILSVVFLWISGYLDSVDGAMARKKNLTSPFGTLLDITFDRIVELSIIFVLALKFQNSRLYLLILTMMILISMTIFLTVGALAQNNGMKSFRYQAGLAERSEGFICFSLMILLSSIKLNLVTNIFSLIIFITIIQRALEAKRLLK

SEQ ID NO: 20550 - DNA, 564 bp, Pyrococcus furiosus DSM 3638
  CDS (1)..(564): transl_table=11
gtgctgagcaatttgagaccattggcgaaaaagccactggaaaagatagctgagccattctcaaagcttggcataactcctaatcaactcactatggttggatttttcctgtctttacttgcatcttatgaatattacctcaataatcaggtttttggctcattaatactattacttggggcgttcttagatgctttagatgggagcctagcaaggttaaccggaagagttacaaaatttggtggttttctcgattctacgatggataggcttagcgatgcagcaataatctttggaattgcattgggagagttagttaattggaaagtagcgtttttagcgttaataggctcttacatggtaagctatacaagatgtagggctgaattagctggttctggaactttagcagttggaattgctgagaggggagagagattattgattcttgttattgcaggattattcggaattattgatattggtgtgtatctggttgcaatactctcttggataaccttcttgcaaagagtttatgaagcaaagaaaaggcttgaaaaatag

SEQ ID NO: 20551 - protein, 187 aa, Pyrococcus furiosus DSM 3638
MLSNLRPLAKKPLEKIAEPFSKLGITPNQLTMVGFFLSLLASYEYYLNNQVFGSLILLLGAFLDALDGSLARLTGRVTKFGGFLDSTMDRLSDAAIIFGIALGELVNWKVAFLALIGSYMVSYTRCRAELAGSGTLAVGIAERGERLLILVIAGLFGIIDIGVYLVAILSWITFLQRVYEAKKRLEK

SEQ ID NO: 20552 - DNA, 585 bp, Methanosarcina acetivorans C2A
  CDS (1)..(585): transl_table=11
atggtaattccgtttgcccgctcagtgcccctctctccaaacactctaaccctgctgggttttgcggtaagcgtggctgccggagttgcattcgcgctgggaaaaccttttgaaggagggttcctgatcctcttcagcggagtttttgatatccttgacggaggggtcgcaagagcaaaaggaaggatcactcccttcggaggtgtcctcgactcggtttgcgaccgctattccgacggcctgatgttccttggaatcatggccggagcaatttatggccggctcagctttgcccccttcctcggggtggaaggctggctctgggcaggcttcgcactgatcggctctttcctggtaagctacacccgcgcccgtgccgagtccgcaggttgcaggaaactatcagtaggaattgctgaaagaaccgaaagaatggtcatcctggcccttggtgccctctcaggtttccttggctgggctcttgtgctgatagccgtattttcccacatcaccatgatccagagagtgctgagggcaaaaagcatactgagcagtccatcggaacccgaaagccagaaaccgtaa

SEQ ID NO: 20553 - protein, 194 aa, Methanosarcina acetivorans C2A
MVIPFARSVPLSPNTLTLLGFAVSVAAGVAFALGKPFEGGFLILFSGVFDILDGGVARAKGRITPFGGVLDSVCDRYSDGLMFLGIMAGAIYGRLSFAPFLGVEGWLWAGFALIGSFLVSYTRARAESAGCRKLSVGIAERTERMVILALGALSGFLGWALVLIAVFSHITMIQRVLRAKSILSSPSEPESQKP

SEQ ID NO: 20554 - DNA, 618 bp, Streptomyces coelicolor A3(2)
  CDS (1)..(618): transl_table=11
atgctggacgtgcgggcgagggcggcactgagcggtccgctggaccgtgctgccgcgatgctggaccgccccgctgtcacgcccaatcgtctgaccgcgctcggcctgctgacgggtcttgcctcggccggttccgcagcagccggctggtggccggccgctgcggcgctgtggctgctgtcccggctcgccgacggcctggacgggccgctggcccgtcgccgcggcacggcgaacagcagtggagcaggcggcttcctcgacatcagtgccgacttcctcgtctacggagcgttcgtcgtcggcgtcgccgtcggcgtgggcggtccggcactgccgttcctgctcgtcctgctcacctactacgtcaacggcactgccttcctggccttctcctccattgccgagcgcactgggcgccgcggtgacggccgcctgtcaggaggccggtcgctgaacttcctgggcggcctggccgaaggtggcgagaccatcgccgtgcacacactgtggtgcctgctgcccggcttcgcccacaccatcgcctgggtctgggccgcggtggtcgctgtcaccgcggcccaccgcgtcgtcaccggctatcggcagctgcgctga

SEQ ID NO: 20555 - protein, 205 aa, Streptomyces coelicolor A3(2)
MLDVRARAALSGPLDRAAAMLDRPAVTPNRLTALGLLTGLASAGSAAAGWWPAAAALWLLSRLADGLDGPLARRRGTANSSGAGGFLDISADFLVYGAFVVGVAVGVGGPALPFLLVLLTYYVNGTAFLAFSSIAERTGRRGDGRLSGGRSLNFLGGLAEGGETIAVHTLWCLLPGFAHTIAWVWAAVVAVTAAHRVVTGYRQLR

SEQ ID NO: 20556 - DNA, 612 bp, Vibrio parahaemolyticus RIMD 2210633
  CDS (1)..(612): transl_table=11
atgcttgatagcctgagtataaagctcatccgcaaaccgctgacactcagtgcgacatacctcgacaaatgtggcatcaccgcaaaccaaacgacagtatttggttttgtgcttggctgctttgccctaccggctttgatcaccgaacaatacttgttggcattgctgtttattttgctgaacagaatctgtgatggattagacggcgcactggcgaggattcaaggcattaccgatgcgggcggttttctcgatattagcttggattttctgttctattccctaattccttttggttttgtgttagcaaatccagaacaaaatgccattgcaggggcatttttgattttttcctttgtcggaacgggaagcagctttttggcttttgccatcatggcagggaaacaaggcatcgataatccggtgtataaacacaaatctctctactacatgagcggcttaaccgaaggcacggaaaccatcggctgttttgtgctgttttgcctgatgccacaacacttttcggtcattgcatacatcttcggtgcggcatgttggtttaccacattcacgcgaatttactctgggtttcatacgctcaaaggccgttaa

SEQ ID NO: 20557 - protein, 203 aa, Vibrio parahaemolyticus RIMD 2210633
MLDSLSIKLIRKPLTLSATYLDKCGITANQTTVFGFVLGCFALPALITEQYLLALLFILLNRICDGLDGALARIQGITDAGGFLDISLDFLFYSLIPFGFVLANPEQNAIAGAFLIFSFVGTGSSFLAFAIMAGKQGIDNPVYKHKSLYYMSGLTEGTETIGCFVLFCLMPQHFSVIAYIFGAACWFTTFTRIYSGFHTLKGR

SEQ ID NO: 20558 - DNA, 678 bp, Vibrio vulnificus YJ016
  CDS (1)..(678): transl_table=11
ttgatgacgtgccgccaggaagccgagtgctgcattggccttgggagcagtgccatgttagatagatttagcattaaagtgatacgttggccgctgacgcaaagtgcccaagtgctcaaccattatggtgtcaccgccaatcagatcaccgtgctcggttttgtcttaggctgttttgcccttcccgccctagtggcagagcaatacctgctggcattggcttttattgttttaaatcgagtctgcgatggacttgatggggcgttagcacgcctccaagggatcaccgacgccggtggttttctcgacatcagcttggacttcctcttctactcgctcgtcccttttggctttgtcttggctaacccagaacaaaacgccattgctggcgcgtttttgattttctctttcattggaacaggcagcagttttctcgctttcgcggtaatggcaggtaaacggggcattgataacccggtttatcaaaacaaatcactttattacatgagtggtttgaccgaaggcacagaaaccattgcctgctttgtgttgttctgcctcttcccacactctttcgcaacacttgcttacctctttggtgcggcatgttggttcacgacagggacacgtatctactctggctttcataccctcaatcaggttgatgaagaggaataa

SEQ ID NO: 20559 - protein, 225 aa, Vibrio vulnificus YJ016
MMTCRQEAECCIGLGSSAMLDRFSIKVIRWPLTQSAQVLNHYGVTANQITVLGFVLGCFALPALVAEQYLLALAFIVLNRVCDGLDGALARLQGITDAGGFLDISLDFLFYSLVPFGFVLANPEQNAIAGAFLIFSFIGTGSSFLAFAVMAGKRGIDNPVYQNKSLYYMSGLTEGTETIACFVLFCLFPHSFATLAYLFGAACWFTTGTRIYSGFHTLNQVDEEE

SEQ ID NO: 20560 - DNA, 774 bp, Thermus thermophilus HB27
  CDS (1)..(774): transl_table=11
gtggtcccgggggccaaggagaggccggtccaggagttcctcaacgccctccttttccgccccctggcgcacctcgtcgtcctcctcctcctgcgtacgcccgtgaggccccaccacctggtcctcttccacacgggcctggtccttgggaccgcctggctgctccttaggggggaggacctcggggctgccctcctcctccagctcaaaaccgtcttggacaacgccgacgggcagctcgcccgcctccggggggaggtgacggagcttgggcgctatttggacaccggcctggacttcctggggaaccttttcctcttcctggccctgggcttgcgcaccgcctccttggagaaggccctcctcgcctttttggtcttcaccttcgtccagtcctacgacttcaacctggaaaggctccaccgcttggccaaaggcctttccctgcccgaggggcccaaggacagggagacccttgggcttcgcctcttccgggggctttacgccctcctcttcgcccctcaggaccgggccatcgtcgccttggagcgctttctccaggggcggttgcggcttgacccctcccgtttctgggacgagggggccttggcgggggtggtgaacctgggcctcaccacgcagcttttcttcctgggggttttcctcctcttccacgagcctggcgcctacctcacctttgtcctccttcaggctgtgtatcttggcctttggtacctatggaggatcgcccgcagtatcccatccccacggtag

SEQ ID NO: 20561 - protein, 257 aa, Thermus thermophilus HB27
MVPGAKERPVQEFLNALLFRPLAHLVVLLLLRTPVRPHHLVLFHTGLVLGTAWLLLRGEDLGAALLLQLKTVLDNADGQLARLRGEVTELGRYLDTGLDFLGNLFLFLALGLRTASLEKALLAFLVFTFVQSYDFNLERLHRLAKGLSLPEGPKDRETLGLRLFRGLYALLFAPQDRAIVALERFLQGRLRLDPSRFWDEGALAGVVNLGLTTQLFFLGVFLLFHEPGAYLTFVLLQAVYLGLWYLWRIARSIPSPR

SEQ ID NO: 20562 - DNA, 618 bp, Desulfotalea psychrophila LSv54
  CDS (1)..(618): transl_table=11
atgctcgatcgttatatactacccagaaccagctcttttttatccttctgcgctcgtctcctccatgcccgggacatcactgccaatcgggtaaccctctttggcctttgctgtggccttgttaccctgcctcttttagcggtcgaacagtatattcctgccctgttctgtatctgtcttaatcggtttttggatggggtggatggggccttggcccgtattcagggggcaagcgatgatggagcctatcttgatatagtttgtgattttattttttatgccgtggtagttctgggctttgccctggccgcgcctggggagaatgccctggctgctgacctgcttctggctgcctttatgggtacctcctcctcttttttggcctttgccgtcttcgccgagaggaggtctcttccccttattgtctatccctctaaggggttttactatcttggcggtcttgccgaggggacggagaccatctgtttttttattctcttctgtctcttgccccagtggttccccgctctggcgctttttttcgccctgctctgtctggtgaccaccgtcgttcgagtattttttgcctatcgtcttctgcaggagccccacccttaa

SEQ ID NO: 20563 - protein, 205 aa, Desulfotalea psychrophila LSv54
MLDRYILPRTSSFLSFCARLLHARDITANRVTLFGLCCGLVTLPLLAVEQYIPALFCICLNRFLDGVDGALARIQGASDDGAYLDIVCDFIFYAVVVLGFALAAPGENALAADLLLAAFMGTSSSFLAFAVFAERRSLPLIVYPSKGFYYLGGLAEGTETICFFILFCLLPQWFPALALFFALLCLVTTVVRVFFAYRLLQEPHP

SEQ ID NO: 20564 - DNA, 597 bp, Legionella pneumophila subsp. pneumophila str. Philadelphia 1
  CDS (1)..(597): transl_table=11
atgcttgaacaatcattacgacattattatcagcttgtcttggtagatcccatactacctgctttacgtgacaggataacgccattgtccattacctggttgtcgggaatatttggcttgttgtttattccttttgtcttattagacaaaccttatattgcaattagctttctcttgctttctggatacctggatactcttgatggttcgttggcccgctttcaaaacagagcctctgattttggctcagcaatggatatcgtcatagatagaattgtagaattttctgctgttcttgctttgtatctttttgatccacaacaccgtgccactttagccattttaatgttaggcagtattttgctctgtattacaagttttctggttgtgggaattttttccaacaatactactcaaaaaagtttttattacagcccggggataatggagcgtgccgaagcatttctattctttatttttatgacattattttccagctgctttaattttcttgccgctctcttttgttttttagtctgtttaaccgcgttgataaggctttttgaatttaaaaaaagtgtacaggctccaagttag

SEQ ID NO: 20565 - protein, 198 aa, Legionella pneumophila subsp. pneumophila str. Philadelphia 1
MLEQSLRHYYQLVLVDPILPALRDRITPLSITWLSGIFGLLFIPFVLLDKPYIAISFLLLSGYLDTLDGSLARFQNRASDFGSAMDIVIDRIVEFSAVLALYLFDPQHRATLAILMLGSILLCITSFLVVGIFSNNTTQKSFYYSPGIMERAEAFLFFIFMTLFSSCFNFLAALFCFLVCLTALIRLFEFKKSVQAPS

SEQ ID NO: 20566 - DNA, 588 bp, Legionella pneumophila subsp. pneumophila str. Philadelphia 1
  CDS (1)..(588): transl_table=11
atgatagaacaacaccttaggccactgtatcaacgcctttgtgtcaatccaattactcctgtgttgatagagcgagtgaccccaaatcaagtcaccttcttttctggcgtattgggtcttttagtgatacccgcactgtggctaaatctaccctatctggccattagtttactattactgtctggatattgtgataccctcgatggtactattgctcgtctaactaaccatagctctgactggggtagtgtattggatattatgactgatcgcgtggttgaggtgggtgttgtgtttgccttatgggctattaatccaaatgagcggggtcttgggtctttgttaatgatggcgagtatactactttgtatcacgagttttcttgttgtgggtatttttaagactaatgattcagaaaaaagttttcattacagcccaggattaatagaaagagctgaagcctttgttttttttatagccatgatgctttggccaaaccacttcctaagtttagcaatgatcttttctttgttagtgatagggacagcgatgcacaggctttatgaatttcataagcaatctatttaa

SEQ ID NO: 20567 - protein, 195 aa, Legionella pneumophila subsp. pneumophila str. Philadelphia 1
MIEQHLRPLYQRLCVNPITPVLIERVTPNQVTFFSGVLGLLVIPALWLNLPYLAISLLLLSGYCDTLDGTIARLTNHSSDWGSVLDIMTDRVVEVGVVFALWAINPNERGLGSLLMMASILLCITSFLVVGIFKTNDSEKSFHYSPGLIERAEAFVFFIAMMLWPNHFLSLAMIFSLLVIGTAMHRLYEFHKQSI

SEQ ID NO: 20568 - DNA, 657 bp, Nocardia farcinica IFM 10152
  CDS (1)..(657): transl_table=11
gtgctcagcttcttcggccgcgagaccttcgccaaggccaccgcgccgctgggcagggcgctcgtcggcaccgggctcacccccgacgccgtcaccctgatcggcacggcggcctcgatcgcggctgcggtgaccttgttcccgaccgggcatctgttctggggcacgatggtcatctggctgttcgtgatgttcgacatgctcgacggggcgatggccagggcacgcgggggcggcacccgttacggcgcggtgctcgacgccacctgcgaccgggtggccgacggcgccatcttcggcggtctggcctggtgggccgtctaccacgagaacaacaagtggttgctggccgcgacgctggtggtgctggtgacctcgcaggtcatctcctatgccaaggctcgcgcggaggcgagcggcctgtccgccgacggcggcctgatcgagcggcccgaccggctgatcatcgtgctcgtcggcgcgggcttcaccgggatcggcggctactggggaatcgagtggctgacctgggccgtgcacgtggccatgtggatcctggcggtgctgagcatcatcacggtgttccagcgggtgctcgccgtgcgcaattcgcccggcgcgcgtgaggtgatcccggccgccggggaggcccgatga

SEQ ID NO: 20569 - protein, 218 aa, Nocardia farcinica IFM 10152
MLSFFGRETFAKATAPLGRALVGTGLTPDAVTLIGTAASIAAAVTLFPTGHLFWGTMVIWLFVMFDMLDGAMARARGGGTRYGAVLDATCDRVADGAIFGGLAWWAVYHENNKWLLAATLVVLVTSQVISYAKARAEASGLSADGGLIERPDRLIIVLVGAGFTGIGGYWGIEWLTWAVHVAMWILAVLSIITVFQRVLAVRNSPGAREVIPAAGEAR

SEQ ID NO: 20570 - DNA, 597 bp, Legionella pneumophila str. Paris
  CDS (1)..(597): transl_table=11
atgcttgaacaatcattacgacattattatcagcttgtcttggtagatcccatactacctgctttacgtgacaggataacgccattgtccattacctggttgtcgggaatatttggcttgttgtttattccttttgtcttattagacaaaccgtatattgcaattagttttctcttgctttctggatacctggatactcttgatggttcgctggcccgctttcaaaacagagcctctgattttggctcagcaatggatatcgtcatggatagaattgtagaattttctgctgttcttgctttgtatctttttgatccacaacaccgtgccactttagccattttaatgttaggcagtattttactctgtattacaagctttctggttgtgggaattttttccaacaatactactcaaaaaagtttttattacagcccgggaataatggagcgtgccgaagcatttctattctttatttttatgacattattttccagctgctttaattttcttgccgctctcttttgttttttagtctgtttaactgcgttgataaggctttttgaatttaaaaaaagcgtacaggctccaggttag

SEQ ID NO: 20571 - protein, 198 aa, Legionella pneumophila str. Paris
MLEQSLRHYYQLVLVDPILPALRDRITPLSITWLSGIFGLLFIPFVLLDKPYIAISFLLLSGYLDTLDGSLARFQNRASDFGSAMDIVMDRIVEFSAVLALYLFDPQHRATLAILMLGSILLCITSFLVVGIFSNNTTQKSFYYSPGIMERAEAFLFFIFMTLFSSCFNFLAALFCFLVCLTALIRLFEFKKSVQAPG

SEQ ID NO: 20572 - DNA, 597 bp, Legionella pneumophila str. Lens
  CDS (1)..(597): transl_table=11
atgcttgaacaatcattacgacattattatcagcttgtcttgatagatcccatactacctgctttacgtgacaggataacgccattgtccattacctggttgtcgggaatatttggcttgttgtttattccttttgtcttattagacaaaccttatattgcaattagctttctcttgctttcgggatacctggatactcttgatggttcgctggcccgctttcaaaacagagcctctgactttggctcagcaatggatatcgtcatggatagaattgtagaattttctgctgtccttgctttgtatctttttgatccacaacaccgtgccactttagccattttaatgttaggcagtattttactctgtattacaagctttctggttgtgggaattttttccaacaatactactcaaaaaagtttttattacagcccggggataatggagcgtgccgaagcatttctattctttatttttatgacattattttccagctgctttaattttcttgccgctctcttttgttttttagtctgtctaaccgcgttgataaggctttttgaatttaaaaaaagtgtacgggctcctggttag

SEQ ID NO: 20573 - protein, 198 aa, Legionella pneumophila str. Lens
MLEQSLRHYYQLVLIDPILPALRDRITPLSITWLSGIFGLLFIPFVLLDKPYIAISFLLLSGYLDTLDGSLARFQNRASDFGSAMDIVMDRIVEFSAVLALYLFDPQHRATLAILMLGSILLCITSFLVVGIFSNNTTQKSFYYSPGIMERAEAFLFFIFMTLFSSCFNFLAALFCFLVCLTALIRLFEFKKSVRAPG

SEQ ID NO: 20574 - DNA, 630 bp, Photobacterium profundum SS9
  CDS (1)..(630): transl_table=11
atgcttgatcgctatgcagttaaagttattcgttggccgctaaaaacactggcagccctacccgataaactcggcattacggctaaccaagtaacgttagctggctttttaattggcttacttgccttaccatcccttatgctgcaagagtatgattgggcacttacattcatcgttattaatcgaatatttgatggcttagacggcgctattgcacgtcgacaaggcattacagattgcggtggttttctcgatatcacactggattttctattttattcgatggtgccatttggctttgtattggcagacccaagtgcaaacgccgttgccggtgcgttcttgatattttcgtttattggtactggctcaagttttctatcttttgccataatggcaggaaaacgaaatatcgaaagccctgtttataagcaaaaatctttgtactacatcggaggattaacggaaggcacagaaaccattgcctgctttgtactgttctgcttatttccacaatactttgcaatcatcgcatgggtgtacggcaccttatgctggattacaacggctacacgtatctgggcgggttatcacaccttgaaagatacacctgaaatagaggttaattga

SEQ ID NO: 20575 - protein, 209 aa, Photobacterium profundum SS9
MLDRYAVKVIRWPLKTLAALPDKLGITANQVTLAGFLIGLLALPSLMLQEYDWALTFIVINRIFDGLDGAIARRQGITDCGGFLDITLDFLFYSMVPFGFVLADPSANAVAGAFLIFSFIGTGSSFLSFAIMAGKRNIESPVYKQKSLYYIGGLTEGTETIACFVLFCLFPQYFAIIAWVYGTLCWITTATRIWAGYHTLKDTPEIEVN

SEQ ID NO: 20576 - DNA, 774 bp, Thermus thermophilus HB8
  CDS (1)..(774): transl_table=11
gtggtcccgggggccaaggagaggccggtccaggagttcctcaacgccctccttttccgccccctggcgcacctcgtcgtcctcctcctcctgcgtacgcccgtgaggccccaccacctggtcctcttccacacgggcctggtccttggggccgcctggctgctccttaggggggaggacctcggggccgccctcctcctccagctcaaaaccgtcttggacaacgccgacgggcagctcgcccgccttaggggagaggtgacggagtttgggcgctacctggacacggggatggacttcctcgggaacctggccctcttcctggccctgggcctgcgcaccggtttcctggagaaggccctcctcgcttttttggttttcaccctggtccagtcctacgacttcaacctggaaaggctttaccgcctttcccgggggcttcccttgcccgaggggcctcgggacccggaaaccccctggcttcgcctcttccgggggctttacgccctcctcttcgccccccaggaccgggccatcgtcgccttggagcgctttctccaggggcggttgcggcttgacccctcgcgtttctgggacgagggggccttggcgggggtggtgaacctgggcctcaccacgcagcttttcttcctgggggttttcctcctcttccacgagcctggcgcctacctcacctttgtcctccttcaggccgtgtatcttggcctttggtacctatggaggatcgcccgcagtatcccatccccacggtag

SEQ ID NO: 20577 - protein, 257 aa, Thermus thermophilus HB8
MVPGAKERPVQEFLNALLFRPLAHLVVLLLLRTPVRPHHLVLFHTGLVLGAAWLLLRGEDLGAALLLQLKTVLDNADGQLARLRGEVTEFGRYLDTGMDFLGNLALFLALGLRTGFLEKALLAFLVFTLVQSYDFNLERLYRLSRGLPLPEGPRDPETPWLRLFRGLYALLFAPQDRAIVALERFLQGRLRLDPSRFWDEGALAGVVNLGLTTQLFFLGVFLLFHEPGAYLTFVLLQAVYLGLWYLWRIARSIPSPR

SEQ ID NO: 20578 - DNA, 639 bp, Idiomarina loihiensis L2TR
  CDS (1)..(639): transl_table=11
atgtttgaccctaagctacttccggcaacccgaaaaattctcgacctcccggcgcgattattagttcgtgtcggcgttagcgctgatcaggtcaccataacgggttttatcatcggtttgctggcagtgccatttttagcttttgagctttatgaattcgcgctggccgctattttactaaaccgcctgtgcgacggtctggacggcgccgtagcaaggcgcactcagttaaccgatgccggtggttttctcgatattgtgctggatttcattttttacagtgctgtggtatttggttttttattggcgtcgcccgaacagaacgccattgcctcaggcttgttgttagtcacttttatggggactggctctacctttctggcctttgcctgcattgccggaaagcgcggtattgaaaacccggaatatccgaataagtcgctgcattatatgggcggtttaaccgaaggttttgaaaccattttagcttttgtggcgttttgtttatggccacagcacttttccgtactggcctatatattcgctgccgcctgctggcttaccgcaataacccgcattgttgccggttaccgcacactgaaacagccaggggcaaagccggagagcaccaatgtctga

SEQ ID NO: 20579 - protein, 212 aa, Idiomarina loihiensis L2TR
MFDPKLLPATRKILDLPARLLVRVGVSADQVTITGFIIGLLAVPFLAFELYEFALAAILLNRLCDGLDGAVARRTQLTDAGGFLDIVLDFIFYSAVVFGFLLASPEQNAIASGLLLVTFMGTGSTFLAFACIAGKRGIENPEYPNKSLHYMGGLTEGFETILAFVAFCLWPQHFSVLAYIFAAACWLTAITRIVAGYRTLKQPGAKPESTNV

SEQ ID NO: 20580 - DNA, 600 bp, Francisella tularensis subsp. tularensis SCHU S4
  CDS (1)..(600): transl_table=11
atgatagagcagaaaattagaccagtttttcagagaatatttgttgatggtattgctaagtttattgcgcctgtgatagcacctaatttaatcacactaatatcgttgatagttggtttggttgctgcaatagctttttttataaatcagtatttatgtatatttttgttattactgtctggatattttgatattttagatggttcggttgcacgcttacaaggtagttcttcatcatttgggactatcttagatattttgagtgatcgtttcgttgaaagttttattattattgcaattttcattaatcagcttgatatagcatgggttggtttattaatgatgatgtctataattgtttgtattagtagttttttgttagtagggattttcagtcaaaaagaatcatcaaagagtttttactatactcctggcttgattgagagagccgaaacatttatattctttattgtaatgattttatttcctaatatagtagttgtattaggattgatttatacattattagttttatggacaacgctatatcgttgctatgagttttatgtttatgataagcaaaggagtaaatttcaatga

SEQ ID NO: 20581 - protein, 199 aa, Francisella tularensis subsp. tularensis SCHU S4
MIEQKIRPVFQRIFVDGIAKFIAPVIAPNLITLISLIVGLVAAIAFFINQYLCIFLLLLSGYFDILDGSVARLQGSSSSFGTILDILSDRFVESFIIIAIFINQLDIAWVGLLMMMSIIVCISSFLLVGIFSQKESSKSFYYTPGLIERAETFIFFIVMILFPNIVVVLGLIYTLLVLWTTLYRCYEFYVYDKQRSKFQ

SEQ ID NO: 20582 - DNA, 783 bp, Ehrlichia ruminantium str. Welgevonden
  CDS (1)..(783): transl_table=11
atgaaagaagaacaaagtggtaagtttttccctattgcaagattgtttccaaatttaattaccttgttggggttatgtgctggcctaacttctataaaatttacgtttatcggtaaatgggaatctgcaattgtatttatcataatagcagcagttatagatggtatggatggaagaattgccaggttacttaattctactagtggatttggtgctcaacttgattcttttgcagattttttaaattttggtgctgctccagcgtttttattatacttttggtctctcagacaaataaaagtaataggatggatgcttgttatgacatttgtgatatgtatgtctataagacttgctagatttaacatgtcattatacgaagaagaaaaagaattagactggcataagtttttctttgtaggagtacccgctccattaggagcaatattatcattaattccaataatgcttactttttattttcatgataatcactggttagtggaaaatttactagagcataataagatagcagtatattttgctattattgcatttttatcagtaagtaatattcctactttttctgcaaaacatttatatataccaaaaaatttaatttatatttttattgtactattaggcatattcattgtatttgcaataacaaaaccatggttaacttttccagtagttggaataatgtacatactatcaatccctgtaagtagtattgtatacatatatcttatgtacaaaaataaaaataagaaaaacatatga

SEQ ID NO: 20583 - protein, 260 aa, Ehrlichia ruminantium str. Welgevonden
MKEEQSGKFFPIARLFPNLITLLGLCAGLTSIKFTFIGKWESAIVFIIIAAVIDGMDGRIARLLNSTSGFGAQLDSFADFLNFGAAPAFLLYFWSLRQIKVIGWMLVMTFVICMSIRLARFNMSLYEEEKELDWHKFFFVGVPAPLGAILSLIPIMLTFYFHDNHWLVENLLEHNKIAVYFAIIAFLSVSNIPTFSAKHLYIPKNLIYIFIVLLGIFIVFAITKPWLTFPVVGIMYILSIPVSSIVYIYLMYKNKNKKNI

SEQ ID NO: 20584 - DNA, 570 bp, Thermococcus kodakarensis KOD1
  CDS (1)..(570): transl_table=11
atgctcaacaggtacagggagaacgtcaaaggttaccttgaggccatcgtaaaacctctagcaaaagccggtgtcacaccgaacacgataacgttcataggcctcctgataagcctgcttggagcgtatctcttctacctccagcgcccaaggctcgccgcagtgatcctcctcataggctctgccatagatgccctcgacggaacgctggcaagaatgactggaaaaacgagccgctttggagcgttcctggattctacctttgacaggataagcgatggtgcagtcctctttggaatagccctcggcaacctcgcggactggcgcttgactttcctgacctttatgggtgcatacctcgtcagctacgagcgctgtagggcagagcttgcaggctcaggaacgctcgcagttggaatagccgagagggctgagaggttattgatcctgatggcgttctcccttgctggggcagagtacgtgaagtggggtgtttacatcgtcggcgtgctcgcgtggataacggtcttccagagaatgtgggcggcctatcagaggctcaaggagtga

SEQ ID NO: 20585 - protein, 189 aa, Thermococcus kodakarensis KOD1
MLNRYRENVKGYLEAIVKPLAKAGVTPNTITFIGLLISLLGAYLFYLQRPRLAAVILLIGSAIDALDGTLARMTGKTSRFGAFLDSTFDRISDGAVLFGIALGNLADWRLTFLTFMGAYLVSYERCRAELAGSGTLAVGIAERAERLLILMAFSLAGAEYVKWGVYIVGVLAWITVFQRMWAAYQRLKE

SEQ ID NO: 20586 - DNA, 783 bp, Ehrlichia ruminantium str. Gardel
  CDS (1)..(783): transl_table=11
atgaaagaagaacaaagtggtaagtttttccctattgcaagattgtttccaaatttaattaccttgttggggttatgtgctggcttaacttctataaaatttacgtttatcggtaaatgggaatctgcaattgtatttatcataatagcagcagttatagatggtatggatggaagaattgctaggttacttaattctactagtgggtttggtgctcaacttgattcttttgcagattttttaaattttggtgctgctccagcgtttttattatacttttggtctctcagacaaataaaagttataggatggatgcttgttatgacatttgtgatatgtatgtctataagacttgctagatttaacatgtcattatacgaagaagaaaaagaattagactggcataagtttttctttgtaggagtacctgctccattaggagcaatattatcattaattccaataatgcttactttttattttcatgataatcactggttagtggaaaatttactagagcataataagatagcagtatattttgctattattgcatttttatcagtaagtaatattcctactttttctgcaaaacatttatacataccaaaaaatttaatttatatttttattgtactattaggcatatttattgtatttgcaataacaaaaccatggttaacttttccagtagttggaataatgtacatactatcaatccctataagtagtatggtatacatatatcttatgtacaaaaataaaaataagaaaaacatatga

SEQ ID NO: 20587 - protein, 260 aa, Ehrlichia ruminantium str. Gardel
MKEEQSGKFFPIARLFPNLITLLGLCAGLTSIKFTFIGKWESAIVFIIIAAVIDGMDGRIARLLNSTSGFGAQLDSFADFLNFGAAPAFLLYFWSLRQIKVIGWMLVMTFVICMSIRLARFNMSLYEEEKELDWHKFFFVGVPAPLGAILSLIPIMLTFYFHDNHWLVENLLEHNKIAVYFAIIAFLSVSNIPTFSAKHLYIPKNLIYIFIVLLGIFIVFAITKPWLTFPVVGIMYILSIPISSMVYIYLMYKNKNKKNI

SEQ ID NO: 20588 - DNA, 609 bp, Vibrio fischeri ES114
  CDS (1)..(609): transl_table=11
atgcttgatagtttcagtattaaagtgattcgttggcctttagcgcaaagtgccaagctcattaataaactgggaattacagccaaccaaacgacgctatttggttttgttttaggctgcttagccttccctgctcttattgcagagcaatatttgttggctctagtatttattgtcttgaatcgcatttgtgatggattagatggggcattagctcgaatacaaggcataactgatgcgggcggctttcttgatatcagtttggattttctgttttattcactgatcccttttggatttgttctcgccaaccctgatcaaaatgccattgcgggtgcgtttttaattttctcatttgttgggacaggaagcagctttttggcttttgctattatggcaagtaaacaaggaattgataatccagtttataaacacaaatccctttattacatgagtggcttaaccgaaggaacagaaaccattgcgtgttttatcgcattttgtctgtttccaacccattttaccattatcgcctatgtgtttggtgccgcttgctggtttaccacctttactcgcatttactctgggttccatactttaaaaccgtaa

SEQ ID NO: 20589 - protein, 202 aa, Vibrio fischeri ES114
MLDSFSIKVIRWPLAQSAKLINKLGITANQTTLFGFVLGCLAFPALIAEQYLLALVFIVLNRICDGLDGALARIQGITDAGGFLDISLDFLFYSLIPFGFVLANPDQNAIAGAFLIFSFVGTGSSFLAFAIMASKQGIDNPVYKHKSLYYMSGLTEGTETIACFIAFCLFPTHFTIIAYVFGAACWFTTFTRIYSGFHTLKP

SEQ ID NO: 20590 - DNA, 666 bp, Corynebacterium jeikeium K411
  CDS (1)..(666): transl_table=11
atgcttagcgtgcacggccgtggccccgccgcggtcatcattgaaccgatcgccagagtgctgcacaagatgggaattactcccaacgcagtgaccgttttcggcaccctgatggcgataggtttcgcgctctggctgattccctccggtcaccactttgccgctgccgtactcatcggtcttacggtcgctactgacatggtggacggcaccatggctcgcatgcgcggcggcggcactcggttcggcgccacgctagatgccacctgcgaccgcctcagcgacggcgccatcttcggcgccctggtcctctggtttggcctgcaggaacccgccaacgtcgtgatgatgagcgtctgcttggtgattctcgttgccagccaggtcaccagctacgtcaaagcccgcgcagaggcctcgggaatcaaggtcgtgggagggctcatcgagcgcccggaacgcctcatcatctccttggtggcagttggtatcggcgggcttggcgtgccacacattctggcgtggggactgtggatcctcgctgccggatcgctgtacacggttgttgagcgcctactaattgttgctcgttcggacgccgcgtctcagactatcgccgcccccgaaggagcccgcgagtttcccgttgaggggagtgaaggctga

SEQ ID NO: 20591 - protein, 221 aa, Corynebacterium jeikeium K411
MLSVHGRGPAAVIIEPIARVLHKMGITPNAVTVFGTLMAIGFALWLIPSGHHFAAAVLIGLTVATDMVDGTMARMRGGGTRFGATLDATCDRLSDGAIFGALVLWFGLQEPANVVMMSVCLVILVASQVTSYVKARAEASGIKVVGGLIERPERLIISLVAVGIGGLGVPHILAWGLWILAAGSLYTVVERLLIVARSDAASQTIAAPEGAREFPVEGSEG

SEQ ID NO: 20592 - DNA, 678 bp, Thermobifida fusca YX
  CDS (1)..(678): transl_table=11
atgaccggagccgaattccacgacgatgaagagaccatgctgagaatcctgcgccccgctaccgcccgactgctcgcacccatcggccgcggcctcgttcgtatcggcgtcaccccgaatacggtcaccctcgtgggaaccggcggcgtcgtcatcagctcgctggtgttctatcctctgggcgagctgtacatcggcaccctcgtcgtcgcgttcttcgcgctcttcgacatgcttgacggcgcggtcgcccgcgcctccggagagaccagtgcctggggagcgttcctcgactccacactggaccggctctccgatgccgccattttcgcgggactgctggtgtggctcatcggcggcggacgcgacgaggtcctcgcctggctcgccctgttctgcatgatcagcggcttcggcgtgtcctacatcaaagcgcgcgctgaaggcctgggggccaactgcgatgtgggcatcgcggaacgcaccgaacgcctcatcatcatcctggtcgccaccggactgcacgggctcggcgtcccttacgcgctggctaccgggctgtggctgctcgctttcctcagcgccatcaccatcgtgcaacgcttggtggagacccggatccgccttaccgagccggacgagcagatcctcgacaaagccgagacagaaacctcgtga

SEQ ID NO: 20593 - protein, 225 aa, Thermobifida fusca YX
MTGAEFHDDEETMLRILRPATARLLAPIGRGLVRIGVTPNTVTLVGTGGVVISSLVFYPLGELYIGTLVVAFFALFDMLDGAVARASGETSAWGAFLDSTLDRLSDAAIFAGLLVWLIGGGRDEVLAWLALFCMISGFGVSYIKARAEGLGANCDVGIAERTERLIIILVATGLHGLGVPYALATGLWLLAFLSAITIVQRLVETRIRLTEPDEQILDKAETETS

SEQ ID NO: 20594 - DNA, 780 bp, Ehrlichia canis str. Jake
  CDS (1)..(780): transl_table=11
atgaaagaagaacaaagcagcaaattttttcctattgctaggttatttccaaacatagtaactttattaggcttatgtgctggtttgacttctataaaattcacttttattggcaaatgggaatctgctgttatgtttattatcattgcagcattaatagatggcatggatggtaggattgctaggttactaaattctactagtggttttggtgcacatcttgactcttttgcagatttcttaaattttggtgctgctcccgctttcttgatatatttttggtcacttaaacaaattaaagtcataggttggatgctagtaatgatgtttgtaatgtgcatgtcgattagacttgcaaggttcaatgtgtctttatatgaagaaaaaaaattagactggcacaaatttttctttgtaggagtacctgctccactaggagcagtactatcattaattccaataatgttgacattttattatcacgacaatcattggttagttgaaaacttatcagaccaaaataatgtagcaatatattttgctatcattgcatttttattagtaagtaacattcctacattttcagcaaaacatctctatataccaaaaaatttatcttatatatttattttactatttggtatatttattgtatttgcaataacaaaaccatggctaacatttccagtatttggaataatgtatatattatcaatacctataagtagttcagtatacatatatattatgtacaaaaacaaaactaaaataaatatgtaa

SEQ ID NO: 20595 - protein, 259 aa, Ehrlichia canis str. Jake
MKEEQSSKFFPIARLFPNIVTLLGLCAGLTSIKFTFIGKWESAVMFIIIAALIDGMDGRIARLLNSTSGFGAHLDSFADFLNFGAAPAFLIYFWSLKQIKVIGWMLVMMFVMCMSIRLARFNVSLYEEKKLDWHKFFFVGVPAPLGAVLSLIPIMLTFYYHDNHWLVENLSDQNNVAIYFAIIAFLLVSNIPTFSAKHLYIPKNLSYIFILLFGIFIVFAITKPWLTFPVFGIMYILSIPISSSVYIYIMYKNKTKINM

SEQ ID NO: 20596 - DNA, 534 bp, Methanosarcina barkeri str. fusaro
  CDS (1)..(534): transl_table=11
ttgctgggttttgccgtaagcatcgctgcaggggcagcatttgcgctgggaaaaccttttgcaggtggtcttcttattctttttagcgggatctttgatatccttgatggcggagtcgcgagggcaaaaggcaggattacgccctttggaggcgtgcttgattcggtttgcgaccggtattccgatggtctaatgttcctcggaataatagcaggcgcggttaacggcaggcttgtcctttccccaattgtgcaaatcgaaggctggctctgggcaggctttgcccttataggctccttcctggtaagctacactcgcgcccgtgcggaatctgcaggttgccggaaattgtcagtcggaattgccgaacgtacggaaagaatggttcttctggccctgggcggaatttcaggttttctaggttgggctctggtacttgtagctgtgttttcccacatcaccattatccagcgagtccttcgggcaaaaagcatattgagtaagccttcagaagttgatttccaaaaaccgtaa

SEQ ID NO: 20597 - protein, 177 aa, Methanosarcina barkeri str. fusaro
MLGFAVSIAAGAAFALGKPFAGGLLILFSGIFDILDGGVARAKGRITPFGGVLDSVCDRYSDGLMFLGIIAGAVNGRLVLSPIVQIEGWLWAGFALIGSFLVSYTRARAESAGCRKLSVGIAERTERMVLLALGGISGFLGWALVLVAVFSHITIIQRVLRAKSILSKPSEVDFQKP

SEQ ID NO: 20598 - DNA, 582 bp, Dehalococcoides sp. CBDB1
  CDS (1)..(582): transl_table=11
atgtctggtatggcaagttggcgtaaagagattgcccttaaagttacaaaccccgtaataaatcttttagctaaaaccggtcttaccccaaatatggttacgataatcggttttgttattactctggtggcggctttaatcatagttaatgggaacctgcttttagcgggaatagttatgttgctggcaggtgtatttgatatgctggacggggcacttgcccgccgtaccggcagggttacccgcttcggggcagtgcttgattctactttagacagggtctcggaagctgcaattcttatcggggtatgcgctttttattcccaaaacggacagacacctgaggtgatactggcggtaattaccctcacactttctttgctggtcagttatatacgggctagagccgaagccatggggcttgaaggaaaagaaggattttttaccagacctgaacgggtggttgcactggctataggcatgatgctgaatatactcgttccggtattggtcttggtaagtgttctcagtttgataactgttattcaacggcttgcaaatgtttaccgacagaccaaatga

SEQ ID NO: 20599 - protein, 193 aa, Dehalococcoides sp. CBDB1
MSGMASWRKEIALKVTNPVINLLAKTGLTPNMVTIIGFVITLVAALIIVNGNLLLAGIVMLLAGVFDMLDGALARRTGRVTRFGAVLDSTLDRVSEAAILIGVCAFYSQNGQTPEVILAVITLTLSLLVSYIRARAEAMGLEGKEGFFTRPERVVALAIGMMLNILVPVLVLVSVLSLITVIQRLANVYRQTK

SEQ ID NO: 20600 - DNA, 609 bp, Rhodobacter sphaeroides 2.4.1
  CDS (1)..(609)
atgctcgacggtctgatgcgacgcctgatcgacccgccgctcgaccgtgcggggcccatgctcgcccgccgcggctggagcgcggatgccgtgacgatggtgggccttgcgctcgggctcctcgcggcggggctggtggcggcgggtgcctccaccctctgggcgatcctgccgcttctcgcgggccggatcgccgacgggctcgacggcgcgatcgcgcgtgcgggacgcaggaccgacttcggcggctatctcgacatcacatgcgacttcctgttctacgcggccttaccgctcgccttcgtgctgcgcgcgcctgaaaacggggcggccggcgcctttctgctcgcctctttctatgtgaacggcgcgagctttctgggctttgccgtgctggccgcaaagcgcgggatggagacgacggcccgcggcgagaagtcgctctacttcacggcagggcttctggaaggcagcgagacgatcctgttcttcctcttcctctgcctctttccggggctcttcgcgccggccgcctggattttcggcgccctctgcttcgtgaccgcggcgagccgcgtcctgctcgcccgcaggctctttcgcgactga

SEQ ID NO: 20601 - protein, 202 aa, Rhodobacter sphaeroides 2.4.1
MLDGLMRRLIDPPLDRAGPMLARRGWSADAVTMVGLALGLLAAGLVAAGASTLWAILPLLAGRIADGLDGAIARAGRRTDFGGYLDITCDFLFYAALPLAFVLRAPENGAAGAFLLASFYVNGASFLGFAVLAAKRGMETTARGEKSLYFTAGLLEGSETILFFLFLCLFPGLFAPAAWIFGALCFVTAASRVLLARRLFRD

SEQ ID NO: 20602 - DNA, 795 bp, Magnetospirillum magnetotacticum MS-1
  CDS (1)..(795)
atgttccgccccaagcgtccgccccgtatccgggggttgtcgatcaacaagctgatccccaacatcctgacgctgctggcgctgtgcgctggcctcacctccatccgcttcgccgtacacggcatgtggaaggaggcggtgatctccaccgttctggccgccattctggacgggttggacgggcgggtggcgcggctgcttcaaggcacctccaagttcggcgccgaactggattccctttccgatttcgtcagcttcggcgtggcgcccgccatggtgctgtatttttggaccatgcaaggcgccggaggattcggctgggcgctggtcttgctgttctcggtgtgctgcgcgctgcgtctggcccgcttcaacaccatgatcggcgaacccgacctgccgccctacgcctataacttcttcaccggcgttccggctccggcggcggccgggctggtcttgcttcccatggtcttcaccatccagttcggcggcggcttcttcgatcagcccgcggtggtcgcggtcttcttgttgggcgtttccttcctgatggtcagcaagatccccaccttctcggggaaaaaagtgcgcgtgccccaccgttgggtcctgcccatcctgctgatcattggcctcgcggcggctttcatggtgaccgagccctggctgaccctgtcgctgctgggtgtcttgtatctggggatgatcccactcagcttgcgctcgttccgccgcctcaaggctcaggcggaagtcccggccccggacgaagcgcccataccttccgcgtag

SEQ ID NO: 20603 - protein, 264 aa, Magnetospirillum magnetotacticum MS-1
MFRPKRPPRIRGLSINKLIPNILTLLALCAGLTSIRFAVHGMWKEAVISTVLAAILDGLDGRVARLLQGTSKFGAELDSLSDFVSFGVAPAMVLYFWTMQGAGGFGWALVLLFSVCCALRLARFNTMIGEPDLPPYAYNFFTGVPAPAAAGLVLLPMVFTIQFGGGFFDQPAVVAVFLLGVSFLMVSKIPTFSGKKVRVPHRWVLPILLIIGLAAAFMVTEPWLTLSLLGVLYLGMIPLSLRSFRRLKAQAEVPAPDEAPIPSA

SEQ ID NO: 20604 - DNA, 795 bp, Deinococcus geothermalis DSM 11300
  CDS (1)..(795): transl_table=11
atgacacacggcaaggcccgacccgcccgcgaatgggccgccgagagtctgtttcggcccctggccgagcagcttcttccaccgctggcccgccgccgggtgaacccggtccgggttgtactcacccatactgcgctcggggtactggcgggtgcgctgctgcgccggggtcaccaccgcacacccgccgcgctcttgcaggtcaagacgctgctcgacaacctcgacgggcaactggcgcgcgcgaccggacagaccaccgagacaggccgctacctggactcggaaatggacgtggtggtgaacgctgccgtgctggtgggcctggccggacgctggggcctgccgctcaccctgctgcaaagtctgatcctgagtgtggactacctgtgggagcgcgatcaccgggccgcgcggggcgaggtcttccgtgatccacctgcgcagaccagagatgacccgcgcattctggctgccctgaggctggcctacaccctgtacttcacgccgcaggaacggctgctggaggcgctgttcgagcggcggctgcgggcggtgacgggcggaacacccacctccgccgaccgccgcgcctacaccccgcgcgccatcaatcaggtcgcggtgaatcttggtctcagcacgcagctcctcgcgctgggcggctgcctgcttctgcggcggccccgcatctacttgtggagcctccccgcccaagccctgctgctggccggggtacaggtgtggcgggaaggcagggtggtccgggggaggttggagaagggaagaagataa

SEQ ID NO: 20605 - protein, 264 aa, Deinococcus geothermalis DSM 11300
MTHGKARPAREWAAESLFRPLAEQLLPPLARRRVNPVRVVLTHTALGVLAGALLRRGHHRTPAALLQVKTLLDNLDGQLARATGQTTETGRYLDSEMDVVVNAAVLVGLAGRWGLPLTLLQSLILSVDYLWERDHRAARGEVFRDPPAQTRDDPRILAALRLAYTLYFTPQERLLEALFERRLRAVTGGTPTSADRRAYTPRAINQVAVNLGLSTQLLALGGCLLLRRPRIYLWSLPAQALLLAGVQVWREGRVVRGRLEKGRR

SEQ ID NO: 20606 - DNA, 900 bp, Anaeromyxobacter dehalogenans 2CP-C
  CDS (1)..(900): transl_table=11
gtgcgcccgtccggcgtctgccttgttccgggcgaggtgcgtacattcgtcggcgtgacccctcgcgcgctcgcggcgctgctccccctggtcggcctcgtcgccttcctcctcgggacgctgctcgcgttcgcggcgcgcgcggccctgttcggccgcccgcacacgccggacatcgagaagcgccagcacaccatcctcgcgaagttcttccaggagtggtggatctggctgtggggcccggtggagcggctgtgcgtccggctcgggatctcgccggacgccatcacgctcgcgagcacgctcgtcgccgccggcgcggcggtgctgctcgggttcgggtggctgtcgctgggcggctgggtgttcctgttcggcgcgagcttcgacttcatcgacgggcgggtggcgcgcgcgaccggccgcgtcacccgggccggcgcgttcctcgactccacgctcgaccgggtcggcgagctgctcgtgttcggcgggctggcggtcaccttccgcggctcggtggtgctgttcgccgcgctggccgccgcgggggcgtcgctgctcgtctcctacgcgcgggcgcgcggcgaggcgctcggcgccgacgaggccgcccgggtgggcgggatgcagcggcccgagcgcatcgtggtcaccggggtggcgtgcgcgctctcgccgctcgccgacgcggcctggggcgccggcgtcggccgggcggtcgtcggcagcgcgctcgccgcgctggcagccctggcgacggccacggcggcgcggcggacgttcgtgatctatcgtgccctgcggcgcgcggatccggccgtggcgccccggccgccgttccgcctcgccgacgtgttccgcctcgacgccacgcggcggcgcaaggcggcgcgctga

SEQ ID NO: 20607 - protein, 299 aa, Anaeromyxobacter dehalogenans 2CP-C
MRPSGVCLVPGEVRTFVGVTPRALAALLPLVGLVAFLLGTLLAFAARAALFGRPHTPDIEKRQHTILAKFFQEWWIWLWGPVERLCVRLGISPDAITLASTLVAAGAAVLLGFGWLSLGGWVFLFGASFDFIDGRVARATGRVTRAGAFLDSTLDRVGELLVFGGLAVTFRGSVVLFAALAAAGASLLVSYARARGEALGADEAARVGGMQRPERIVVTGVACALSPLADAAWGAGVGRAVVGSALAALAALATATAARRTFVIYRALRRADPAVAPRPPFRLADVFRLDATRRRKAAR

SEQ ID NO: 20608 - DNA, 645 bp, Chromohalobacter salexigens DSM 3043
  CDS (1)..(645): transl_table=11
atgttggataaatggacggggcgctgggtagccccagcactcaatcgcctggccggcgggttgggggagcgtggtgtcacgcctgctcagttgacgctgggcggtttcgcggcgggaatgctggcgttgccgttactggctggccagatgtacgggctcgccctggtggcgatcatcatcaatcgtctgtgcgatggcctggatggtgccctggcgcgacacctgcaacgacagagcgatgccggcgggtttctggatatcgcgctggatttcgtgttctacgcggccgtggtgctggggtttgccctggccgtccccgaacgcaatgccttgcccgcggcgctgttgctgttcgcgttcgtggggaccggctcgtcgtttctggctttcgcgattgccgcgactcgccacgggctggagcgtccgcgcttcgagcacaaggcgttctattatctggatggcttgaccgaggggaccgagacgattctcgctttcgtggtgttctgtctgtggccggaggagtttgcactcctggcgaccctgtttgccgtggcctgtctggtgacgactgccacgcgcgtcgcgggagggtaccgggccctgctggcggccgagcgctcgtcatccgatcggcaggagggatga

SEQ ID NO: 20609 - protein, 214 aa, Chromohalobacter salexigens DSM 3043
MLDKWTGRWVAPALNRLAGGLGERGVTPAQLTLGGFAAGMLALPLLAGQMYGLALVAIIINRLCDGLDGALARHLQRQSDAGGFLDIALDFVFYAAVVLGFALAVPERNALPAALLLFAFVGTGSSFLAFAIAATRHGLERPRFEHKAFYYLDGLTEGTETILAFVVFCLWPEEFALLATLFAVACLVTTATRVAGGYRALLAAERSSSDRQEG

SEQ ID NO: 20610 - DNA, 663 bp, Solibacter usitatus Ellin6076
  CDS (1)..(663): transl_table=11
atgaccttcacgcgcgggatcggcttattctttggagcgatcatcaatcggatcgtgcgctggctcgcattgtcgaagatccacccgaacgtgctgacgttcctcggactgctgatcaatatctgggcggcctggctcttcgcgcaagggaatttccgttgggccggcgtcgtggttacaggcgcggcgatcttcgatatggtggatggccgggtggcgcgcgccaccagccaggtcacgcggttcggcggcttcttcgattcggtggtggaccggtattcggacctcgcgctgtatatcggattactagtgtattacgccagcataaaccggttcttttacatcgtgctcacggcgattgtgatgaccgggtcggtgatgatcagttacacgcgggcgcgggcggagaatgccatccccaagtgcaaggtcggctttctggagcggccggagcgcgtggtgctgattattcttggcgcgctggcggcctggattccgggcgtcggcgaccgcatggcggcggtgctgtgggtgatcgcggtactctccaatgtgaccgtgatccaccgcatgatgtacacgtaccagcaggcgaaattgctggaagacgcgcaactgcgcgcggtgccggagaacaaggaagagcgcgcgcggcggagctag

SEQ ID NO: 20611 - protein, 220 aa, Solibacter usitatus Ellin6076
MTFTRGIGLFFGAIINRIVRWLALSKIHPNVLTFLGLLINIWAAWLFAQGNFRWAGVVVTGAAIFDMVDGRVARATSQVTRFGGFFDSVVDRYSDLALYIGLLVYYASINRFFYIVLTAIVMTGSVMISYTRARAENAIPKCKVGFLERPERVVLIILGALAAWIPGVGDRMAAVLWVIAVLSNVTVIHRMMYTYQQAKLLEDAQLRAVPENKEERARRS

SEQ ID NO: 20612 - DNA, 582 bp, Exiguobacterium sp. 255-15
  CDS (1)..(582): transl_table=11
atgttagatacacgcgcgagaagagtcgtccagcccctttttgagcagatggcgaccttattaaagaagatggggctttccgccaaccaggtcaccatcatttccggcatcatcggtgcctcgaccggtttctttgtgtataacgatatgacgggaattgcaattttattattatggctgtccggagcactcgatgtcgtcgatggaacgatggcacgccgggaaaaaacgacaccgatcgggacgattctcgatttagtgctcgaccggattgtggaattatccgttttgatcggaattgccttacgttttccggagacgcaagtcgtcattttattactcgtcgcctcattcgtgattggtatgacgatgtttcttgcgattggagcggtcagcgaaaattatggatttaagtcattccagtatcaaccgggcctcgtcgaacggacggaaggattcctttttctgactgcgatgttactgtttccaagcgccatcatctggattgcgatcctctttttgattgctgaattgtatacggtcggcgagcggttttatcaagcttcgaaggtgttgcgatga

SEQ ID NO: 20613 - protein, 193 aa, Exiguobacterium sp. 255-15
MLDTRARRVVQPLFEQMATLLKKMGLSANQVTIISGIIGASTGFFVYNDMTGIAILLLWLSGALDVVDGTMARREKTTPIGTILDLVLDRIVELSVLIGIALRFPETQVVILLLVASFVIGMTMFLAIGAVSENYGFKSFQYQPGLVERTEGFLFLTAMLLFPSAIIWIAILFLIAELYTVGERFYQASKVLR

SEQ ID NO: 20614 - DNA, 777 bp, Ehrlichia chaffeensis str. Sapulpa
  CDS (1)..(777): transl_table=11
atgaaagaggagcagagtagcaaattttttcctattactaggttatttcctaatatagtaaccctattaggtttatgtgctggcctgacttctataaaatttacttttattggtaaatgggaatctgctgtaatgttcatcattatagcagcactcatagatggaatggatggtagaattgctagatttctcaattctacaagcggcttcggtgctcagcttgattcttttgcagattttttaaattttggagttgctccagcatttttattgtatttttggtctcttaagcaaataaaagtcataggatggatgctagtaatgatgttcgtcatttgcatgtcaatcagacttgcaagattcaatgtgtccttatatgaagaaaaaaaattagattggcacaaatttttcttcgtaggagtacctgctccattaggagcagtactgtcattaattccaataatgttgaccttttactaccatgataatcattggttagttacaaatttatctgatcaaaataatgtagcaatatactttgccgttattgcatttttattagttagcaacattcctacattttctgcaaaacatatttatataccaaaaaatctatcttatatatttattctactgtttggcatattcattgtatttgcaataacaaaaccatggattacatttccagttgttggaatgatgtatatattatcaattcctataagtagcatggtatacatatacattatgtgcaaaactaaaggtaaaataatctag

SEQ ID NO: 20615 - protein, 258 aa, Ehrlichia chaffeensis str. Sapulpa
MKEEQSSKFFPITRLFPNIVTLLGLCAGLTSIKFTFIGKWESAVMFIIIAALIDGMDGRIARFLNSTSGFGAQLDSFADFLNFGVAPAFLLYFWSLKQIKVIGWMLVMMFVICMSIRLARFNVSLYEEKKLDWHKFFFVGVPAPLGAVLSLIPIMLTFYYHDNHWLVTNLSDQNNVAIYFAVIAFLLVSNIPTFSAKHIYIPKNLSYIFILLFGIFIVFAITKPWITFPVVGMMYILSIPISSMVYIYIMCKTKGKII

SEQ ID NO: 20616 - DNA, 612 bp, Jannaschia sp. CCS1
  CDS (1)..(612): transl_table=11
atgattgatgcccgccttttgccccttcaacgcgccctgatggagccgcccgcccgatggctggcggcctgtggcgtgcgggcggatcagatcacgctggtcgggtgtgggatcgggcttctggctgctttggcggcagcactggggctgtattggctggctcttgcgggccttgccctgaaccgtctcgccgatgggttggacggtgccgtcgcacggctgacgacccctaccgatcgcggggccttcctcgatatcgcgttggatttcgtcttctacgcagttttccccatcggcttcatcttcgccgatccggcctccaacggattgcccggtgcagtcctgatcgcgagcttcgtgttgacgggcacgtcgtttctcgccttttccatcatcgcggagcggcgcggtttgctggccgagaactacccgaccaagggcatctactacctgggcggcctggcggagggggctgagaccatcgccgtcttcgctgccttgtgcctgtttccggacgccttcccgtggatcgcttgggcgtttgcagcgatctgcatcgtgacaggcgccacgcgctacatggccggatggcaggctttcgggaaaaactaa

SEQ ID NO: 20617 - protein, 203 aa, Jannaschia sp. CCS1
MIDARLLPLQRALMEPPARWLAACGVRADQITLVGCGIGLLAALAAALGLYWLALAGLALNRLADGLDGAVARLTTPTDRGAFLDIALDFVFYAVFPIGFIFADPASNGLPGAVLIASFVLTGTSFLAFSIIAERRGLLAENYPTKGIYYLGGLAEGAETIAVFAALCLFPDAFPWIAWAFAAICIVTGATRYMAGWQAFGKN

SEQ ID NO: 20618 - DNA, 603 bp, Sphingopyxis alaskensis RB2256
  CDS (1)..(603): transl_table=11
atgttcgatgcccgacttcgccctctgatcgacccgccgctcaatgcagcggggcgccggctcgccgcttggggcatcggcgccgatgccgtgacgttcgccggcatgtttgcgggactcgcggccgcggctgccatcgcgaacggcctttatgcagcaggcctcgtgctaattctggtcaatcgcctgctcgacggtctagacggcgcggtcgcacgcgcgacagggatgagcgattttggcggctatctcgatatcgttgccgatttcgtcttctatgtggcggtcccggtcggttttgcggtggcggcgccgggcgacagctttgctgccttgctgctggtcgccgccttcgcgctcaccggtacaagtttccttgcctatgcgaccctcgcggcgaaacgtggcatcgagaccgcggcgcatggccgtaagagcttcttttacagcaccggcctcgccgagggggccgagacgatcgtgtgcttcgcgctgatgtgcctcatgccgcagcactttgccccgatcgccgcaatatacaccgcgctttgccttgtcactgtcgtgcagcgatcggtgatggcttggcgcatgtttcgatag

SEQ ID NO: 20619 - protein, 200 aa, Sphingopyxis alaskensis RB2256
MFDARLRPLIDPPLNAAGRRLAAWGIGADAVTFAGMFAGLAAAAAIANGLYAAGLVLILVNRLLDGLDGAVARATGMSDFGGYLDIVADFVFYVAVPVGFAVAAPGDSFAALLLVAAFALTGTSFLAYATLAAKRGIETAAHGRKSFFYSTGLAEGAETIVCFALMCLMPQHFAPIAAIYTALCLVTVVQRSVMAWRMFR

SEQ ID NO: 20620 - DNA, 561 bp, Mesorhizobium sp. BNC1
  CDS (1)..(561): transl_table=11
atgcttgcggagcggttggtcaaggctggcatctcgtctgatacggtcactatcgctggtttcctcctcggacttatggcaggtgccgccatcattgcaggctggttcctagcggcaattatcttgatcctcttgagccgccttgcggacggcctggacggggccgtggcgcgcctcaccaacagttccgattttggcggctatcttgatatcgtgctcgacttcgccttctacggagtaatcccgctcgctttcgtgcttcacaatccggtcgacaatggccttgccggcgccgtgctgcttttttcgttctacgtgaatggcgcgagttttctggcctatgccgtgatcgcggaaaagcgccgtctggcgacgacgattcgtggagaaaagagcttcttcttcacgacggggctggcggaagcaggcgaaaccttgatcatattcctgctcttctgccttttccctgactggtttgcgacgctcgcctatctgtttgccgcgctcacgctctacaccgctatctcgcggattgttctggcggcaggagtcttccgctga

SEQ ID NO: 20621 - protein, 186 aa, Mesorhizobium sp. BNC1
MLAERLVKAGISSDTVTIAGFLLGLMAGAAIIAGWFLAAIILILLSRLADGLDGAVARLTNSSDFGGYLDIVLDFAFYGVIPLAFVLHNPVDNGLAGAVLLFSFYVNGASFLAYAVIAEKRRLATTIRGEKSFFFTTGLAEAGETLIIFLLFCLFPDWFATLAYLFAALTLYTAISRIVLAAGVFR

SEQ ID NO: 20622 - DNA, 609 bp, Silicibacter sp. TM1040
  CDS (1)..(609): transl_table=11
atgtttgatgccaagatccgccccctcatcgacccgtttctgaatgcgcagggcgcccggcttgccgcgcgcggcgtcacggccaatcaggtcacccttgccgggcttggtcttgggcttgcgtcagccgggctgatcgcaattggcctgacctgttgggcgctggcattcctgttggcgtcgcggatggcggatgggctggatggagccgtggcccgtcagcacgccccaagtgattttggtggctacctcgatattgtctgtgattttgtattctacggcgctgtaccgcttggatttgtggcgcttgcccccgaagcaaacggattggccggggcgttcctgttgtgcagcttttacgccaatggagcgagtttcctgggctatgcggtgctggcagaaaaacgcgaaatgaagacttctgcgcgcggggtgaaaacgctctacttcaccggggggctccttgagggtgcagaaaccatcggcttttttgtggttctgtgtctctggcccgacgggtttgcgccactggcctatgtgtttggaaccctgtgttttgcgacggctgcatcgcgggtcgtattggccgcaaaggtgttctcggcctga

SEQ ID NO: 20623 - protein, 202 aa, Silicibacter sp. TM1040
MFDAKIRPLIDPFLNAQGARLAARGVTANQVTLAGLGLGLASAGLIAIGLTCWALAFLLASRMADGLDGAVARQHAPSDFGGYLDIVCDFVFYGAVPLGFVALAPEANGLAGAFLLCSFYANGASFLGYAVLAEKREMKTSARGVKTLYFTGGLLEGAETIGFFVVLCLWPDGFAPLAYVFGTLCFATAASRVVLAAKVFSA

SEQ ID NO: 20624 - DNA, 666 bp, Shewanella frigidimarina NCIMB 400
  CDS (1)..(666): transl_table=11
atgctagatagatttatcaccccagtaataaagccactgttagcgcccgttgtgctgctactagacaaaaagaatgtccatcccgatcagctcaccttagtcggtttcggtttcggcatgttggcagtaccgttactggcattacaactttggtatggcgcgttgttttttattgcactgaatcggattgttgacggactcgatggcgcccttgctcgccatcaaaaacacaccagtgctgcgggtggctatttagatatttgtgtcgactttctgttttatgcggccattccgctcgggttcgccttagccaaccctactgaaaacgccttagccgcggcagtgttgttaaccgtgtttatcggcactggctcaagctttttggcctttgccataccggccgaaaagctacatttacctcgaccacaatttgccaataagagcttttattttttaaacggcctaaccgaaggcaccgaaaccatcgcctttttcgtcgcattttgtttgtggccggcttatttcccagagcttgcctatagctttgcttttttaggcgcgattactatcttcacccgtatacacggcggctatcacactctgaaaaatcataccttgaaaaaaaacacttcagttaatccatctcaacgaggtaaatcaacatga

SEQ ID NO: 20625 - protein, 221 aa, Shewanella frigidimarina NCIMB 400
MLDRFITPVIKPLLAPVVLLLDKKNVHPDQLTLVGFGFGMLAVPLLALQLWYGALFFIALNRIVDGLDGALARHQKHTSAAGGYLDICVDFLFYAAIPLGFALANPTENALAAAVLLTVFIGTGSSFLAFAIPAEKLHLPRPQFANKSFYFLNGLTEGTETIAFFVAFCLWPAYFPELAYSFAFLGAITIFTRIHGGYHTLKNHTLKKNTSVNPSQRGKST

SEQ ID NO: 20626 - DNA, 660 bp, Psychrobacter cryohalolentis K5
  CDS (1)..(660): transl_table=11
atgctcgataagtttattacccccatcatcaagcctctattagagccattggtcgtactattttataagggtggtattaccgcaaatcagttgactgtcactggttttctcattggtatgttggcgttgccattgattgcttttgagctgtggaatgcagcactaattgctattatattgaaccgtgtttttgatggattagatggtgcactggcacgttatgctggccaaagctcaagtgcgggcggctatttagacattaccctagattttttattctatgcagcggtgccactcggctttgtattggttaatcccgagcaaaacgctattgtaggcgcattgttattagccgcctttattggcactggctctagctttttggcctttgctattgcagctgaaaaattccaattagataagccgcaatttaaatataagagcttttattatctaaatggtctcactgagggtactgaaaccattgttttatttatcgccttttgtatttggccacagcactttgtggtattagcaagtatttttgcagcggcctgtgcggttactattatgactcgtatatatggcggttatcatacgcttaaacggctcgaaaccgatatacataagcccattaaggaggtcagtaatggcgaatga

SEQ ID NO: 20627 - protein, 219 aa, Psychrobacter cryohalolentis K5
MLDKFITPIIKPLLEPLVVLFYKGGITANQLTVTGFLIGMLALPLIAFELWNAALIAIILNRVFDGLDGALARYAGQSSSAGGYLDITLDFLFYAAVPLGFVLVNPEQNAIVGALLLAAFIGTGSSFLAFAIAAEKFQLDKPQFKYKSFYYLNGLTEGTETIVLFIAFCIWPQHFVVLASIFAAACAVTIMTRIYGGYHTLKRLETDIHKPIKEVSNGE

SEQ ID NO: 20628 - DNA, 648 bp, Nocardioides sp. JS614
  CDS (1)..(648): transl_table=11
atgcttgacgctcgggtccgtcgcgtcatcgcgccgagcctcgacacgatcgcggccggtctcgaccgagccggcgtcaagccgatgtggctcaccgtcgggggcctcggcgcagggctgggcgcgtgtgctgcggtggcgacgggccagtggagcgtcggcctggtgttgtggctggtcaacagggtgttggacggcttggacggccccgtcgcccggaggaacggggccaccgagctcggcggcttcctggacatcgtcttcgacttcacggtgtacggcggcttcgtggtggcggtcgctgtcgcggtcccggaagcgcgctttgcggcactgagcctgatgctggcctactacatctcggggaccgccctgctgtcgttgtcctcgctgttggagaagcgtcgcatcgacgcaggccacgacggccgctcgatcaggttcaccggaggcttggccgaaggcaccgagaccgttctcgtctacgtgctcatcgcgctgctacccggtcgcgccgagaccgtgctctggatcttcaccatcgtggtcaccctcaccgccgtgcagcgcatcgcctcgggcatccggctcctcacgctgacggagagcacggcgccggcccctgctggcgtcccatcccaccgctga

SEQ ID NO: 20629 - protein, 215 aa, Nocardioides sp. JS614
MLDARVRRVIAPSLDTIAAGLDRAGVKPMWLTVGGLGAGLGACAAVATGQWSVGLVLWLVNRVLDGLDGPVARRNGATELGGFLDIVFDFTVYGGFVVAVAVAVPEARFAALSLMLAYYISGTALLSLSSLLEKRRIDAGHDGRSIRFTGGLAEGTETVLVYVLIALLPGRAETVLWIFTIVVTLTAVQRIASGIRLLTLTESTAPAPAGVPSHR

SEQ ID NO: 20630 - DNA, 732 bp, uncultured archaeon GZfos19C7
  CDS (1)..(732)
atggattccgataaacttgaggtttttgacatcggcagcaggttttggtgcgatatagatacgccagatagtttagaatatgcgaagagaaagacgcttgattcgctcacaaaaccaactgatggagtagtttcgaaatgcattaacagaaggatttcaaaaaaggtatcggaaagattggtgaatacgaatcttacaccaactcaaataaccattatatctttcctcatggctttggcttccgccgctttcttcttcctcggtgagtataagtatctcgtcattggcgggatattagcacaagcttcttcgattattgatggatgtgatggagaggtagcgagattgaagtttttaattaccgattacggtgcttttgttgactccattctggatagatatgcagacgcaataattattttaggattgatttttggttattggaggttgaaagtaggtatatcagtgtggacaattggtttgtttgcagttcttggctcatttatgataagttatacaaatgcgaggtatgaaggagtgtttgaaaaacccggtggaggtagagggataccagtaagaagagatatgcggttgtttataataatggtaggagcatttctgaaccaggtgttagctctgctgctgttattggcaatacttacgaatgtagaggtggtgaggcgggttctctcgattaaaagtagtattacgaaaaagactgataaaaagtag

SEQ ID NO: 20631 - protein, 243 aa, uncultured archaeon GZfos19C7
MDSDKLEVFDIGSRFWCDIDTPDSLEYAKRKTLDSLTKPTDGVVSKCINRRISKKVSERLVNTNLTPTQITIISFLMALASAAFFFLGEYKYLVIGGILAQASSIIDGCDGEVARLKFLITDYGAFVDSILDRYADAIIILGLIFGYWRLKVGISVWTIGLFAVLGSFMISYTNARYEGVFEKPGGGRGIPVRRDMRLFIIMVGAFLNQVLALLLLLAILTNVEVVRRVLSIKSSITKKTDKK

SEQ ID NO: 20632 - DNA, 591 bp, Aquifex aeolicus
  CDS (1)..(591): transl_table=11
atgagtctgctcacgagaaggttaaaaccctactacgaagaactcttggaaccccttgtaaacttcttcggaaagtacaacgtgagtccaaatctaatcacacttttcggtcttttcctggtaggactcggttccttctttctgtacttagaaaacctaatcctcgcctttctgctacttctcctcggtgctttggcagacagtatagacggggctctggcgaggaggctaaatctcaaaacagagttcggggcgtttctcgactcaaccgttgacaggttctctgacgctctgcccttcaccgctctcggtgttcactacgcatcctacggggatgagacaggagttttgctttcttttttggctcttattagttcgttcggtgtgagctacacaagggcgagggcagaaagcctcggtgtttacggtcttgggggagtttttgagagaacggaaaggtggatagttctcttgggaagtatactcctgggactgttaaaactgggactttttatcattacacttggttctttgataaccgtttttcaaagggtttacgaaacgaagaaagctctggaggttaagagatga

SEQ ID NO: 20633 - protein, 196 aa, Aquifex aeolicus
MSLLTRRLKPYYEELLEPLVNFFGKYNVSPNLITLFGLFLVGLGSFFLYLENLILAFLLLLLGALADSIDGALARRLNLKTEFGAFLDSTVDRFSDALPFTALGVHYASYGDETGVLLSFLALISSFGVSYTRARAESLGVYGLGGVFERTERWIVLLGSILLGLLKLGLFIITLGSLITVFQRVYETKKALEVKR

SEQ ID NO: 20634 - DNA, 567 bp, Pyrococcus horikoshii
  CDS (1)..(567): transl_table=11
atgctgagcaagataaggccgaaggtaaagcaacccctggaaagaattgggaaaactctggcttcactggggataacccctaaccaattaaccattataggtttcttgataaccctcctagcttcctacgaattttaccttcaaaatcaaatcttagctggaataatactagcggttggggcttttctagatgctttagacggagcactagccagggccactgggaaggtttcaaagtttggtggcttcctggattcaacgattgacaggcttagcgatgcctcgatattatttggaatagccctgggtggattggtcaggtgggatgtaactttcttaactttaatcggctcgtacatggttagctactcaaggtgcagagcggaactcgccggttcaggaacgttagccatcggaattgccgaaaggggtgagaggataataataatattcatagcatccctattcaatgccgttaaaattggagtatacctggtagctatactatcctggataacgttcatacagagggtatatgaggcaaagaaaagattggaaatgggatga

SEQ ID NO: 20635 - protein, 188 aa, Pyrococcus horikoshii
MLSKIRPKVKQPLERIGKTLASLGITPNQLTIIGFLITLLASYEFYLQNQILAGIILAVGAFLDALDGALARATGKVSKFGGFLDSTIDRLSDASILFGIALGGLVRWDVTFLTLIGSYMVSYSRCRAELAGSGTLAIGIAERGERIIIIFIASLFNAVKIGVYLVAILSWITFIQRVYEAKKRLEMG

SEQ ID NO: 20636 - DNA, 22 bp, Artificial sequence
  Primer sequence
atgcctgtgctagaccgccatc

SEQ ID NO: 20637 - DNA, 22 bp, Artificial sequence
  Primer sequence
ttactgacgctggagcgacttc

SEQ ID NO: 20638 - protein, 219 aa, Artificial sequence
  Consensus
  Variant (2)..(5): Xaa in position 2 to 5 is any amino acid
  Variant (9)..(14): Xaa in position 9 to 14 is any amino acid
  Variant (16)..(16): Xaa in position 16 is any amino acid
  Variant (18)..(27): Xaa in position 18 to 27 is any amino acid
  Variant (28)..(31): Xaa in position 28 to 31 is any or no amino acid
  Variant (33)..(35): Xaa in position 33 to 35 is any amino acid
  Variant (37)..(37): Xaa in position 37 is any amino acid
  Variant (39)..(42): Xaa in position 39 to 42 is any amino acid
  Variant (44)..(44): Xaa in position 44 is any amino acid
  Variant (48)..(48): Xaa in position 48 is any amino acid
  Variant (52)..(55): Xaa in position 52 to 55 is any amino acid
  Variant (56)..(58): Xaa in position 56 to 58 is any or no amino acid
  Variant (60)..(61): Xaa in position 60 to 61 is any amino acid
  Variant (63)..(64): Xaa in position 63 to 64 is any amino acid
  Variant (67)..(69): Xaa in position 67 to 69 is any amino acid
  Variant (71)..(79): Xaa in position 71 to 79 is any amino acid
  Variant (81)..(90): Xaa in position 81 to 90 is any amino acid
  Variant (91)..(102): Xaa in position 91 to 102 is any or no amino acid
  Variant (104)..(127): Xaa in position 104 to 127 is any amino acid
  Variant (128)..(161): Xaa in position 128 to 161 is any or no amino acid
  Variant (163)..(163): Xaa in position 163 is any amino acid
  Variant (165)..(166): Xaa in position 165 to 166 is any amino acid
  Variant (168)..(194): Xaa in position 168 to 194 is any amino acid
  Variant (195)..(214): Xaa in position 195 to 214 is any or no amino acid
  Variant (216)..(218): Xaa in position 216 to 218 is any amino acid
VXXXXVTLXXXXXXLXAXXXXXXXXXXXXXXAXXXIXLXXXXDXLDGXLARXXXXXXXTXXGXXLDXXXDXXXXXXXXXGXXXXXXXXXXXXXXXXXXXXXXLXXXXXXXXXXXXXXXXXXXXXXXXXXXXXXXXXXXXXXXXXXXXXXXXXXXXXXXXXXLXEXXEXXXXXXXXXXXXXXXXXXXXXXXXXXXXXXXXXXXXXXXXXXXXXXXTXXXR

SEQ ID NO: 20639 - protein, 9 aa, Artificial sequence
  Consensus
  Variant (2)..(2): Xaa in position 2 is Ala, Gly, Asn, Ser, Thr or Val
  Variant (3)..(3): Xaa in position 3 is any amino acid
  Variant (6)..(6): Xaa in position 6 is any amino acid
  Variant (7)..(7): Xaa in position 7 is Ile, Leu, Met or Val
DXXDGXXAR

SEQ ID NO: 20640 - protein, 9 aa, Artificial sequence
  Consensus
  Variant (2)..(2): Xaa in position 2 is Ala, Gly or Thr
  Variant (3)..(3): Xaa in position 3 is any amino acid
  Variant (6)..(8): Xaa in position 6 to 8 is any amino acid
GXXLDXXXD

SEQ ID NO: 20641 - DNA, 705 bp, Escherichia coli
  CDS (1)..(705)
atgtttttagcatcattgttgagacgtattgcatttagttactacgattataaagcttataatttcaatattgaaaaaacagactttgttgtcatccatattcccgatcagattggcgatgctatggccatctttcctgttattcgggcgcttgaattgcataaaattaagcatcttttaattgtaacgtcgacaattaatttagaagtctttaatgcgcttaaacttgaacagactaaattaacattagtcacaatgactatgcaggatcacgcaacattaaaagaaataaaagatttagcaaagaacataacacagcaatacggtacgccggatctttgcattgaggggatgcgtaaaaagaacctgaaaacgatgttatttatcagtcagttgaaagcaaaaacgaattttcaggttgttggtataaccatgaattgcttctcccctttgtgcaagaacgcgtccagtatggatcagaaactccgggctcccgtacctatgacatgggcatttatgatgcgtgaggcgggttttccagcagtcaggccaatatatgaattgccactaagtgaggatgtactcgatgaggtgcgcgaggaaatgcgatcgttaggatcttacattgcgttcaatttagaaggtagctcgcaggaacgtacattttcattatcgattgcagaaaatctaatagcaaaaatttaa

SEQ ID NO: 20642 - protein, 234 aa, Escherichia coli
MFLASLLRRIAFSYYDYKAYNFNIEKTDFVVIHIPDQIGDAMAIFPVIRALELHKIKHLLIVTSTINLEVFNALKLEQTKLTLVTMTMQDHATLKEIKDLAKNITQQYGTPDLCIEGMRKKNLKTMLFISQLKAKTNFQVVGITMNCFSPLCKNASSMDQKLRAPVPMTWAFMMREAGFPAVRPIYELPLSEDVLDEVREEMRSLGSYIAFNLEGSSQERTFSLSIAENLIAKI

SEQ ID NO: 20643 - DNA, 26 bp, Artificial sequence
  Primer sequence
atgtttttagcatcattgttgagacg

SEQ ID NO: 20644 - DNA, 28 bp, Artificial sequence
  Primer sequence
ttaaatttttgctattagattttctgca

SEQ ID NO: 20645 - DNA, 785 bp, Escherichia coli K12; identical to SEQ ID NO: 3693
  CDS (86)..(781)

SEQ ID NO: 20646 - protein, 231 aa, Escherichia coli K12; identical to SEQ ID NO: 3694

SEQ ID NO: 20647 - DNA, 1005 bp, Nostoc sp. PCC 7120; identical to SEQ ID NO: 3695
  CDS (1)..(1005)

SEQ ID NO: 20648 - protein, 334 aa, Nostoc sp. PCC 7120; identical to SEQ ID NO: 3696

SEQ ID NO: 20649 - DNA, 642 bp, Salmonella enterica subsp. enterica serovar Typhi; identical to SEQ ID NO: 3697
  CDS (1)..(642)

SEQ ID NO: 20650 - protein, 213 aa, Salmonella enterica subsp. enterica serovar Typhi; identical to SEQ ID NO: 3698

SEQ ID NO: 20651 - DNA, 942 bp, Nostoc sp. PCC 7120; identical to SEQ ID NO: 3699
  CDS (1)..(942)

SEQ ID NO: 20652 - protein, 313 aa, Nostoc sp. PCC 7120; identical to SEQ ID NO: 3700

SEQ ID NO: 20653 - DNA, 642 bp, Yersinia pestis; identical to SEQ ID NO: 3701
  CDS (1)..(642)

SEQ ID NO: 20654 - protein, 213 aa, Yersinia pestis; identical to SEQ ID NO: 3702

SEQ ID NO: 20655 - DNA, 1668 bp, Thermotoga maritima; identical to SEQ ID NO: 3703
  CDS (1)..(1668)

SEQ ID NO: 20656 - protein, 555 aa, Thermotoga maritima; identical to SEQ ID NO: 3704

SEQ ID NO: 20657 - DNA, 2056 bp, Arabidopsis thaliana (mouse-ear cress); identical to SEQ ID NO: 3705
  CDS (1)..(2025)

SEQ ID NO: 20658 - protein, 674 aa, Arabidopsis thaliana (mouse-ear cress); identical to SEQ ID NO: 3706

SEQ ID NO: 20659 - DNA, 624 bp, Staphylococcus aureus; identical to SEQ ID NO: 3707
  CDS (1)..(624)

SEQ ID NO: 20660 - protein, 207 aa, Staphylococcus aureus; identical to SEQ ID NO: 3708

SEQ ID NO: 20661 - DNA, 639 bp, Streptococcus pneumoniae; identical to SEQ ID NO: 3709
  CDS (1)..(639)

SEQ ID NO: 20662 - protein, 212 aa, Streptococcus pneumoniae; identical to SEQ ID NO: 3710

SEQ ID NO: 20663 - DNA, 642 bp, Mycoplasma genitalium; identical to SEQ ID NO: 3711
  CDS (1)..(642): transl_table=4

SEQ ID NO: 20664 - protein, 213 aa, Mycoplasma genitalium; identical to SEQ ID NO: 3712

SEQ ID NO: 20665 - DNA, 636 bp, Bacillus halodurans; identical to SEQ ID NO: 3713
  CDS (1)..(636)

SEQ ID NO: 20666 - protein, 211 aa, Bacillus halodurans; identical to SEQ ID NO: 3714

SEQ ID NO: 20667 - DNA, 1668 bp, Treponema pallidum subsp. pallidum (syphilis spirochete); identical to SEQ ID NO: 3715
  CDS (1)..(1668)

SEQ ID NO: 20668 - protein, 555 aa, Treponema pallidum subsp. pallidum (syphilis spirochete); identical to SEQ ID NO: 3716

SEQ ID NO: 20669 - DNA, 669 bp, Chlamydophila pneumoniae, Chlamydia pneumoniae; identical to SEQ ID NO: 3717
  CDS (1)..(669)

SEQ ID NO: 20670 - protein, 222 aa, Chlamydophila pneumoniae, Chlamydia pneumoniae; identical to SEQ ID NO: 3718

SEQ ID NO: 20671 - DNA, 621 bp, Lactococcus lactis subsp. lactis; identical to SEQ ID NO: 3719
  CDS (1)..(621)

SEQ ID NO: 20672 - protein, 206 aa, Lactococcus lactis subsp. lactis; identical to SEQ ID NO: 3720

SEQ ID NO: 20673 - DNA, 633 bp, Deinococcus radiodurans; identical to SEQ ID NO: 3721
  CDS (1)..(633)

SEQ ID NO: 20674 - protein, 210 aa, Deinococcus radiodurans; identical to SEQ ID NO: 3722

SEQ ID NO: 20675 - DNA, 1932 bp, Arabidopsis thaliana (mouse-ear cress); identical to SEQ ID NO: 3723
  CDS (1)..(1932)

SEQ ID NO: 20676 - protein, 643 aa, Arabidopsis thaliana (mouse-ear cress); identical to SEQ ID NO: 3724

SEQ ID NO: 20677 - DNA, 636 bp, Bacillus subtilis; identical to SEQ ID NO: 3725
  CDS (1)..(636)

SEQ ID NO: 20678 - protein, 211 aa, Bacillus subtilis; identical to SEQ ID NO: 3726

SEQ ID NO: 20679 - DNA, 624 bp, Borrelia burgdorferi (Lyme disease spirochete); identical to SEQ ID NO: 3727
  CDS (1)..(624)

SEQ ID NO: 20680 - protein, 207 aa, Borrelia burgdorferi (Lyme disease spirochete); identical to SEQ ID NO: 3728

SEQ ID NO: 20681 - DNA, 624 bp, Ureaplasma urealyticum; identical to SEQ ID NO: 3729
  CDS (1)..(624): transl_table=4

SEQ ID NO: 20682 - protein, 207 aa, Ureaplasma urealyticum; identical to SEQ ID NO: 3730

SEQ ID NO: 20683 - DNA, 642 bp, Haemophilus influenzae; identical to SEQ ID NO: 3731
  CDS (1)..(642)

SEQ ID NO: 20684 - protein, 213 aa, Haemophilus influenzae; identical to SEQ ID NO: 3732

SEQ ID NO: 20685 - DNA, 1470 bp, Spinacia oleracea (spinach); identical to SEQ ID NO: 3733
  CDS (49)..(1257)

SEQ ID NO: 20686 - protein, 402 aa, Spinacia oleracea (spinach); identical to SEQ ID NO: 3734

SEQ ID NO: 20687 - DNA, 1533 bp, Triticum sp. (wheat); identical to SEQ ID NO: 3735
  CDS (65)..(1279)

SEQ ID NO: 20688 - protein, 404 aa, Triticum sp. (wheat); identical to SEQ ID NO: 3736

SEQ ID NO: 20689 - DNA, 1240 bp, Arabidopsis thaliana (mouse-ear cress); identical to SEQ ID NO: 3737
  CDS (1)..(1188)

SEQ ID NO: 20690 - protein, 395 aa, Arabidopsis thaliana (mouse-ear cress); identical to SEQ ID NO: 3738

SEQ ID NO: 20691 - DNA, 2077 bp, Saccharomyces cerevisiae; identical to SEQ ID NO: 3739
  CDS (482)..(1987)

SEQ ID NO: 20692 - protein, 501 aa, Saccharomyces cerevisiae; identical to SEQ ID NO: 3740

SEQ ID NO: 20693 - DNA, 642 bp, Mycoplasma pneumoniae; identical to SEQ ID NO: 3741
  CDS (1)..(642): transl_table=4

SEQ ID NO: 20694 - protein, 213 aa, Mycoplasma pneumoniae; identical to SEQ ID NO: 3742

SEQ ID NO: 20695 - DNA, 1245 bp, Chlamydomonas reinhardtii; identical to SEQ ID NO: 3743
  CDS (28)..(1155)

SEQ ID NO: 20696 - protein, 375 aa, Chlamydomonas reinhardtii; identical to SEQ ID NO: 3744

SEQ ID NO: 20697 - DNA, 1520 bp, Mesembryanthemum crystallinum (common ice plant); identical to SEQ ID NO: 3745
  CDS (127)..(1320)

SEQ ID NO: 20698 - protein, 397 aa, Mesembryanthemum crystallinum (common ice plant); identical to SEQ ID NO: 3746

SEQ ID NO: 20699 - DNA, 690 bp, Caenorhabditis elegans; identical to SEQ ID NO: 3747
  CDS (1)..(690)

SEQ ID NO: 20700 - protein, 229 aa, Caenorhabditis elegans; identical to SEQ ID NO: 3748

SEQ ID NO: 20701 - DNA, 1668 bp, Caenorhabditis elegans; identical to SEQ ID NO: 3749
  CDS (1)..(1668)

SEQ ID NO: 20702 - protein, 555 aa, Caenorhabditis elegans; identical to SEQ ID NO: 3750

SEQ ID NO: 20703 - DNA, 1365 bp, Schizosaccharomyces pombe; identical to SEQ ID NO: 3751
  CDS (1)..(1365)

SEQ ID NO: 20704 - protein, 454 aa, Schizosaccharomyces pombe; identical to SEQ ID NO: 3752

SEQ ID NO: 20705 - DNA, 1647 bp, Homo sapiens; identical to SEQ ID NO: 3753
  CDS (1)..(1647)

SEQ ID NO: 20706 - protein, 548 aa, Homo sapiens; identical to SEQ ID NO: 3754

SEQ ID NO: 20707 - DNA, 738 bp, Debaryomyces hansenii; identical to SEQ ID NO: 3755
  CDS (1)..(738)

SEQ ID NO: 20708 - protein, 245 aa, Debaryomyces hansenii; identical to SEQ ID NO: 3756

SEQ ID NO: 20709 - DNA, 1521 bp, Debaryomyces hansenii; identical to SEQ ID NO: 3757
  CDS (1)..(1521)

SEQ ID NO: 20710 - protein, 506 aa, Debaryomyces hansenii; identical to SEQ ID NO: 3758

SEQ ID NO: 20711 - DNA, 1353 bp, Yarrowia lipolytica; identical to SEQ ID NO: 3759
  CDS (1)..(1353)

SEQ ID NO: 20712 - protein, 450 aa, Yarrowia lipolytica; identical to SEQ ID NO: 3760

SEQ ID NO: 20713 - DNA, 1380 bp, Kluyveromyces lactis; identical to SEQ ID NO: 3761
  CDS (1)..(1380)

SEQ ID NO: 20714 - protein, 459 aa, Kluyveromyces lactis; identical to SEQ ID NO: 3762

SEQ ID NO: 20715 - DNA, 642 bp, Erwinia carotovora subsp; identical to SEQ ID NO: 3763
  CDS (1)..(642)

SEQ ID NO: 20716 - protein, 213 aa, Erwinia carotovora subsp; identical to SEQ ID NO: 3764

SEQ ID NO: 20717 - DNA, 627 bp, Mesoplasma florum L1; identical to SEQ ID NO: 3765
  CDS (1)..(627)

SEQ ID NO: 20718 - protein, 208 aa, Mesoplasma florum L1; identical to SEQ ID NO: 3766

SEQ ID NO: 20719 - DNA, 1431 bp, Candida glabrata; identical to SEQ ID NO: 3767
  CDS (1)..(1431)

SEQ ID NO: 20720 - protein, 476 aa, Candida glabrata; identical to SEQ ID NO: 3768

SEQ ID NO: 20721 - DNA, 639 bp, Bacillus thuringiensis serovar konkukian str; identical to SEQ ID NO: 3769
  CDS (1)..(639)

SEQ ID NO: 20722 - protein, 212 aa, Bacillus thuringiensis serovar konkukian str; identical to SEQ ID NO: 3770

SEQ ID NO: 20723 - DNA, 834 bp, Homo sapiens; identical to SEQ ID NO: 3771
  CDS (1)..(834)

SEQ ID NO: 20724 - protein, 277 aa, Homo sapiens [sequence omitted]

SEQ ID NO: 20725 - DNA, 1965 bp, Oryza sativa; identical to SEQ ID NO: 3773
  CDS (257)..(1726)

SEQ ID NO: 20726 - protein, 489 aa, Oryza sativa; identical to SEQ ID NO: 3774

SEQ ID NO: 20727 - DNA, 747 bp, Photobacterium profundum; identical to SEQ ID NO: 3775
  CDS (1)..(747)

SEQ ID NO: 20728 - protein, 248 aa, Photobacterium profundum; identical to SEQ ID NO: 3776

SEQ ID NO: 20729 - DNA, 621 bp, Bdellovibrio bacteriovorus; identical to SEQ ID NO: 3777
  CDS (1)..(621)

SEQ ID NO: 20730 - protein, 206 aa, Bdellovibrio bacteriovorus; identical to SEQ ID NO: 3778

SEQ ID NO: 20731 - DNA, 624 bp, Bdellovibrio bacteriovorus; identical to SEQ ID NO: 3779
  CDS (1)..(624)

SEQ ID NO: 20732 - protein, 207 aa, Bdellovibrio bacteriovorus; identical to SEQ ID NO: 3780

SEQ ID NO: 20733 - DNA, 618 bp, Mycoplasma mycoides; identical to SEQ ID NO: 3781
  CDS (1)..(618)

SEQ ID NO: 20734 - protein, 205 aa, Mycoplasma mycoides; identical to SEQ ID NO: 3782

SEQ ID NO: 20735 - DNA, 2638 bp, Oryza sativa; identical to SEQ ID NO: 3783
  CDS (248)..(2206)

SEQ ID NO: 20736 - protein, 652 aa, Oryza sativa; identical to SEQ ID NO: 3784

SEQ ID NO: 20737 - DNA, 1494 bp, Oryza sativa; identical to SEQ ID NO: 3785
  CDS (20)..(1231)

SEQ ID NO: 20738 - protein, 403 aa, Oryza sativa; identical to SEQ ID NO: 3786

SEQ ID NO: 20739 - DNA, 1824 bp, Homo sapiens; identical to SEQ ID NO: 3787
  CDS (45)..(1232)

SEQ ID NO: 20740 - protein, 395 aa, Homo sapiens [sequence omitted]

SEQ ID NO: 20741 - DNA, 630 bp, Listeria monocytogenes; identical to SEQ ID NO: 3789
  CDS (1)..(630)

SEQ ID NO: 20742 - protein, 209 aa, Listeria monocytogenes; identical to SEQ ID NO: 3790

SEQ ID NO: 20743 - DNA, 636 bp, Thermus thermophilus; identical to SEQ ID NO: 3791
  CDS (1)..(636)

SEQ ID NO: 20744 - protein, 211 aa, Thermus thermophilus; identical to SEQ ID NO: 3792

SEQ ID NO: 20745 - DNA, 1653 bp, Treponema denticola; identical to SEQ ID NO: 3793
  CDS (1)..(1653)

SEQ ID NO: 20746 - protein, 550 aa, Treponema denticola; identical to SEQ ID NO: 3794

SEQ ID NO: 20747 - DNA, 636 bp, Lactobacillus johnsonii; identical to SEQ ID NO: 3795
  CDS (1)..(636)

SEQ ID NO: 20748 - protein, 211 aa, Lactobacillus johnsonii; identical to SEQ ID NO: 3796

SEQ ID NO: 20749 - DNA, 1497 bp, Ashbya gossypii; identical to SEQ ID NO: 3797
  CDS (1)..(1497)

SEQ ID NO: 20750 - protein, 498 aa, Ashbya gossypii; identical to SEQ ID NO: 3798

SEQ ID NO: 20751 - DNA, 651 bp, Vibrio vulnificus; identical to SEQ ID NO: 3799
  CDS (1)..(651)

SEQ ID NO: 20752 - protein, 216 aa, Vibrio vulnificus; identical to SEQ ID NO: 3800

SEQ ID NO: 20753 - DNA, 630 bp, Porphyromonas gingivalis; identical to SEQ ID NO: 3801
  CDS (1)..(630)

SEQ ID NO: 20754 - protein, 209 aa, Porphyromonas gingivalis; identical to SEQ ID NO: 3802

SEQ ID NO: 20755 - DNA, 642 bp, Photorhabdus luminescens; identical to SEQ ID NO: 3803
  CDS (1)..(642)

SEQ ID NO: 20756 - protein, 213 aa, Photorhabdus luminescens; identical to SEQ ID NO: 3804

SEQ ID NO: 20757 - DNA, 645 bp, Mycoplasma gallisepticum; identical to SEQ ID NO: 3805
  CDS (1)..(645): transl_table=4

SEQ ID NO: 20758 - protein, 214 aa, Mycoplasma gallisepticum; identical to SEQ ID NO: 3806

SEQ ID NO: 20759 - DNA, 930 bp, Gloeobacter violaceus; identical to SEQ ID NO: 3807
  CDS (1)..(930)

SEQ ID NO: 20760 - protein, 309 aa, Gloeobacter violaceus; identical to SEQ ID NO: 3808

SEQ ID NO: 20761 - DNA, 996 bp, Gloeobacter violaceus; identical to SEQ ID NO: 3809
  CDS (1)..(996)

SEQ ID NO: 20762 - protein, 331 aa, Gloeobacter violaceus; identical to SEQ ID NO: 3810

SEQ ID NO: 20763 - DNA, 1038 bp, Gloeobacter violaceus; identical to SEQ ID NO: 3811
  CDS (1)..(1038)

SEQ ID NO: 20764 - protein, 345 aa, Gloeobacter violaceus; identical to SEQ ID NO: 3812

SEQ ID NO: 20765 - DNA, 615 bp, Chromobacterium violaceum; identical to SEQ ID NO: 3813
  CDS (1)..(615)

SEQ ID NO: 20766 - protein, 204 aa, Chromobacterium violaceum; identical to SEQ ID NO: 3814

SEQ ID NO: 20767 - DNA, 2049 bp, Giardia lamblia ATCC 50803; identical to SEQ ID NO: 3815
  CDS (1)..(2049)

SEQ ID NO: 20768 - protein, 682 aa, Giardia lamblia ATCC 50803; identical to SEQ ID NO: 3816

SEQ ID NO: 20769 - DNA, 1425 bp, Neurospora crassa; identical to SEQ ID NO: 3817
  CDS (1)..(1425)

SEQ ID NO: 20770 - protein, 474 aa, Neurospora crassa; identical to SEQ ID NO: 3818

SEQ ID NO: 20771 - DNA, 612 bp, Synechococcus sp; identical to SEQ ID NO: 3819
  CDS (1)..(612)

SEQ ID NO: 20772 - protein, 203 aa, Synechococcus sp; identical to SEQ ID NO: 3820

SEQ ID NO: 20773 - DNA, 654 bp, Haemophilus ducreyi; identical to SEQ ID NO: 3821
  CDS (1)..(654)

SEQ ID NO: 20774 - protein, 217 aa, Haemophilus ducreyi; identical to SEQ ID NO: 3822

SEQ ID NO: 20775 - DNA, 1609 bp, Chlorarachnion sp; identical to SEQ ID NO: 3823
  CDS (10)..(1464)

SEQ ID NO: 20776 - protein, 484 aa, Chlorarachnion sp; identical to SEQ ID NO: 3824

SEQ ID NO: 20777 - DNA, 630 bp, Enterococcus faecalis; identical to SEQ ID NO: 3825
  CDS (1)..(630)

SEQ ID NO: 20778 - protein, 209 aa, Enterococcus faecalis; identical to SEQ ID NO: 3826

SEQ ID NO: 20779 - DNA, 648 bp, Coxiella burnetii; identical to SEQ ID NO: 3827
  CDS (1)..(648)

SEQ ID NO: 20780 - protein, 215 aa, Coxiella burnetii; identical to SEQ ID NO: 3828

SEQ ID NO: 20781 - DNA, 1659 bp, Clostridium tetani; identical to SEQ ID NO: 3829
  CDS (1)..(1659)

SEQ ID NO: 20782 - protein, 552 aa, Clostridium tetani; identical to SEQ ID NO: 3830

SEQ ID NO: 20783 - DNA, 1674 bp, Bacteroides thetaiotaomicron; identical to SEQ ID NO: 3831
  CDS (1)..(1674)

SEQ ID NO: 20784 - protein, 557 aa, Bacteroides thetaiotaomicron; identical to SEQ ID NO: 3832

SEQ ID NO: 20785 - DNA, 618 bp, Bacteroides thetaiotaomicron; identical to SEQ ID NO: 3833
  CDS (1)..(618)

SEQ ID NO: 20786 - protein, 205 aa, Bacteroides thetaiotaomicron; identical to SEQ ID NO: 3834

SEQ ID NO: 20787 - DNA, 630 bp, Streptococcus agalactiae; identical to SEQ ID NO: 3835
  CDS (1)..(630)

SEQ ID NO: 20788 - protein, 209 aa, Streptococcus agalactiae; identical to SEQ ID NO: 3836

SEQ ID NO: 20789 - DNA, 1524 bp, Galdieria sulphuraria; identical to SEQ ID NO: 3837
  CDS (77)..(1423)

SEQ ID NO: 20790 - protein, 448 aa, Galdieria sulphuraria; identical to SEQ ID NO: 3838

SEQ ID NO: 20791 - DNA, 1005 bp, Synechococcus vulcanus; identical to SEQ ID NO: 3839
  CDS (1)..(1005)

SEQ ID NO: 20792 - protein, 334 aa, Synechococcus vulcanus; identical to SEQ ID NO: 3840

SEQ ID NO: 20793 - DNA, 1831 bp, Arabidopsis thaliana; identical to SEQ ID NO: 3841
  CDS (116)..(1525)

SEQ ID NO: 20794 - protein, 469 aa, Arabidopsis thaliana; identical to SEQ ID NO: 3842

SEQ ID NO: 20795 - DNA, 1875 bp, Homo sapiens; identical to SEQ ID NO: 3843
  CDS (14)..(1273)

SEQ ID NO: 20796 - protein, 419 aa, Homo sapiens; identical to SEQ ID NO: 3844

SEQ ID NO: 20797 - DNA, 1644 bp, Thermoanaerobacter tengcongensis; identical to SEQ ID NO: 3845
  CDS (1)..(1644)

SEQ ID NO: 20798 - protein, 547 aa, Thermoanaerobacter tengcongensis; identical to SEQ ID NO: 3846

SEQ ID NO: 20799 - DNA, 1665 bp, Clostridium perfringens; identical to SEQ ID NO: 3847
  CDS (1)..(1665)

SEQ ID NO: 20800 - protein, 554 aa, Clostridium perfringens; identical to SEQ ID NO: 3848

SEQ ID NO: 20801 - DNA, 1258 bp, Odontella sinensis; identical to SEQ ID NO: 3849
  CDS (23)..(1213)

SEQ ID NO: 20802 - protein, 396 aa, Odontella sinensis; identical to SEQ ID NO: 3850

SEQ ID NO: 20803 - DNA, 606 bp, Homo sapiens; identical to SEQ ID NO: 3851
  CDS (1)..(606)

SEQ ID NO: 20804 - protein, 201 aa, Homo sapiens [sequence omitted]

SEQ ID NO: 20805 - DNA, 1299 bp, Vaucheria litorea; identical to SEQ ID NO: 3853
  CDS (8)..(1225)

SEQ ID NO: 20806 - protein, 405 aa, Vaucheria litorea; identical to SEQ ID NO: 3854

SEQ ID NO: 20807 - DNA, 1711 bp, Cryptosporidium parvum; identical to SEQ ID NO: 3855
  CDS (290)..(1549)

SEQ ID NO: 20808 - protein, 419 aa, Cryptosporidium parvum; identical to SEQ ID NO: 3856

SEQ ID NO: 20809 - DNA, 1492 bp, Arabidopsis thaliana; identical to SEQ ID NO: 3857
  CDS (1)..(1461)

SEQ ID NO: 20810 - protein, 486 aa, Arabidopsis thaliana; identical to SEQ ID NO: 3858

SEQ ID NO: 20811 - DNA, 1480 bp, Dictyostelium discoideum; identical to SEQ ID NO: 3859
  CDS (1)..(1479)

SEQ ID NO: 20812 - protein, 492 aa, Dictyostelium discoideum; identical to SEQ ID NO: 3860

SEQ ID NO: 20813 - DNA, 1545 bp, Synechococcus sp; identical to SEQ ID NO: 3861
  CDS (267)..(1268)

SEQ ID NO: 20814 - protein, 333 aa, Synechococcus sp; identical to SEQ ID NO: 3862

SEQ ID NO: 20815 - DNA, 1452 bp, Arabidopsis thaliana; identical to SEQ ID NO: 3863
  CDS (1)..(1452)

SEQ ID NO: 20816 - protein, 483 aa, Arabidopsis thaliana; identical to SEQ ID NO: 3864

SEQ ID NO: 20817 - DNA, 1398 bp, Arabidopsis thaliana; identical to SEQ ID NO: 3865
  CDS (1)..(1398)

SEQ ID NO: 20818 - protein, 465 aa, Arabidopsis thaliana; identical to SEQ ID NO: 3866

SEQ ID NO: 20819 - DNA, 1856 bp, Drosophila melanogaster; identical to SEQ ID NO: 3867
  CDS (77)..(1762)

SEQ ID NO: 20820 - protein, 561 aa, Drosophila melanogaster; identical to SEQ ID NO: 3868

SEQ ID NO: 20821 - DNA, 1869 bp, Synechocystis sp; identical to SEQ ID NO: 3869
  CDS (233)..(1231)

SEQ ID NO: 20822 - protein, 332 aa, Synechocystis sp; identical to SEQ ID NO: 3870

SEQ ID NO: 20823 - DNA, 834 bp, Mus musculus; identical to SEQ ID NO: 3871
  CDS (1)..(834)

SEQ ID NO: 20824 - protein, 277 aa, Mus musculus; identical to SEQ ID NO: 3872

SEQ ID NO: 20825 - DNA, 1200 bp, Homo sapiens; identical to SEQ ID NO: 3873
  CDS (180)..(965)

SEQ ID NO: 20826 - protein, 261 aa, Homo sapiens; identical to SEQ ID NO: 3874

SEQ ID NO: 20827 - DNA, 822 bp, Drosophila melanogaster; identical to SEQ ID NO: 3875
  CDS (40)..(822)

SEQ ID NO: 20828 - protein, 260 aa, Drosophila melanogaster; identical to SEQ ID NO: 3876

SEQ ID NO: 20829 - DNA, 1823 bp, Mus musculus; identical to SEQ ID NO: 3877
  CDS (6)..(1652)

SEQ ID NO: 20830 - protein, 548 aa, Mus musculus; identical to SEQ ID NO: 3878

SEQ ID NO: 20831 - DNA, 627 bp, Clostridium perfringens; identical to SEQ ID NO: 3879
  CDS (1)..(627)

SEQ ID NO: 20832 - protein, 208 aa, Clostridium perfringens; identical to SEQ ID NO: 3880

SEQ ID NO: 20833 - DNA, 630 bp, Clostridium tetani; identical to SEQ ID NO: 3881
  CDS (1)..(630)

SEQ ID NO: 20834 - protein, 209 aa, Clostridium tetani; identical to SEQ ID NO: 3882

SEQ ID NO: 20835 - DNA, 678 bp, Halobacterium sp; identical to SEQ ID NO: 3883
  CDS (1)..(678)

SEQ ID NO: 20836 - protein, 225 aa, Halobacterium sp; identical to SEQ ID NO: 3884

SEQ ID NO: 20837 - DNA, 630 bp, Lactobacillus plantarum; identical to SEQ ID NO: 3885
  CDS (1)..(630)

SEQ ID NO: 20838 - protein, 209 aa, Lactobacillus plantarum; identical to SEQ ID NO: 3886

SEQ ID NO: 20839 - DNA, 633 bp, Oceanobacillus iheyensis; identical to SEQ ID NO: 3887
  CDS (1)..(633)

SEQ ID NO: 20840 - protein, 210 aa, Oceanobacillus iheyensis; identical to SEQ ID NO: 3888

SEQ ID NO: 20841 - DNA, 651 bp, Pasteurella multocida; identical to SEQ ID NO: 3889
  CDS (1)..(651)

SEQ ID NO: 20842 - protein, 216 aa, Pasteurella multocida; identical to SEQ ID NO: 3890

SEQ ID NO: 20843 - DNA, 639 bp, Shewanella oneidensis; identical to SEQ ID NO: 3891
  CDS (1)..(639)

SEQ ID NO: 20844 - protein, 212 aa, Shewanella oneidensis; identical to SEQ ID NO: 3892

SEQ ID NO: 20845 - DNA, 624 bp, Staphylococcus epidermidis; identical to SEQ ID NO: 3893
  CDS (1)..(624)

SEQ ID NO: 20846 - protein, 207 aa, Staphylococcus epidermidis; identical to SEQ ID NO: 3894

SEQ ID NO: 20847 - DNA, 627 bp, Streptococcus pyogenes; identical to SEQ ID NO: 3895
  CDS (1)..(627)

SEQ ID NO: 20848 - protein, 208 aa, Streptococcus pyogenes; identical to SEQ ID NO: 3896

SEQ ID NO: 20849 - DNA, 642 bp, Vibrio cholerae; identical to SEQ ID NO: 3897
  CDS (1)..(642)

SEQ ID NO: 20850 - protein, 213 aa, Vibrio cholerae; identical to SEQ ID NO: 3898

SEQ ID NO: 20851 - DNA, 642 bp, Vibrio parahaemolyticus; identical to SEQ ID NO: 3899
  CDS (1)..(642)

SEQ ID NO: 20852 - protein, 213 aa, Vibrio parahaemolyticus; identical to SEQ ID NO: 3900

SEQ ID NO: 20853 - DNA, 816 bp, Xenopus laevis; identical to SEQ ID NO: 3901
  CDS (1)..(816)

SEQ ID NO: 20854 - protein, 271 aa, Xenopus laevis; identical to SEQ ID NO: 3902

SEQ ID NO: 20855 - DNA, 21 bp, Artificial sequence
  Primer sequence
atggcgcttcgtcgccccctt

SEQ ID NO: 20856 - DNA, 27 bp, Artificial sequence
  Primer sequence
ttattcaaagaactgacttattttcgc

SEQ ID NO: 20857 - protein, 242 aa, Artificial sequence
  Consensus
  Variant (5)..(5): Xaa in position 5 is any amino acid
  Variant (7)..(7): Xaa in position 7 is any amino acid
  Variant (15)..(18): Xaa in position 15 to 18 is any amino acid
  Variant (20)..(26): Xaa in position 20 to 26 is any amino acid
  Variant (27)..(51): Xaa in position 27 to 51 is any or no amino acid
  Variant (54)..(55): Xaa in position 54 to 55 is any amino acid
  Variant (57)..(57): Xaa in position 57 is any amino acid
  Variant (60)..(68): Xaa in position 60 to 68 is any amino acid
  Variant (69)..(76): Xaa in position 69 to 76 is any or no amino acid
  Variant (79)..(79): Xaa in position 79 is any amino acid
  Variant (81)..(81): Xaa in position 81 is any amino acid
  Variant (83)..(83): Xaa in position 83 is any amino acid
  Variant (85)..(86): Xaa in position 85 to 86 is any amino acid
  Variant (89)..(91): Xaa in position 89 to 91 is any amino acid
  Variant (93)..(94): Xaa in position 93 to 94 is any amino acid
  Variant (96)..(97): Xaa in position 96 to 97 is any amino acid
  Variant (99)..(100): Xaa in position 99 to 100 is any amino acid
  Variant (102)..(103): Xaa in position 102 to 103 is any amino acid
  Variant (105)..(105): Xaa in position 105 is any amino acid
  Variant (107)..(114): Xaa in position 107 to 114 is any amino acid
  Variant (115)..(121): Xaa in position 115 to 121 is any or no amino acid
  Variant (123)..(123): Xaa in position 123 is any amino acid
  Variant (124)..(126): Xaa in position 124 to 126 is any or no amino acid
  Variant (134)..(140): Xaa in position 134 to 140 is any amino acid
  Variant (141)..(143): Xaa in position 141 to 143 is any or no amino acid
  Variant (145)..(151): Xaa in position 145 to 151 is any amino acid
  Variant (155)..(167): Xaa in position 155 to 167 is any or no amino acid
  Variant (169)..(171): Xaa in position 169 to 171 is any amino acid
  Variant (173)..(176): Xaa in position 173 to 176 is any amino acid
  Variant (180)..(180): Xaa in position 180 is any amino acid
  Variant (183)..(192): Xaa in position 183 to 192 is any amino acid
  Variant (193)..(195): Xaa in position 193 to 195 is any or no amino acid
  Variant (197)..(202): Xaa in position 197 to 202 is any amino acid
  Variant (206)..(209): Xaa in position 206 to 209 is any amino acid
  Variant (212)..(212): Xaa in position 212 is any amino acid
  Variant (214)..(217): Xaa in position 214 to 217 is any amino acid
  Variant (223)..(226): Xaa in position 223 to 226 is any amino acid
  Variant (227)..(232): Xaa in position 227 to 232 is any or no amino acid
  Variant (234)..(241): Xaa in position 234 to 241 is any amino acid
IIGIXGXSGSGKTTXXXXIXXXXXXXXXXXXXXXXXXXXXXXXXXXXXXXXVIXXDXYYXXXXXXXXXXXXXXXXXFDXPXAXDXXLLXXXLXXLXXGXXVXXPXYXXXXXXXXXXXXXXXVXXXXVIILEGIXXXXXXXXXXLXXXXXXXIFVXXXXXXXXXXXXXDXXXDXXXXRRIXRDXXXXXXXXXXXXXIXXXXXXVKPXXXXFIXPXXXXADIIIXXXXXXXXXXVXXXXXXXXI

SEQ ID NO: 20858 - protein, 58 aa, Artificial sequence; identical to SEQ ID NO: 6166
  Consensus
  Variant (1)..(1): Xaa in position 1 is Ile, Val, Leu or Ala
  Variant (2)..(2): Xaa in position 2 is Ile, Val or Leu
  Variant (3)..(3): Xaa in position 3 is any amino acid
  Variant (4)..(4): Xaa in position 4 is Ile, Val or Leu
  Variant (5)..(5): Xaa in position 5 is any amino acid
  Variant (6)..(6): Xaa in position 6 is Gly or Ala
  Variant (7)..(7): Xaa in position 7 is any amino acid
  Variant (8)..(8): Xaa in position 8 is Ser, Thr or Ala
  Variant (9)..(9): Xaa in position 9 is Gly, Ala or Ser
  Variant (10)..(10): Xaa in position 10 is Ser, Cys, Ala or Gly
  Variant (13)..(13): Xaa in position 13 is Thr or Ser
  Variant (14)..(18): Xaa in position 14 to 18 is any amino acid
  Variant (19)..(19): Xaa in position 19 is Ile, Leu, Val or Met
  Variant (20)..(27): Xaa in position 20 to 27 is any amino acid
  Variant (28)..(52): Xaa in position 28 to 52 is any or no amino acid
  Variant (53)..(53): Xaa in position 53 is Ile, Leu or Val
  Variant (54)..(55): Xaa in position 54 to 55 is any amino acid
  Variant (57)..(57): Xaa in position 57 is any amino acid
  Variant (58)..(58): Xaa in position 58 is Tyr or Phe

SEQ ID NO: 20859 - protein, 74 aa, Artificial sequence; identical to SEQ ID NO: 6167
  Consensus
  Variant (1)..(1): Xaa in position 1 is Ala, Ser, Val, Glu or Cys
  Variant (2)..(10): Xaa in position 2 to 10 is any amino acid
  Variant (11)..(11): Xaa in position 11 is Leu, Ile, Val or Met
  Variant (12)..(13): Xaa in position 12 to 13 is any amino acid
  Variant (14)..(14): Xaa in position 14 is Leu or Ile
  Variant (15)..(19): Xaa in position 15 to 19 is any amino acid
  Variant (20)..(20): Xaa in position 20 is Val, Ile, Leu, Thr or Tyr
  Variant (21)..(22): Xaa in position 21 to 22 is any amino acid
  Variant (24)..(24): Xaa in position 24 is any amino acid
  Variant (26)..(34): Xaa in position 26 to 34 is any amino acid
  Variant (35)..(46): Xaa in position 35 to 46 is any or no amino acid
  Variant (47)..(47): Xaa in position 47 is Val, Ile or Phe
  Variant (48)..(48): Xaa in position 48 is Ile, Val, Leu or Phe
  Variant (49)..(49): Xaa in position 49 is Ile, Val or Leu
  Variant (50)..(50): Xaa in position 50 is any amino acid
  Variant (51)..(51): Xaa in position 51 is Glu or Asp
  Variant (53)..(53): Xaa in position 53 is Ile or Leu
  Variant (54)..(54): Xaa in position 54 is Leu, His, Tyr, Phe or Met
  Variant (55)..(59): Xaa in position 55 to 59 is any amino acid
  Variant (60)..(63): Xaa in position 60 to 63 is any or no amino acid
  Variant (64)..(64): Xaa in position 64 is Leu, Ile, Val or Met
  Variant (65)..(71): Xaa in position 65 to 71 is any amino acid
  Variant (72)..(72): Xaa in position 72 is Ile, Val or Leu
  Variant (73)..(73): Xaa in position 73 is Phe, Tyr or Ser
  Variant (74)..(74): Xaa in position 74 is Val, Met, Leu, Ile or Phe

SEQ ID NO: 20860 - protein, 44 aa, Artificial sequence; identical to SEQ ID NO: 6168
  Consensus
  Variant (1)..(1): Xaa in position 1 is Arg or Lys
  Variant (2)..(2): Xaa in position 2 is Ile, Val, Leu or Met
  Variant (3)..(3): Xaa in position 3 is any amino acid
  Variant (6)..(29): Xaa in position 6 to 29 is any amino acid
  Variant (30)..(32): Xaa in position 30 to 32 is any or no amino acid
  Variant (33)..(33): Xaa in position 33 is Phe, Tyr, Trp or Asn
  Variant (34)..(34): Xaa in position 34 is Ile, Val or Cys
  Variant (35)..(35): Xaa in position 35 is any amino acid
  Variant (36)..(36): Xaa in position 36 is Pro or Lys
  Variant (37)..(40): Xaa in position 37 to 40 is any amino acid
  Variant (42)..(43): Xaa in position 42 to 43 is any amino acid
  Variant (44)..(44): Xaa in position 44 is Ile, Val, Leu, Met or Lys

SEQ ID NO: 20861 - DNA, 1323 bp, Escherichia coli K12
  CDS (1)..(1323): transl_table=11
atgattggtcgcatatcgcgttttatgacgcgttttgtcagccggtggcttcccgatccactgatctttgccatgttgctgacattgctaacattcgtgatcgcgctttggttaacaccacaaacgccgatcagcatggtgaaaatgtggggtgacggtttctggaacttgctggcgtttggtatgcagatggcgcttatcatcgttaccggtcatgcccttgccagctctgctccggtgaaaagtttgctgcgtactgccgcctccgccgcaaagacgcccgtacagggcgtcatgctggtcactttcttcggttcagtcgcttgtgtcatcaactggggatttggtttggttgtcggcgcaatgtttgcccgtgaagtcgcccggcgagtccccggttctgattatccgttgctcattgcctgcgcctacattggttttctcacctggggtggcggcttctctggatcaatgcctctgttggctgcaacaccgggcaacccggttgagcatatcgccgggctgatcccggtgggcgatactctgttcagtggttttaacattttcatcactgtggcgttgattgtggtgatgccatttatcacccgcatgatgatgccaaaaccgtctgacgtggtgagtatcgatccaaaactactcatggaagaggctgattttcaaaagcagctaccgaaagatgccccaccatccgagcgactggaagaaagccgcattctgacgttgatcatcggcgcactcggtatcgcttaccttgcgatgtacttcagcgaacatggcttcaacatcaccatcaataccgtcaacctgatgtttatgattgcgggtctgctgctacataaaacgccaatggcttatatgcgtgctatcagcgcggcagcacgcagtactgccggtattctggtgcaattccccttctacgctgggatccaactgatgatggagcattccggtctgggcggactcattaccgaattcttcatcaatgttgcgaacaaagacaccttcccggtaatgaccttttttagttctgcactgattaacttcgccgttccgtctggcggcggtcactgggttattcagggacctttcgtgatacccgcagcccaggcgctgggcgctgatctcggtaaatcggtaatggcgatcgcctacggcgagcaatggatgaacatggcacaaccattctgggcgctgccagcactggcaatcgccggactcggtgtccgcgacatcatgggctactgcatcactgccctgctcttctccggtgtcattttcgtcattggtttaacgctgttctga

SEQ ID NO: 20862 - protein, 440 aa, Escherichia coli K12
MIGRISRFMTRFVSRWLPDPLIFAMLLTLLTFVIALWLTPQTPISMVKMWGDGFWNLLAFGMQMALIIVTGHALASSAPVKSLLRTAASAAKTPVQGVMLVTFFGSVACVINWGFGLVVGAMFAREVARRVPGSDYPLLIACAYIGFLTWGGGFSGSMPLLAATPGNPVEHIAGLIPVGDTLFSGFNIFITVALIVVMPFITRMMMPKPSDVVSIDPKLLMEEADFQKQLPKDAPPSERLEESRILTLIIGALGIAYLAMYFSEHGFNITINTVNLMFMIAGLLLHKTPMAYMRAISAAARSTAGILVQFPFYAGIQLMMEHSGLGGLITEFFINVANKDTFPVMTFFSSALINFAVPSGGGHWVIQGPFVIPAAQALGADLGKSVMAIAYGEQWMNMAQPFWALPALAIAGLGVRDIMGYCITALLFSGVIFVIGLTLF

SEQ ID NO: 20863 - DNA, 1461 bp, Archaeoglobus fulgidus DSM 4304
  CDS (1)..(1461): transl_table=11
atggaggatgggcggtacagcgccctggagagaatgggagcaagactgtgcgcaagcgtggagaaatggatgccggacccattaatctttgctctgcttctgactttggtgacttatctgttggtaatagtggtgatgaagccgtacacagtgatggatgcgggaacgatggttaagtggctcctcgtggatgtttggtacaaaggcttctggggtctcctgtccttcgccatgcaaatgtgtttgattcttgttaccggttatgcaatagcctatcatccaatcgtttacaggattttgaaaaagatagcgacactcccttcagatactaaatcggctgcagctcttacggcacttattgcaatgattgcagcttggataaactggggacttggacttatagttggggccattttggccagaacaattggaattgaattctacagaacaggaaagccattgcactatccggctgtagtagcagccggttatgccggtttaggacttacttggcattggggtttatcggcttctgcaccattattgattaacacgccaaatcactttctaaaggatgttttcgtggagttgttcggcagggagacagttccgctgaacgagaccatctttcatccatatactcttataaatctggcaataatcatttctttcggggtactggcttattacgcgcttgcgcctaacaggggtgaattgaaaggaatagacaaagttgcaccacacataattgagctggtgaagaaagaaaaggaagaggagctgaaagaaaaaagtaaagagcgcgtaacgattgctgacaagcttgagaacagtaaagttctcgccctactaataagcatattggggattatcacgatgggctactggttctacgagaaaggctttttcggtggactaaacctaaattcgctgaattttacgtttataatggttggccttcttctctacatgaatcccatagcttacatgagggctatcaccagagcggcaggagcagtagcaggaatactggttcagtttccgttctatgcgggtattatgggaatgatgaggtacagtgcagttgttgcagggggaccaaatcttgcaactgttatagccaacagtatagcgagcgttgcaacgccgtttacgtggccggcaatatgtttatacattgcagggctgataaacatattcataccttctggaggtggagaatgggcagcagttggagagattttagcaagaacgtcagctgccctgggtgtgcctattggaaaaaccgtaattgcttatggtgtaggggacgcttggacaaacctcttccagccattctgggcgattcctctcctcggacttacgggaacaagggccagagatgtttttggatacacgatctccgtgatgatattggcaaccattccgctctcgctcggtttagttctcgttccatattga

SEQ ID NO: 20864 - protein, 486 aa, Archaeoglobus fulgidus DSM 4304
MEDGRYSALERMGARLCASVEKWMPDPLIFALLLTLVTYLLVIVVMKPYTVMDAGTMVKWLLVDVWYKGFWGLLSFAMQMCLILVTGYAIAYHPIVYRILKKIATLPSDTKSAAALTALIAMIAAWINWGLGLIVGAILARTIGIEFYRTGKPLHYPAVVAAGYAGLGLTWHWGLSASAPLLINTPNHFLKDVFVELFGRETVPLNETIFHPYTLINLAIIISFGVLAYYALAPNRGELKGIDKVAPHIIELVKKEKEEELKEKSKERVTIADKLENSKVLALLISILGIITMGYWFYEKGFFGGLNLNSLNFTFIMVGLLLYMNPIAYMRAITRAAGAVAGILVQFPFYAGIMGMMRYSAVVAGGPNLATVIANSIASVATPFTWPAICLYIAGLINIFIPSGGGEWAAVGEILARTSAALGVPIGKTVIAYGVGDAWTNLFQPFWAIPLLGLTGTRARDVFGYTISVMILATIPLSLGLVLVPY

SEQ ID NO: 20865 - DNA, 1455 bp, Aeropyrum pernix K1
  CDS (1)..(1455): transl_table=11
gtgggctcattgggggacgagtctaggcgtcccttcctagaggctttcggcgaggcgctggagcgaagggtcaggggcgtcatgccagaccccttcatcttcgccatactccttacattcatagcaatagtgctcgacctcatcctcctgaggcccatacagcatgtggggctggggggtactgtcaagtttctagtctacagtgcatggtacggcggcttctggaagctcctgaccttcagcatgcagatgacccttatactggtgacgggctacgttatagcctaccacccactcgtatacagggttctctccaggatagccggcctacctagggacacgaagcaggcagccgtcctcgccgcagccgtcgccatagcactctcatacctcagctggggcctgagcctgataggcggggccatactggccagggagatagggaggcaggccgccttccgcggaaggaagatccactatccagtagtggtcgtcgctgcatacagcggcctagggctaacatggcactggggtctcacggcaagcgccccgctgctcatgaacactcccggccacttcctggccaacgttgtgaaggagctctacggcgtcgagacaataccgctctcacagacgattttccacccctacactatcataaacttcctgctgataaccctggcagcactggcgatatactggctcataagcccctcccgagggcccgtcagggggatagaggagttcgaccccgacgccctcaaggaagaggctgcgcccgctggtgagaagcccaggatcgagaccctggcggacaggcttgagaactccaggacactggccatactcaccgtcatactgggtttcacggcggttgcaatagagctgtatacacggggcataagcagggcgctcaacctcaacaccatgaacttcatcttcctaatgacaggactcctgctctacgccaaccccatgagctacgcaagggccttctacaggagcgtctcatcggccgcgggcgtcatactacagttccacttctacgccggcatcttcggcctcctaaacacgcccttcgagcctctcggcaagagctcggcccagatcatcgcagaaggcctggccgacgtttcaacacccttcatatggccggtagtggccttcctaaccgcgggcatagtgaacctcttcataccaagcgggggcggcgagtgggctgcgataggagaaatactagtcagggccggccacgagctgggagtgccgataggtaaaaccataatagcctacggcttcggcgactcgtggacaaacttactccagcccttctgggcaatacccctcctagacataactaggacgagggctagggatgtattcggctacaccatagcactcatgatactcatagctccagtggctgcggtaaccctgaccctgataccgtactga

SEQ ID NO: 20866 - protein, 484 aa, Aeropyrum pernix K1
MGSLGDESRRPFLEAFGEALERRVRGVMPDPFIFAILLTFIAIVLDLILLRPIQHVGLGGTVKFLVYSAWYGGFWKLLTFSMQMTLILVTGYVIAYHPLVYRVLSRIAGLPRDTKQAAVLAAAVAIALSYLSWGLSLIGGAILAREIGRQAAFRGRKIHYPVVVVAAYSGLGLTWHWGLTASAPLLMNTPGHFLANVVKELYGVETIPLSQTIFHPYTIINFLLITLAALAIYWLISPSRGPVRGIEEFDPDALKEEAAPAGEKPRIETLADRLENSRTLAILTVILGFTAVAIELYTRGISRALNLNTMNFIFLMTGLLLYANPMSYARAFYRSVSSAAGVILQFHFYAGIFGLLNTPFEPLGKSSAQIIAEGLADVSTPFIWPVVAFLTAGIVNLFIPSGGGEWAAIGEILVRAGHELGVPIGKTIIAYGFGDSWTNLLQPFWAIPLLDITRTRARDVFGYTIALMILIAPVAAVTLTLIPY

SEQ ID NO: 20867 - DNA, 1365 bp, Helicobacter pylori J99
  CDS (1)..(1365): transl_table=11
atgtttttattaaggcatttgacttcagcgtgcgtgtttttagcgtctaaatgtttgccggactcctttgtcttggtcgctcttttatcgtttgtcgtgttcgttcttgtttattgtttgacagggcaagacgcttcgtctgtcatttctagttgggggaatggtgcttggacgcttttaggtttttctatgcaaatggctcttattttggtattgggtcaggctctagctagcgctaaattagtccaaaaacttttaaaatacttggcgtctttgcctaaggggtattacaccgctttatggttggttacttttttatcgttaatcgctaattggatcaactggggttttggcttggtgattagcgcgatttttgcaaaagagatcgccaaaaatgttaagggggtggattataggttgctcattgctagcgcttattcgggttttgtgatctggcatgggggtttatcaggctctatccctttaagcgttgccacccaaaatgaaaatctatccaaaataagcgctggggtgattgaaaaagctatccctatcagtcagacgattttttcttcttataatttgatcattatagggatcattcttatagggttaccctttttaatggcaatgatccaccctaaaaaagaagaaatcgttgaaattgattcaaagcttttaaaagacgaatacaaagaaacagaactcattagccaccaacaagataaaacgatcgcgcattttttggaaaacagcgctttgctttcttatcttttggtttttttgggttttgggtatcttggtatttatttttttaaagggggagggattagtttaaacattgtcaatacgattttcctttttttagggattttgctccataaaacccctttagcttatgtgaaagcgatcaatcattccgctaggagcgtggctgggattttactccaattccctttttacgctgggattatggggatgatggcaagccatagcgtgggggggcattctttagcgcaaatgctctctttagccttcacgcacatcgctaatgaaaaaactttcgcgctcatgacttttttgagcgcggggattgtcaatatttttattccatcaggcggagggcaatgggcgattcaagctcctatcatgctccctgctgggcaaagcttgggggtggatccgggcgtgatttctatggctatcgcttggggagacgcttggacgaacatgatacagcctttttgggctttgcccgcattagccattgcgggtttgggcgctaaggatattatgggctattgcgttttgactttaatttttgtaggcttagtggtgtgcggggtgttttattttttggtgtga

SEQ ID NO: 20868 - protein, 454 aa, Helicobacter pylori J99
MFLLRHLTSACVFLASKCLPDSFVLVALLSFVVFVLVYCLTGQDASSVISSWGNGAWTLLGFSMQMALILVLGQALASAKLVQKLLKYLASLPKGYYTALWLVTFLSLIANWINWGFGLVISAIFAKEIAKNVKGVDYRLLIASAYSGFVIWHGGLSGSIPLSVATQNENLSKISAGVIEKAIPISQTIFSSYNLIIIGIILIGLPFLMAMIHPKKEEIVEIDSKLLKDEYKETELISHQQDKTIAHFLENSALLSYLLVFLGFGYLGIYFFKGGGISLNIVNTIFLFLGILLHKTPLAYVKAINHSARSVAGILLQFPFYAGIMGMMASHSVGGHSLAQMLSLAFTHIANEKTFALMTFLSAGIVNIFIPSGGGQWAIQAPIMLPAGQSLGVDPGVISMAIAWGDAWTNMIQPFWALPALAIAGLGAKDIMGYCVLTLIFVGLVVCGVFYFLV

SEQ ID NO: 20869 - DNA, 1326 bp, Bacillus halodurans C-125
  CDS (1)..(1326): transl_table=11
ttgaagtatatgatttcattgtcaaatcgattgatgcagcgctatttaccggacccttttctctttgttgttcttctcacgtttctcgtatttgctctatccttgatcttcacggagagtacacctcttacaattgttcaatactggggagaaggcttttgggggctgctgtcgttttccatgcagatggttcttgtgcttgtaacaggacatgtgctagcaagcagtcctttgtttaaaaaggggctcggtgcgctagctgggcttccagcttctccagggcaggcgattttattagtaaccgtcgtttctttagtcgctagttttattaattgggggtttggtttagtcataggtgccttgtttgcaaaagagttagcgaaaaaagtagacaacgttgattatcggttgttgatcgcgagcgcctacagtgggtttatgatttggcatggcggattatcaggctccgtgcctttgacgattgctacaccagatcacttcgcccaagatatgattggagtcattccgacaagtgagacgatttttgcgccgtataacttggcgattgtttttgcactatttattgcgattccccttgccaatcgcttaatgatgccgggaaaatcagatacggtgacggtggatcgctccttgttggacgatggacgggatctgcaagcggcttcccttgaattagaggcgatgacaccttcagaccgccttgagaatagtcggatgatctccctgttggttggtgtgctcggacttgtttttttaggttattactttgcaaccaatggatttgagttaaaccttgatatcgtcaactccttgtttctcttcctcgggattttatttcacggcacgccaaaattgtttttgaaagcggtaacaagtgcggtgaaaggggcgagtggcattatcattcaatttcctttttacgcggggttaatggggatcatggtttcctctgggctggctaccgtgatgtccgaagcctttgtgtcgttttcaaacgaagtgaccttcccgctgttcgtttttctcagtgcgggcattgttaatgtgtttgttccttccggtggcggccagtgggcggtgcaagcgcccgttgtgctagaagctgcgcaaagcttaggagttcctgcggctaaggcagcgatggccgttgcgtggggagatgcgtggacgaatatgattcaaccgttttgggcgcttcccgctcttgcgattgctggtttgaaagcgaaagacattatgggcttttgcgtgatgattttagttgtgagcggcgtagtgatatcgctcggatttttgcttatgtaa

SEQ ID NO: 20870 - protein, 441 aa, Bacillus halodurans C-125
MKYMISLSNRLMQRYLPDPFLFVVLLTFLVFALSLIFTESTPLTIVQYWGEGFWGLLSFSMQMVLVLVTGHVLASSPLFKKGLGALAGLPASPGQAILLVTVVSLVASFINWGFGLVIGALFAKELAKKVDNVDYRLLIASAYSGFMIWHGGLSGSVPLTIATPDHFAQDMIGVIPTSETIFAPYNLAIVFALFIAIPLANRLMMPGKSDTVTVDRSLLDDGRDLQAASLELEAMTPSDRLENSRMISLLVGVLGLVFLGYYFATNGFELNLDIVNSLFLFLGILFHGTPKLFLKAVTSAVKGASGIIIQFPFYAGLMGIMVSSGLATVMSEAFVSFSNEVTFPLFVFLSAGIVNVFVPSGGGQWAVQAPVVLEAAQSLGVPAAKAAMAVAWGDAWTNMIQPFWALPALAIAGLKAKDIMGFCVMILVVSGVVISLGFLLM

SEQ ID NO: 20871 - DNA, 1425 bp, Pseudomonas aeruginosa PAO1
  CDS (1)..(1425): transl_table=11
atgaccgctatccttcccatccaagaaagccgctccgcgcgcttcgccatgcgttgctcgaactgggccgagcgctggtttcccgactcctgggtgttcgccgccctggccatcctcatcgtcagcctggccgcgctggccatgggcgccggaccgaccgccacggcgaaagccttcggcgacggtttctggagcctgatcccgttcaccatgcagatggccttcgtggtcatcggcggctatgtggtggccagttcaggccccgcctcgcgtctcatcgacctgctcgcgcgggtgccgaagaatggccgctcggcggtctgctgggtggcgctggtgtcgatgctcgcctcgctgctcaactggggcctcagcctggtcttcggcggcctgctggtacgcgccctggcgcgccgcagcgacctgcgcatggactatcgcgccgccggcgccgcggcctacctcgggctgggcgcggtgtgggcgctgggcctgtcgtcgtcggccgcgcagttgcaggccaacccggccagcctgccaccgtcgatcctggcgatcaccggggtgatcccgttcaccgagaccatcttcctctggcagtccggggtcatgctgctggcgctgatcctggtctcgctggtgatcgcctacatgaccgcgccgagcgccgccagcgcccgcgacgccaaggattgcggggtcgacgtgagcttcaccgctccggccaggctggcgccgacccggcccggcgagtggctggagcacagcccgttgctgatcatcctgctggtactgctggccggcggctggctggtacacgagttctcgaccaagccggcgatcctggcgatctccgggttgaacacctataacctgctgttcctgatgctcggcgcgttgctgcactggcgcccgcgcagcttcctcgacgcggtggcgcgcgcggtgccgaccaccaccggggtgctgatccagttcccgctgtacggctcgatcgcggcgatcatgaccacggtcaacggcagcgacggcgagaccctggcccaccatatctcgaccttcttcgtacagatcgcctcccacgacacctacgcgctgctgatgggcgtgtactcggcggtgctgggcttcttcattccctccggcggcggcaagtggatcatcgaggcgccgtacgtgatgcaggtggccaacgagctgcaataccacctcggctgggcggtgcagatctacaacgccgccgaggcgctgccgaacctgatcaacccgttctacatgctgccgttgctcggcgtgctggggctgaaggcgcgcgacctgatcggcttctcgttcgtccagttgctggtgcacatcccgctggtgctggtgctgctctgggccctgggcagcaccctggcgtacatcccgccggtgatgccgtag

SEQ ID NO: 20872 - protein, 474 aa, Pseudomonas aeruginosa PAO1
MTAILPIQESRSARFAMRCSNWAERWFPDSWVFAALAILIVSLAALAMGAGPTATAKAFGDGFWSLIPFTMQMAFVVIGGYVVASSGPASRLIDLLARVPKNGRSAVCWVALVSMLASLLNWGLSLVFGGLLVRALARRSDLRMDYRAAGAAAYLGLGAVWALGLSSSAAQLQANPASLPPSILAITGVIPFTETIFLWQSGVMLLALILVSLVIAYMTAPSAASARDAKDCGVDVSFTAPARLAPTRPGEWLEHSPLLIILLVLLAGGWLVHEFSTKPAILAISGLNTYNLLFLMLGALLHWRPRSFLDAVARAVPTTTGVLIQFPLYGSIAAIMTTVNGSDGETLAHHISTFFVQIASHDTYALLMGVYSAVLGFFIPSGGGKWIIEAPYVMQVANELQYHLGWAVQIYNAAEALPNLINPFYMLPLLGVLGLKARDLIGFSFVQLLVHIPLVLVLLWALGSTLAYIPPVMP

SEQ ID NO: 20873 - DNA, 1377 bp, Fusobacterium nucleatum subsp. nucleatum ATCC 25586
  CDS (1)..(1377): transl_table=11
atggaaagtgtaaaagaaagaaaaggaatctttaagagatttacttcaatgtgtgtgcgtgttatggaaagatggcttccagatccatttatattttgtgctttgttaacttttatagtgtttataggagctatatttcttacaaaagcaactcctttacaagtagttggattttgggctgatggtttttggtctttactttctttctcaatgcaaatggcattagttttggttacagggcatactttggcaagttccagattatttaaaaagatgttgtcaacatttgcttctggaataaaaggaccaaaacaagcaatacttattgtatcaatagtttcaggaatagcttgtgcattaaactggggttttggacttgttataggagctttatttgcaaaagaaattgcaaaaaaagtgaaaggagtagattatagacttcttatagcttcagcttacacaggattcttagtatggcatggtggattatcaggttctattccattacaacttgcaagtggaggagaaggattagcaaaacaaacagcaggagtagtaacagaagctataccaacaagtcaaactttattttcaccaatgaatatttttataattgttggacttttaataatagtacctttgttgaatatggcaatgttcccaagtaaagatgaaattgttgaagttgatccaaaattattagtggaaccagaagaagttgttatggatacttcaaaaatgacaccagcagaaagagttgaaaatagtagtgcagtatctattttactttcaattatgggctttgtatacataggatattatttaaagacaaaaggatttgcattaaatcttaatttagtaaactttatattcttattcttaggaattttattacatggaactccaagaagatatttgaatgcactagcagaagcaacaaaaggtgcaggaggaatattactacaatttccattttatgcaggtatcatgggaataatggtaggagcagatgcagatggaatgtctcttgcaaaacttatgtctaatttctttgtaagtatatctactgaaaaaacattcccagtattttcatttataagtgctggagtagtaaatttctttgttccatcaggtggaggacaatgggcagttcaagctccaatagtaatgccagcaggacaagcaattggtgtatcagcagcaaagtcagctatggcaatagcttggggagatgcttggacaaatatgatacaaccattctgggctttaccagcattaggaatagcaggtttgggagctaaagatataatgggttattgtctgatagtaactgttgtatcaggaatatttatttgtacaggtttcttattattctaa

SEQ ID NO: 20874 - protein, 458 aa, Fusobacterium nucleatum subsp. nucleatum ATCC 25586
MESVKERKGIFKRFTSMCVRVMERWLPDPFIFCALLTFIVFIGAIFLTKATPLQVVGFWADGFWSLLSFSMQMALVLVTGHTLASSRLFKKMLSTFASGIKGPKQAILIVSIVSGIACALNWGFGLVIGALFAKEIAKKVKGVDYRLLIASAYTGFLVWHGGLSGSIPLQLASGGEGLAKQTAGVVTEAIPTSQTLFSPMNIFIIVGLLIIVPLLNMAMFPSKDEIVEVDPKLLVEPEEVVMDTSKMTPAERVENSSAVSILLSIMGFVYIGYYLKTKGFALNLNLVNFIFLFLGILLHGTPRRYLNALAEATKGAGGILLQFPFYAGIMGIMVGADADGMSLAKLMSNFFVSISTEKTFPVFSFISAGVVNFFVPSGGGQWAVQAPIVMPAGQAIGVSAAKSAMAIAWGDAWTNMIQPFWALPALGIAGLGAKDIMGYCLIVTVVSGIFICTGFLLF

SEQ ID NO: 20875 - DNA, 1407 bp, Streptococcus pyogenes MGAS8232
  CDS (1)..(1407): transl_table=11
atgaataacatcaaaaccaaaaaaaggtttatggatcgctatattgatggctttatgaaatggatgccagaatcgctttttatctgttttattttaacctttttagtcgttactatgtctgtgttgatgacggatagtccctttattggtacggaaaagacgggcgggattatctatggctgggtaaatggtttttgggggctgttgtcctttgccatgcagatgactattttacttgcgacagggaatgctgtagcgagttctccacctgctcataagatgtttaagttccttgccaaactgcctcaaaccaggactcagatttttattttttctattgtagtaggctctatctttggctttttacactggggtcttggtatgatggttgccattgtgtttgggaaagagttgcttgttcaggctaggcaaaaagggattaaggtgcatacacctttgtttgttgctactttattttttacctttttaccagctacttctggtttatcaggtgctgcggtgctttattcggccactccagattatttgcgaaatagtgtcgcagatgcttataaacaggttgttcctgaaagtgttcctctgacagaatcagttttgaatcttccatttatcagtcttttagtggtgtgtatgctggtaccgttttgctttgctttattggcgcatccaaaagatgaaactaaaatcatggaacttgatgatgagatctatcaccatagtcttgataccgcttcacatgttgttattgcaagaaacacacctgctgaaaagatgaacgcatctcgtttagtgatgtatcttgttggtggggccattgttagctatagcctttatcatttttcggtggtgggcttgtctggtctagatctcaatagttttaactttttatttttaggcttagggttgcttctttgtggtcaacaaggaccagaatattatggttccttattcaaagatggggtcatgtcatcttggggcttggtgcttcagtttccattttacgctggtatttttggaatcattcaaagtacaggtctaggactagagatttcccatttctttgtcgctatttcaaatgggacaacatggccggtttttgcttatctttactcggctttgctgaatattgcggtaccatcaggaggctcaaaatttgtgattgaagctccctatatcgtccctgcaactatcgaagttggtaatgacctaggtaagattttgcaggcttatcaattaggagatgccacaacaaacttgatagttcctttttgggccttatcttacctctcaaacttcaaactaaaattcaatcagattgtggcttatactattccttgtgtcttggtggtcacaggtattgccatcatttacctatttgtattttag

SEQ ID NO: 20876 - protein, 468 aa, Streptococcus pyogenes MGAS8232
MNNIKTKKRFMDRYIDGFMKWMPESLFICFILTFLVVTMSVLMTDSPFIGTEKTGGIIYGWVNGFWGLLSFAMQMTILLATGNAVASSPPAHKMFKFLAKLPQTRTQIFIFSIVVGSIFGFLHWGLGMMVAIVFGKELLVQARQKGIKVHTPLFVATLFFTFLPATSGLSGAAVLYSATPDYLRNSVADAYKQVVPESVPLTESVLNLPFISLLVVCMLVPFCFALLAHPKDETKIMELDDEIYHHSLDTASHVVIARNTPAEKMNASRLVMYLVGGAIVSYSLYHFSVVGLSGLDLNSFNFLFLGLGLLLCGQQGPEYYGSLFKDGVMSSWGLVLQFPFYAGIFGIIQSTGLGLEISHFFVAISNGTTWPVFAYLYSALLNIAVPSGGSKFVIEAPYIVPATIEVGNDLGKILQAYQLGDATTNLIVPFWALSYLSNFKLKFNQIVAYTIPCVLVVTGIAIIYLFVF

SEQ ID NO: 20877 - DNA, 1326 bp, Oceanobacillus iheyensis HTE831
  CDS (1)..(1326): transl_table=11
ttgaaaacggtaacttctttttttgacagaatggttcaacggtatctgccagatgcttttttattcgccatcatcttaaccattatcgtattttttattgggttgttatttcctgataacggaccacttgaaatggttcaattttggggtaatggattttggggattattagaatttgcaatgcagatgtcacttgtcgtaattactggatacatcctagcaagcaccaatgtggtcaaaagatttttatctaggctgagtaaactagcaaacacacctgctcaagcaattattttagttacttttattgcattaatcgcatgttttatcaattatggttttggactcgtagtaggggctttatttgccactcatgttgcaaaacaagttccttccgttgattatcggttattaatcgccagcgcttatagtggttttctaatttggcatggtggattttccggatctgtaccattaactatcgctacagctggtcattttctggaaggacaagtaggtatcattcctattacagaaacattatttagtccttataatttgtttattgttatcactttattagtggcactaccattatttaatcgctaccttttaaatggaattgcagataataatacttactttgcagaaaaaattcaacaaacagagcaaaaaccaaatgttgatgctaatagtataccaacaacacctgctgaaaaattagaaaatagcccaatcgtctcgatgataattggaattttaggcttaagttttatcgtgtattattttgtaactaacggatttaatttaaatattaatattgttaattttatatttttgtttctgggaataattttacaccggacaccgagacaatttcttgataatgtcagtcaaggagttaaaaatgctggcgcgatcattatccaatttccattttatgccggaattatgggaatgatggttgattcaggtatttcagaggcattgtctttgtggtttgtaaatatttctactgagtatacactcccatttctatcttttattagtgcgggtatcgtaaatttcttcattccatctggtggtggtcagtgggcaatacagggtccaattatgattgaatctgcacttgaattaggggcagacacagctaaaacagccatggggattgcatggggagatgcatggacaaatatgattcagcctttttgggcacttccagcacttgctattgcaggcttaaaagtgagagatattatgggattctgtgtcatgattttaatatttagctttatccccatatcaattggactgttattcttttaa

SEQ ID NO: 20878 - protein, 441 aa, Oceanobacillus iheyensis HTE831
MKTVTSFFDRMVQRYLPDAFLFAIILTIIVFFIGLLFPDNGPLEMVQFWGNGFWGLLEFAMQMSLVVITGYILASTNVVKRFLSRLSKLANTPAQAIILVTFIALIACFINYGFGLVVGALFATHVAKQVPSVDYRLLIASAYSGFLIWHGGFSGSVPLTIATAGHFLEGQVGIIPITETLFSPYNLFIVITLLVALPLFNRYLLNGIADNNTYFAEKIQQTEQKPNVDANSIPTTPAEKLENSPIVSMIIGILGLSFIVYYFVTNGFNLNINIVNFIFLFLGIILHRTPRQFLDNVSQGVKNAGAIIIQFPFYAGIMGMMVDSGISEALSLWFVNISTEYTLPFLSFISAGIVNFFIPSGGGQWAIQGPIMIESALELGADTAKTAMGIAWGDAWTNMIQPFWALPALAIAGLKVRDIMGFCVMILIFSFIPISIGLLFF

SEQ ID NO: 20879 - DNA, 1332 bp, Shewanella oneidensis MR-1
  CDS (1)..(1332): transl_table=11
atgttaaccaaagcagcaaaacctctggtcaagctggtcgaccgttatttacccgatccctatatctttgtcttactcctcacgttagtcgtgatgatctcggccgtggtggccgagcaaaaaacacccctggacgtcatcagctactggggcgatggtttttgggcactgctgagtttttcaatgcagatgctattagtgctggtggcgggatttatgctcgccagctcgccaccgattaaaaaattgcttgatgcgattgctggattcgctaagtctgcgccgcaggcgattatcttagtgacgttggtttctctggctgccagttggattaactggggctttggtttggtggtcggcgcgttatttgccaaagcgttagcccgcaagttacgagtggactaccgtttgttggttgccagtgcgtactcgggttttgtggtttggcacggtggcttggcgggttcgattccgttaaccattgccactgctgggcactttgcagaagcacagattggcattattcctaccagtgataccatttttgccagttttaacttgctgttagtgttgattttatttgtggtgatgccgctggtaaaccgctttatgttgccagaagacaaagacagcatctatatcgaccctaaggcgcttgaagatgtgagcagtgaagagagcaacacagggcatgcgccaaacgcgatgatgcgtcccgcggataaattagaaaacagccgtttactgggctggagtgtaggcggcgcagggctggtgtacttaggttattattttgcggtgcaaggcggcagcttaaaccttaatttagttaactttttgtttttgttcctcgcgattgtgctgcatcaaacgccacgcagtttactgcttagccttaacgaagcgattaaaggcggcgcgggtattgtgattcagtttcctttctacgctggcattatggcggtgatgatgcaatcgggattagcccaaagcatctccgaaggattcgtggccattgccagcgctgaaagcctgccattttggagttttatcagcgcaggcatcgtgaatatttttgtgccttcgggcggcggacaatgggcggtgcaggccccgattatgttgcctgctgccgaagccttgggcgccgatgtggcacgtgttgccatggctgtagcatggggtgatgcgtggacgaatcttattcagcctttctgggcactgcctgtgctggccattgccggattaaaggcgcgggatattatgggattttgtttaatgcagttgattatcacaggtgtgattatcagtatcgcgttgagctggttttaa

SEQ ID NO: 20880 - protein, 443 aa, Shewanella oneidensis MR-1
MLTKAAKPLVKLVDRYLPDPYIFVLLLTLVVMISAVVAEQKTPLDVISYWGDGFWALLSFSMQMLLVLVAGFMLASSPPIKKLLDAIAGFAKSAPQAIILVTLVSLAASWINWGFGLVVGALFAKALARKLRVDYRLLVASAYSGFVVWHGGLAGSIPLTIATAGHFAEAQIGIIPTSDTIFASFNLLLVLILFVVMPLVNRFMLPEDKDSIYIDPKALEDVSSEESNTGHAPNAMMRPADKLENSRLLGWSVGGAGLVYLGYYFAVQGGSLNLNLVNFLFLFLAIVLHQTPRSLLLSLNEAIKGGAGIVIQFPFYAGIMAVMMQSGLAQSISEGFVAIASAESLPFWSFISAGIVNIFVPSGGGQWAVQAPIMLPAAEALGADVARVAMAVAWGDAWTNLIQPFWALPVLAIAGLKARDIMGFCLMQLIITGVIISIALSWF

SEQ ID NO: 20881 - DNA, 1419 bp, Pseudomonas putida KT2440
  CDS (1)..(1419): transl_table=11
gtggccgctgaaattcaagacagccgctccgcgcgctttgccttgcgctgctccaactgggctgaacgctggttccccgactcctgggtgttcgccgcgctggcggtgctgctggtgtgtatcggcgcactggccatgggcgccaaaccgaccgacaccgccaaggcgtttggcgacggcttctggagcctgataccgttcaccatgcagatggcattcgtggtcatcggcggttatgtggtggccagctcgccgcccgccgcgaggctgatcgatcgtttggcgcgcatccccggcaatgggcgctcggcagtgtgctgggtagcactgatctcgatgctggcctccttgctcaactgggggctgtcgctggtgtttggaggtttgctggtgcgcgccctggcaaggcgcaccgacctgaagatggattaccgcgcagcgggtgcggccgcttacctgggcctgggtgcggtgtgggcgttgggcctgtcatcctcggcggcgcagctgcaggccaacccggccagcctgccaccttcaatcctgtcgataaccggggtgatcccctttaccgaaaccatctttctctggcagtccggcgtgatgctggcggcgctggtggtggtctcgctggtgatcgcctacgccaccgctccgggcccgaacagcgcccgtagcgcagaagactgcggtgtcgaccccagcttcacagcgccacccgcgccgcaacgcacgcgcccgggagagtggctggaacacagcccgatccttatcctgctgttggtggccttggctgctggctggctgtatcaggagtttgcgacgaaacctgcgattaccgccatctcggggctcaacacctacaacctgttgttcatcatgctcggtgctttgctgcactggcgcccacgcagcttccttgacgcggtggcgcgtgcggtaccgaccaccaccggtgtgctgatccagttcccgctgtatggttcgatcgccgccatcctcacccaggtgaagggcgtcgatgaacagaccctggcccaccatatttcactgttcttcacccagattgccacccatgacacgtatgccgtgctgatgggcgtgtattcggctgtgctgggcttcttcatcccttcgggcggcggcaagtggatcatcgaggccccttacgtgatgctggtggccaacgacctgcagtaccacctggggtgggccgtgcagatctacaacgcggccgaagccttgccgaacctgatcaacccgttctacatgctgccgttgctgggcgtgctggggctcaaggcgcgcgacctgatcggtttctcgttcgtgcaattgctggtgcatgtgccgttggtgctggtgttgctgtgggcgctgggtacaacgctgcagtacgtgccgccagtgatgccttga

SEQ ID NO: 20882 - protein, 472 aa, Pseudomonas putida KT2440
MAAEIQDSRSARFALRCSNWAERWFPDSWVFAALAVLLVCIGALAMGAKPTDTAKAFGDGFWSLIPFTMQMAFVVIGGYVVASSPPAARLIDRLARIPGNGRSAVCWVALISMLASLLNWGLSLVFGGLLVRALARRTDLKMDYRAAGAAAYLGLGAVWALGLSSSAAQLQANPASLPPSILSITGVIPFTETIFLWQSGVMLAALVVVSLVIAYATAPGPNSARSAEDCGVDPSFTAPPAPQRTRPGEWLEHSPILILLLVALAAGWLYQEFATKPAITAISGLNTYNLLFIMLGALLHWRPRSFLDAVARAVPTTTGVLIQFPLYGSIAAILTQVKGVDEQTLAHHISLFFTQIATHDTYAVLMGVYSAVLGFFIPSGGGKWIIEAPYVMLVANDLQYHLGWAVQIYNAAEALPNLINPFYMLPLLGVLGLKARDLIGFSFVQLLVHVPLVLVLLWALGTTLQYVPPVMP

SEQ ID NO: 20883 - DNA, 1419 bp, Pseudomonas syringae pv. tomato str. DC3000
  CDS (1)..(1419): transl_table=11
atggccgccaacatcgaagaaagccgctccgcccgatttgccttgcggtgtgccgcctgggctgagcgctggtttccggattcgtgggtattcgccgcactagcggtggtcatcgtcacgctggcgacgctcgccatcggtgcgcgtccgaccgacgccgccaaggccttcggagacggtttctggagcctgattccgttcaccatgcagatggccttcgtggtcatcggtggttacgtggtcgccagctcaccgcccgcagtacgcctgatcgaccgtctggcacgggtgccgcgcaacggccgctcggcggtggcctgggtggcgctgatttccatgctggcctcgctgctcaactgggggctgtcactggtgttcggcggtttgctggtgcgtgcgctcgcccgccgcaccgacctgcgtatggactaccgcgcagccggtgccgccgcctatctggggcttggcgcggtatgggcgctggggctgtcatcgtccgctgcacagttgcaggccaacccggccagcctgccgccatcgattctggcgatcaccggtgtaattccgttcactgaaaccatctttctctggcagtccggagtcatgctcgcagcgctgctcgtcatctcgctgatcgtcgcctatgccacggcgcccggccccaacagcgcccgcgacgccaaggcctgcggcatcgacccggcgttcaatctgccgccgctgcccgccagaacccggccaggcgaatggctggaatacagcccgctgctgattatcctgatggttgtgctgggggttggctggctgttcaacgagttttccaacaagcctgcaatcactgcgatatcggggctcaatacctacaactttctgttcatcatgctcggtgcgctattgcactggcggccgcgcagttttctcgatgccgtggcgcgggccgtgccgaccaccaccggcgtgctgattcagtttccgctgtacggctcgatcgccgccttgctgacaacggtcaagggcgctgatgcccagaccctggcgcattacatttcgacgttcttcaccagcattgcttcccacgacacctacgcgattctgatgggcgtctattcggcgattctggggttcttcattccctcgggtggcggcaagtggatcatcgaagccccttacgtgatgcaggtggccaatgatctgcagtatcacctcggctgggcagtgcagatctacaacgcagccgaagccttgcccaacctgatcaacccgttctacatgctgccgctactgggcgtgctgggcctgaaggcgcgggacctgatcggcttttcgttcgtgcagttgcttgtccatgcgccgctggtgctgtttctgctttgggcgctgggcaccaccctgacgtatacgccgccgatcatgccctga

SEQ ID NO: 20884 - protein, 472 aa, Pseudomonas syringae pv. tomato str. DC3000
MAANIEESRSARFALRCAAWAERWFPDSWVFAALAVVIVTLATLAIGARPTDAAKAFGDGFWSLIPFTMQMAFVVIGGYVVASSPPAVRLIDRLARVPRNGRSAVAWVALISMLASLLNWGLSLVFGGLLVRALARRTDLRMDYRAAGAAAYLGLGAVWALGLSSSAAQLQANPASLPPSILAITGVIPFTETIFLWQSGVMLAALLVISLIVAYATAPGPNSARDAKACGIDPAFNLPPLPARTRPGEWLEYSPLLIILMVVLGVGWLFNEFSNKPAITAISGLNTYNFLFIMLGALLHWRPRSFLDAVARAVPTTTGVLIQFPLYGSIAALLTTVKGADAQTLAHYISTFFTSIASHDTYAILMGVYSAILGFFIPSGGGKWIIEAPYVMQVANDLQYHLGWAVQIYNAAEALPNLINPFYMLPLLGVLGLKARDLIGFSFVQLLVHAPLVLFLLWALGTTLTYTPPIMP

SEQ ID NO: 20885 - DNA, 1407 bp, Streptococcus pyogenes SSI-1
  CDS (1)..(1407): transl_table=11
atgaataacatcaaaaccaaaaaaaggtttatggatcgctatattgatggctttatgaaatggatgccagaatcgctttttatctgttttattttaacctttttagtcgttactatgtctgtgttgatgacggatagtccctttattggtacggaaaagacgggcgggattatctatggctgggtaaatggtttttgggggctgttgtcctttgccatgcagatgactattttacttgcgacagggaatgctgtagcgagttctccacctgctcataaaatgtttaagtcccttgccaaactgcctcaaacaaggactcagatttttattttttctattgtagtaggctctatctttggctttttacactggggtcttggtatgatggttgccattgtgtttgggaaagagttgcttgttcaggctaggcaaaaagggattaaggtgcatacacctttgtttgttgctactttattttttacctttttaccagctacttctggtttatctggtgctgcggtgctttattcggctactccagattatttgcgaaatagtgtcgcagatgcttataaacaggttgttcctgaaagtgttcctctgacagaatcagttttgaatcttccatttatcagtcttttagtggtgtgtatgctggtaccgctttgctttgctttattggcgcacccaaaagatgaaactaaaatcatggaacttgatgatgagatctatcaccatagtcttgataccgcttcacatgttgttattgcaagaaacacacctgctgaaaagatgaacgcatctcgcttagtgatgtatcttgttggtggggccattgttagctatagcctttatcatttttcggtggtgggcttgtctggtctagatctcaatagttttaactttttatttttaggcttagggttgcttctttgtggtcaacaaggaccagaatattatggttccttattcaaagatggggtcatgtcatcttggggcttggtgcttcagtttccattttacgctggtatttttggaatcattcaaagtacaggtctaggactagagatttcccatttctttgtcgctatttcaaatgggacaacatggccggtctttgcttatctttactcggctttgctgaatattgcggtaccatcaggaggctcaaaatttgtgattgaagctccctatatcgtccctgcaactatcgaagttggtaatgacttaggtaagattttgcaggcttatcaattaggagatgccacaacaaacttgatagttcctttttgggccttatcttacctctcaaacttcaaactaaaattcaatcaaattgtggcttatactattccttgtgtcttggtggtcacaggtattgccatcatttacctatttgtattttag

SEQ ID NO: 20886 - protein, 468 aa, Streptococcus pyogenes SSI-1
MNNIKTKKRFMDRYIDGFMKWMPESLFICFILTFLVVTMSVLMTDSPFIGTEKTGGIIYGWVNGFWGLLSFAMQMTILLATGNAVASSPPAHKMFKSLAKLPQTRTQIFIFSIVVGSIFGFLHWGLGMMVAIVFGKELLVQARQKGIKVHTPLFVATLFFTFLPATSGLSGAAVLYSATPDYLRNSVADAYKQVVPESVPLTESVLNLPFISLLVVCMLVPLCFALLAHPKDETKIMELDDEIYHHSLDTASHVVIARNTPAEKMNASRLVMYLVGGAIVSYSLYHFSVVGLSGLDLNSFNFLFLGLGLLLCGQQGPEYYGSLFKDGVMSSWGLVLQFPFYAGIFGIIQSTGLGLEISHFFVAISNGTTWPVFAYLYSALLNIAVPSGGSKFVIEAPYIVPATIEVGNDLGKILQAYQLGDATTNLIVPFWALSYLSNFKLKFNQIVAYTIPCVLVVTGIAIIYLFVF

SEQ ID NO: 20887 - DNA, 1350 bp, Bordetella pertussis Tohama I
  CDS (1)..(1350): transl_table=11
atgaataaactcacgtcctttttcacggagctgatgcgcaagtatctgcccgatccattcgttttcgcgatcgcgctgaccctgttgaccgtgctgatggctttcggcatcgaaggccagccgctggaccagatcacccgtgaatggggcaagggattctggagcctgctggccttcaccacccagatggccgtcatcctggccatgggctatgtgctggccaccgcgccgctgaccgaccgcctgctcgaccgcatcgtcagccacgtgcaccagccgcgcaccgccatcattgtcgcgaccctggtcggcggcgtcggcagctacctgaactgggggttcggcctggtgatcggcggcgtggtcgccaagaaactggcgctgaaggtcaagggcgtgcactacccgctgatcatcgccgccgcctacagcggcttcacgatgtacggcctgggcctgtcggccagcatcccggtgctggtcaccacgcccggccatccgacggccgaccagatgggcgtgattccgctgtcggaaaccattttctcgctgcccatgctgatcaccagcctggtgatcatcgtcaccttgccgctgctcaacgcctggctgcaccccaagcagggcgaacaggtcgtcgaagtggacccggccatcgaccagagcagcgcgccggccaagaccgccgacgagctgaccgccgaggatacgctggccagccgcctgaacaacagccgcatcctcagcctgctgatcggcctgctgggcatcgcctatgtggtgttctacttcatggacggcaagtcgctggacctgaacctgatcaacttcatcatcctgttcctgggcatcatcctgctgggcacccccgcggcctatgtggccaagctgaacgaaggcatcaagaccatctccggcatcatcctgcagtaccccttctatgcgggcatcatggccatcatggccatcatggccggctccgggctggtggccaccatttccaaggtgttcgtcgacgtcgcctcgccgggcagcctgccgttctggggcctgatcagctcgttcgtcatcaacttcttcgcgccctcggccggcggccactgggtgatccagggcccgttcatgatcgacgccgccaaggagatcggcagcgcgctcaaccagaccaccatggccgtgatgctgggcaacgcctggaacgacctggtgcagccgttctggatcctgcccgccctggcgctgtcgaagctgaaactgcgcgacgtgatgggctataccgtcatcatgatgctgtgggtcggcgtcatccacattgccgcggtgcttgcctggggttacctgacccactga

SEQ ID NO: 20888 - protein, 449 aa, Bordetella pertussis Tohama I
MNKLTSFFTELMRKYLPDPFVFAIALTLLTVLMAFGIEGQPLDQITREWGKGFWSLLAFTTQMAVILAMGYVLATAPLTDRLLDRIVSHVHQPRTAIIVATLVGGVGSYLNWGFGLVIGGVVAKKLALKVKGVHYPLIIAAAYSGFTMYGLGLSASIPVLVTTPGHPTADQMGVIPLSETIFSLPMLITSLVIIVTLPLLNAWLHPKQGEQVVEVDPAIDQSSAPAKTADELTAEDTLASRLNNSRILSLLIGLLGIAYVVFYFMDGKSLDLNLINFIILFLGIILLGTPAAYVAKLNEGIKTISGIILQYPFYAGIMAIMAIMAGSGLVATISKVFVDVASPGSLPFWGLISSFVINFFAPSAGGHWVIQGPFMIDAAKEIGSALNQTTMAVMLGNAWNDLVQPFWILPALALSKLKLRDVMGYTVIMMLWVGVIHIAAVLAWGYLTH

SEQ ID NO: 20889 - DNA, 1464 bp, Bordetella pertussis Tohama I
  CDS (1)..(1464): transl_table=11
atgcccaacaatcatctagccgccgctgcccccgcacagggcaggcaggccatagccagtcccatggaacgcttctcccaggccatggtcgcctgggcggagaaatggtttcccgatgcctacgtcttcgtggtcgtggcgtgcgcggtggtcgcgctcggcgccgtcctgcacggcggcgacccgctggccgtcagcaaggccttcggcgaaggcttctggagcatcatccccttcacgatgcagatggccatggtggccattaccggctacgtgctggccttgtccccgcccgtggcgcggctgctgcgggcgctggcgcacgtgccctcgaccccgcgcggcgccgtggtgttcatcggcaccctgagcatcctgctgtcgctggtcaactggggcctgagcctgattttctcgggcttgctggtgcgcgaaatggcccgtcgcaccgacctgcgtctggattaccgggcagccggcgccgccgggtacctggggctgggctgcgggttcacgctgggcatgagctcgtcggccgcgcagctgcaggccacgccggccagcattccggcgtcgctgatgcccatcaccggcgtgatcggcttctccgaaaccatactgacctggcagaacctggtggtggtgatcctggttaccgtggtttcgggactggtgtgctacttcacggcgcccagcccggagcgctccttgaccgcccaggaccttggcgtggacctgacggaacccgaggcgcaggcggcgcaacgccagcgccccggcgattacctggagttcagcccctggctgaccgtggccgttgtcgggctggcgtcgggatggctgtacctcaccttccgcagcggcaaccccttcatcacgatgtcgcagctgaacacctacaacttcgtgttcctgttgctgggcctgctgctgcactggcggccgcgcagcttcctggagagtttcggccgcgccatgcccagcatcggcggcgtgatgctgcagttcccgttctacggcggcatcggctacgtgctcaccaaggtcgccaacgtgcaggggcatacgttgtcggatgcgatcgcgcactggttcgtcagcctggcgcacgacagcagcgtgttctcgatactggtcagcatctattcggcgttcctcggcttcttcatcccgtcggccggcggcaagtgggtgatcgaggcgccgtacatcatggacgcggccaaccagatccaggcccacctgggctggaccgtcatggtctacaacatcgccgaaacgctgcccaacttcatcaacccgttctggatgctgccgctgctggggatactgcgcctcaaatccaaggacctggtcggctataccgccatgcagttcctggtgcacttccccatcgtcgtggccgccggcgcgatcctgatgcacaccttcagctatgttccgcccgtcatcccgggacagtga

SEQ ID NO: 20890 - protein, 487 aa, Bordetella pertussis Tohama I
MPNNHLAAAAPAQGRQAIASPMERFSQAMVAWAEKWFPDAYVFVVVACAVVALGAVLHGGDPLAVSKAFGEGFWSIIPFTMQMAMVAITGYVLALSPPVARLLRALAHVPSTPRGAVVFIGTLSILLSLVNWGLSLIFSGLLVREMARRTDLRLDYRAAGAAGYLGLGCGFTLGMSSSAAQLQATPASIPASLMPITGVIGFSETILTWQNLVVVILVTVVSGLVCYFTAPSPERSLTAQDLGVDLTEPEAQAAQRQRPGDYLEFSPWLTVAVVGLASGWLYLTFRSGNPFITMSQLNTYNFVFLLLGLLLHWRPRSFLESFGRAMPSIGGVMLQFPFYGGIGYVLTKVANVQGHTLSDAIAHWFVSLAHDSSVFSILVSIYSAFLGFFIPSAGGKWVIEAPYIMDAANQIQAHLGWTVMVYNIAETLPNFINPFWMLPLLGILRLKSKDLVGYTAMQFLVHFPIVVAAGAILMHTFSYVPPVIPGQ

SEQ ID NO: 20891 - DNA, 1434 bp, Bordetella parapertussis 12822
  CDS (1)..(1434): transl_table=11
ttgccgcccgtcttccggggcctgtccccgcggggacaggccccccacaccacgcaaacgcaacgccttaccaagaaatatgtaggaagcaccatgaataaactcacgtcctttttcacggagctgatgcgcaagtatctgcccgatccattcgttttcgcgatcgcgctgaccctgttgaccgtgctgatggctttcggcatcgaaggccagccgctggaccagatcacccgtgaatggggcaagggattctggagcctgctggccttcaccacccagatggccgtcatcctggccatgggctatgtgctggccaccgcgccgctgaccgaccgcctgctcgaccgcatcgtcagccacgtgcaccagccgcgcaacgccatcattgtcgcgaccctggtcggcggcgtcggcagctacctgaactggggtttcggcctggtgatcggcggcgtggtcgccaagaaactggcgctgaaggtcaagggcgtgcactacccgctgatcatcgccgccgcctacagcggcttcacgatgtacggcctgggcctgtcggccagcatcccggtgctggtcgccacgcccggccatccgacggccgaccagatgggcgtgattccgctgtcggaaaccattttctcgctgcccatgctgatcaccagcctggtgatcatcgtcaccctgccgctgctcaacgcctggctgcaccccaagcagggcgaaaaggtcgtcgaagtggacccggccatcgaccagggcagcgcgccggccaaggccgccgacgagctgaccgccgaggatacgctggccagccgcctgaacaacagccgcatcctcagcctgctgatcggcctgctgggcatcgcctatgtggtgttctatttcatggacggcaagtcgctggacctgaacctgatcaacttcatcatcctgttcctgggcatcatcctgctgggcacccccgcggcctatgtggccaagctgaacgaaggcatcaagaccatctccggcatcatcctgcagtaccccttctatgcgggcatcatggccatcatggccggctccgggctggtggccaccatttccaaggtcttcgtcgacgtcgcctcgccgggcagcctgccgttctggggcctgatcagctcgttcgtcatcaacttcttcgcgccctcggccggcggccactgggtgatccagggcccgttcatgatcgacgccgccaaggaaatcggcagcgcgctcaaccagaccaccatggccgtgatgctgggcaacgcctggaacgacctggtgcagccgttctggatcctgcccgccctggcgctgtcgaagctgaaactgcgcgacgtgatgggctataccgtcatcatgatgctgtgggtcggcgtcatccacattgccgcggtgcttgcctggggttacctgacccactga

SEQ ID NO: 20892 - protein, 477 aa, Bordetella parapertussis 12822
MPPVFRGLSPRGQAPHTTQTQRLTKKYVGSTMNKLTSFFTELMRKYLPDPFVFAIALTLLTVLMAFGIEGQPLDQITREWGKGFWSLLAFTTQMAVILAMGYVLATAPLTDRLLDRIVSHVHQPRNAIIVATLVGGVGSYLNWGFGLVIGGVVAKKLALKVKGVHYPLIIAAAYSGFTMYGLGLSASIPVLVATPGHPTADQMGVIPLSETIFSLPMLITSLVIIVTLPLLNAWLHPKQGEKVVEVDPAIDQGSAPAKAADELTAEDTLASRLNNSRILSLLIGLLGIAYVVFYFMDGKSLDLNLINFIILFLGIILLGTPAAYVAKLNEGIKTISGIILQYPFYAGIMAIMAGSGLVATISKVFVDVASPGSLPFWGLISSFVINFFAPSAGGHWVIQGPFMIDAAKEIGSALNQTTMAVMLGNAWNDLVQPFWILPALALSKLKLRDVMGYTVIMMLWVGVIHIAAVLAWGYLTH

SEQ ID NO: 20893 - DNA, 1464 bp, Bordetella parapertussis 12822
  CDS (1)..(1464): transl_table=11
atgcccaacaatcatctaaccgccgctgcccccgcacagggcagagaggccatagccagtcccatggaacgcttctcccaggccatggtcgcctgggcggagaaatggtttcccgatgcctacgtcttcgtggtcgtggcgtgcgcggtggtcgcgcttggcgccatcctgcacggcggcgatccgcttgccgtcagcaaggcgttcggcgaaggcttctggagcatcatccccttgaccatgcagatggccatggtggccatcaccggctacgtgctggccttgtcgccgcccgtggcgcggctgctgcgggcgctggcgcgcgtgccctcgaccccgcgcggcgccgtggtgttcatcggcaccctgagcatcctgctgtcgctggtcaactggggcctgagcctgattttctcgggcctgctggtgcgcgaaatggcccgtcgcaacgatctgcgcctggactaccgcgcggccggcgcggccgggtacctggggctgggctgcgggttcacgctgggcatgagctcgtcggccgcgcagctgcaggccacgccggccagcattccggcctcgctgatgcccatcaccggcgtgatcggcttctccgaaaccatactgacctggcagaacctggtggtagtgatcctggttaccgtggtttcgggactggtgtgctacttcacggcgcccagcccggagcgctccttgaccgcccaggacctgggcgtggacctgaccgaacccgaggcgcaggcggcgcaacgccagcgccccggcgattacctggagttcagcccctggctgaccgtggccgtggtcgggctggcctcggggtggctgtatctcaccttccgcagcggcaacccgttcatcaccatgtcgcagctgaacacctacaacttcgtgttcctgctgctgggcctgctgctgcactggcggccgcgcagcttcctggagagtttcggccgcgccatgcccagcatcggcggcgtgatgctgcagtttccgttctacggcggcatcggctacgtgctgaccaaggtcgccaacgtgcaggggcataccctgtcggacgcgatcgcgcactggttcgtcagcctggcgcacgacagcagcgtgttctcgatactggtcagcatctattcggcattcctcggcttcttcattccgtcggccggcggcaagtgggtgatcgaggcgccgtacatcatggacgcggccaaccagatccaggcccacctgggctggaccgtcatggtctacaacatcgccgaaacgctgcccaacttcatcaacccgttctggatgctgccgctgctggggatactgcgcctcaaatccaaggacctggtcggctataccgccatgcagttcctggtgcacttccccatcgtcgtggccgccggcgcgatcctgatgcacaccttcagctatgtcccgcccgtcatcccgggacagtga

SEQ ID NO: 20894 - protein, 487 aa, Bordetella parapertussis 12822
MPNNHLTAAAPAQGREAIASPMERFSQAMVAWAEKWFPDAYVFVVVACAVVALGAILHGGDPLAVSKAFGEGFWSIIPLTMQMAMVAITGYVLALSPPVARLLRALARVPSTPRGAVVFIGTLSILLSLVNWGLSLIFSGLLVREMARRNDLRLDYRAAGAAGYLGLGCGFTLGMSSSAAQLQATPASIPASLMPITGVIGFSETILTWQNLVVVILVTVVSGLVCYFTAPSPERSLTAQDLGVDLTEPEAQAAQRQRPGDYLEFSPWLTVAVVGLASGWLYLTFRSGNPFITMSQLNTYNFVFLLLGLLLHWRPRSFLESFGRAMPSIGGVMLQFPFYGGIGYVLTKVANVQGHTLSDAIAHWFVSLAHDSSVFSILVSIYSAFLGFFIPSAGGKWVIEAPYIMDAANQIQAHLGWTVMVYNIAETLPNFINPFWMLPLLGILRLKSKDLVGYTAMQFLVHFPIVVAAGAILMHTFSYVPPVIPGQ

SEQ ID NO: 20895 - DNA, 1446 bp, Bordetella parapertussis 12822
  CDS (1)..(1446): transl_table=11
gtgctgtctgtgcgcatccccgggcctgcgcgccaggcctgggctatcgtcgaacaacgaccatggcttgcgcgccgcccgttcattatccatggacctccgtggcgcctggccagccaacaggaggatgatgtgttcaaactgatgtctcgttcagccgtgaaaatggttgagcgctatttgcccgacccttacgtattcgtggtgctgctgacgctggtcgccgccggcgcggccatgatcatcgagggccagacccccatggccgtcgtgcgctggtggggcaacggcttctgggggctgctgactttcgcgatgcagatgctgctggtgctggtcaccggctacatgctggccagcacgccgctggtcaagcggatgctggcgcggctggccagcctggccaccagcgccggcggggcgatcatcctggtcagcgtggtgtcgctggccgccagctggatcaactggggcttcgggctggtggtgggcgcgctgttcgccaagcagatcgcccgccaggtgcgggtcgattaccggctgctggtggccagcgcctattccggcttcatcatctggcacggcggtctggccggctcgattccgctgaccatcgcgaccgaggggcatttctccgccgacaagatcggcatcattcccaccggcgatacgattttcgcggtattcaacctggtgatcgtggtggcgatgttcatcctcgtgccgctggtcaaccggctgatgctgcccgacgagaaggaaagcgtctatgtcgatccggcgcgcctggaagaggcctcggtgccggcctcggacgacgacaagcgtccggccgcgcgcctggagaacagcaggctgctggcctggctgatcgccgcgggcgggctggcctacatgttcgactactacgtcgtgcgcggcgccggcttgaacctcaatgtcatcaacttcagcttcctgatcctggccatcctgctgcacggcacgccgcgccgcctgctgaccagcctggacgaagccatcaagggaggcgcgggcatcgtgatccagttcccgttctatgcgggaatcatggccatcatgatggactcggggctggccgccaccttgtccgagtggttcgtgtcgatcgcctcggccgccacgctgccgttctggaccttcatcagcgccggcatcgtgaacatcttcattccgtcgggcggcgggcaatgggcggtgcaaagccccatcgtgatcagcgcggcgcaggcgctcggcgcggatatgccgagggtggcgatggccgttgcctggggcgacgcctggaccaacatgctccagccgttctgggccttgccggtgctggcgattgccggcctgaaggccaaggacatcatgggctattgcatcatccagctgctggtgaccggcgtcatcatttcggtgggactgagcttcttctag

SEQ ID NO: 20896 - protein, 481 aa, Bordetella parapertussis 12822
MLSVRIPGPARQAWAIVEQRPWLARRPFIIHGPPWRLASQQEDDVFKLMSRSAVKMVERYLPDPYVFVVLLTLVAAGAAMIIEGQTPMAVVRWWGNGFWGLLTFAMQMLLVLVTGYMLASTPLVKRMLARLASLATSAGGAIILVSVVSLAASWINWGFGLVVGALFAKQIARQVRVDYRLLVASAYSGFIIWHGGLAGSIPLTIATEGHFSADKIGIIPTGDTIFAVFNLVIVVAMFILVPLVNRLMLPDEKESVYVDPARLEEASVPASDDDKRPAARLENSRLLAWLIAAGGLAYMFDYYVVRGAGLNLNVINFSFLILAILLHGTPRRLLTSLDEAIKGGAGIVIQFPFYAGIMAIMMDSGLAATLSEWFVSIASAATLPFWTFISAGIVNIFIPSGGGQWAVQSPIVISAAQALGADMPRVAMAVAWGDAWTNMLQPFWALPVLAIAGLKAKDIMGYCIIQLLVTGVIISVGLSFF

SEQ ID NO: 20897 - DNA, 1464 bp, Bordetella bronchiseptica RB50
  CDS (1)..(1464): transl_table=11
atgcccaacaatcatctaaccgccgctgcccccgcacagggcagagaggccatagccagtcccatggaacgcttctcccaggccatggtcgcctgggcggagaaatggtttcccgatgcctacgtcttcgtggtcgtggcgtgcgcggtggtcgcgcttggcgccatcctgcacggcggcgatccgcttgccgtcagcaaggcgttcggcgaaggcttctggagcatcatccccttcaccatgcagatggccatggtggccatcaccggctacgtgctggccttgtcgccgcccgtggcgcggctgctgcgggcgctggcgcgcgtgccctcgaccccgcgcggcgccgtggtgttcatcggcaccctgagcatcctgctgtcgctggtcaactggggcctgagcctgattttctcgggcctgctggtgcgcgaaatggcccgtcgcaacgatctgcgcctggactaccgcgcggccggcgcggccgggtacctggggctgggctgcgggttcacgctgggcatgagctcgtcggccgcgcagctgcaggccacgccggccagcattccggcctcgctgatgcccatcaccggcgtgatcggcttctccgaaaccatactgacctggcagaacctggtggtggtggtcctggttaccgtggtttcgggactggtgtgctacttcacggcgcccagcccggagcgctccttgaccgcccaggacctgggcgtggacctgaccgaacccgaggcgcaggcggcgcaacgccagcgccccggcgattacctggagttcagcccctggctgaccgtggccgtggtcgggctggcctcggggtggctgtatctcaccttccgcagcggcaacccgttcatcaccatgtcgcagctgaacacctacaacttcgtgttcctgctgctgggcctgctgctgcactggcggccgcgcagcttcctggagagtttcggccgcgccatgcccagcatcagcggcgtgatgctgcagtttccgttctacggcggcatcggctacgtgctgaccaaggtcgccaacgtgcaggggcataccctgtcggacgcgatcgcgcactggttcgtcagcctggcgcacgacagcagcgtgttctcgatactggtcagcatctattcggcattcctcggcttcttcattccgtcggccggcggcaagtgggtgatcgaggcgccgtacatcatggacgcggccaaccagatccaggcccacctgggctggaccgtcatggtctacaacatcgccgaaacgctgcccaacttcatcaacccgttctggatgctgccgctgctggggatactgcgcctcaaatccaaggacctggtcggctataccgccatgcagttcctggtgcacttccccatcgtcgtggccgccggcgcgatcctgatgcacaccttcagctatgtcccgcccgtcatcccgggacagtga

SEQ ID NO: 20898 - protein, 487 aa, Bordetella bronchiseptica RB50
MPNNHLTAAAPAQGREAIASPMERFSQAMVAWAEKWFPDAYVFVVVACAVVALGAILHGGDPLAVSKAFGEGFWSIIPFTMQMAMVAITGYVLALSPPVARLLRALARVPSTPRGAVVFIGTLSILLSLVNWGLSLIFSGLLVREMARRNDLRLDYRAAGAAGYLGLGCGFTLGMSSSAAQLQATPASIPASLMPITGVIGFSETILTWQNLVVVVLVTVVSGLVCYFTAPSPERSLTAQDLGVDLTEPEAQAAQRQRPGDYLEFSPWLTVAVVGLASGWLYLTFRSGNPFITMSQLNTYNFVFLLLGLLLHWRPRSFLESFGRAMPSISGVMLQFPFYGGIGYVLTKVANVQGHTLSDAIAHWFVSLAHDSSVFSILVSIYSAFLGFFIPSAGGKWVIEAPYIMDAANQIQAHLGWTVMVYNIAETLPNFINPFWMLPLLGILRLKSKDLVGYTAMQFLVHFPIVVAAGAILMHTFSYVPPVIPGQ

SEQ ID NO: 20899 - DNA, 1314 bp, Bordetella bronchiseptica RB50
  CDS (1)..(1314): transl_table=11
gtgttcaaactgatgtctcgttcagccgtgaaaatggttgagcgctatttgcccgacccttacgtattcgtggtgctgctgacgctggtcgccgccggcgcggccatgatcatcgagggccagacccccatggccgtcgtgcgctggtggggcaacggcttctgggggctgctgactttcgcgatgcagatgctgctggtgctggtcaccggctacatgctggccagcacgccgctggtcaagcggatgctggcgcggctggccagcctggccaccagcgccggcggggcgatcatcctggtcagcgtggtgtcgctggccgccagctggatcaactggggcttcgggctggtggtgggcgcgctgttcgccaagcagatcgcccgccaggtgcgggtcgattaccggctgctggtggccagcgcctattccggcttcatcatctggcacggcggtctggccggctcgattccgctgaccatcgcgaccgaggggcatttctccgccgacaagatcggcatcattcccaccggcgatacgattttcgcggtattcaacctggtgatcgtggtggcgatgttcatcctcgtgccgctggtcaaccggctgatgctgcccgacgagaaggaaagcgtctatgtcgatccggcgcgcctggaagaggcctcggtgccggcctcggacgacgacaagcgtccggccgcgcgcctggagaacagcaggctgctggcctggctgatcgccgcgggcgggctggcctacatgttcgactactacgtcgtgcgcggcgccggcctgaacctcaatgtcatcaacttcagcttcctgatcctggccatcctgctgcacggcacgccgcgccgcctgctggccagcctggacgaagccatcaagggaggcgcgggcatcgtgatccagttcccgttctatgcgggaatcatggccatcatgatggactcggggctggccgccaccttgtccgagtggttcgtgtcgatcgcctcggccgccacgctgccgttctggaccttcatcagcgccggcatcgtgaacatcttcattccgtcgggcggcgggcaatgggcggtgcaaagccccatcgtgatcagcgcggcgcaggcgctcggcgcggatatgccgagggtggcgatggccgttgcctggggcgacgcctggaccaacatgctccagccgttctgggccttgccggtgctggcgattgccggcctgaaggccaaggacatcatgggctattgcatcatccagctgctggtgaccggcgtcatcatttcggtgggactgagcttcttctag

SEQ ID NO: 20900 - protein, 437 aa, Bordetella bronchiseptica RB50
MFKLMSRSAVKMVERYLPDPYVFVVLLTLVAAGAAMIIEGQTPMAVVRWWGNGFWGLLTFAMQMLLVLVTGYMLASTPLVKRMLARLASLATSAGGAIILVSVVSLAASWINWGFGLVVGALFAKQIARQVRVDYRLLVASAYSGFIIWHGGLAGSIPLTIATEGHFSADKIGIIPTGDTIFAVFNLVIVVAMFILVPLVNRLMLPDEKESVYVDPARLEEASVPASDDDKRPAARLENSRLLAWLIAAGGLAYMFDYYVVRGAGLNLNVINFSFLILAILLHGTPRRLLASLDEAIKGGAGIVIQFPFYAGIMAIMMDSGLAATLSEWFVSIASAATLPFWTFISAGIVNIFIPSGGGQWAVQSPIVISAAQALGADMPRVAMAVAWGDAWTNMLQPFWALPVLAIAGLKAKDIMGYCIIQLLVTGVIISVGLSFF

SEQ ID NO: 20901 - DNA, 1365 bp, Bdellovibrio bacteriovorus HD100
  CDS (1)..(1365): transl_table=11
atgaacccagcccgcgacaatgcctttcaaaaactcattcgattcagtgtgaagctcgtcaatgaatacctgcctgatccctttatcttctgcgcgcttttgacttttatcgtatttgccgcggcaatgcccgtaactggcatgagcttccttgaaactgtgaacggttggtatgaaggcttctggggcttgttgggattctcgatgcagatggtcctggtgctcgtgctcggccatgcgttggcgaactcgcgcccctgctccagcttgttgtcatctttggcctcccacctgcgcacccctggtcaggcgatcgttgtcgtttctttggtctcgctgctgggttcctggttcaactggggttttggcctggtgatcggtgctctttttgccaaagagatcgcgaaaaaagtaaaaactgtcgactaccgcctgctgatcgcttctgcttattccggctttctaatctggcacggcggtctttccggatctattcctttgacgattgccacggacgggaatctggccaaggcctctaacaatgtcgtcaccggaatgatcccagtatctgaaaccctgttttcaacctacaacctggttatcgtaattgtccttttggtgacagtgcccctgctgaacatgttcatgcacccacgcctggaagaaaccgtgagtgtggatccggctttgctaaatgacgaagtttcagacacggaaaacggcaacagtacgtgggcagatcgcattgaaaacagcaaatgggtttctttgatcttgtgcgcccttgccagcgtgtacatcgcaaactacttcttcaaaaaaggtttggatctgaatctgaacattgtgaatttcatcttcctgttcctgggcattctgttgcacgggactccacgtcgctacattctggcgattcgttctgccgtgatcagctccagcgggatcatcctgcaattcccgttctatgcgggaatcatgggtctgatggtggccagcggcagcagcggtgtttcgctggccggagccctgtctaatgtgtttgtgaacatctccaccgtcacaacattcccgttctttacctttatcagcgcgggtattgtgaatttctttgtgccctccggcggtggtcagtgggccgtacaagctccgatcatgctgcctgcggcgcaagagctgggcgtgtctgtcgccaagacctcgatggcgattgcctggggtgacgcatggacaaacatgatccagcccttctgggccttgccagccttgggaatcgcaggccttggcgcccgcgacatcatgggcttttgtttgatcgtccttttgtactcaggccttgtgatctcggcgggattcttgttcctgtaa

SEQ ID NO: 20902 - protein, 454 aa, Bdellovibrio bacteriovorus HD100
MNPARDNAFQKLIRFSVKLVNEYLPDPFIFCALLTFIVFAAAMPVTGMSFLETVNGWYEGFWGLLGFSMQMVLVLVLGHALANSRPCSSLLSSLASHLRTPGQAIVVVSLVSLLGSWFNWGFGLVIGALFAKEIAKKVKTVDYRLLIASAYSGFLIWHGGLSGSIPLTIATDGNLAKASNNVVTGMIPVSETLFSTYNLVIVIVLLVTVPLLNMFMHPRLEETVSVDPALLNDEVSDTENGNSTWADRIENSKWVSLILCALASVYIANYFFKKGLDLNLNIVNFIFLFLGILLHGTPRRYILAIRSAVISSSGIILQFPFYAGIMGLMVASGSSGVSLAGALSNVFVNISTVTTFPFFTFISAGIVNFFVPSGGGQWAVQAPIMLPAAQELGVSVAKTSMAIAWGDAWTNMIQPFWALPALGIAGLGARDIMGFCLIVLLYSGLVISAGFLFL

SEQ ID NO: 20903 - DNA, 1347 bp, Bacillus cereus ATCC 10987
  CDS (1)..(1347): transl_table=11
ttgtttcgttcttttactaatggctgcgtcgccttagtgcaacgtttcttgccagaaccgtttattttatcatgtttattaaccgtatttgttattttcttcggcatgtttgcaacgcatcaaacacctgtggaaatgattaatcactgggggaatggcatttggggacttctcgccttttctatgcaaatggcacttgtactcgtgacaggatctgctttagcaaacgctcctctcattaaaaaatggttaacgaaagctgcaagactaccgaaaacgaatggacaaggtattattgccatttcaatcgtaagtttactaggggcgtacataaactggggctttggtattgttgtatctgttttatatgcaaaggaagtagcaaggcaacttgaaggattagattataggttagccattgcctcttcttactctggatttctcatttggcatgcggggctttctgcttctatccctctcacgttagcaactggaggcgaaacgttaatgaaaacgacagctggaagtattaaagaagcgattccaataacagaaacgttattctcaccatacgctctcgtgccagttattatttttctcgttacgatgcctctcattaataaagcgatgcatccagatgaaaaacatacgataacggtagatcctagcgtattccatgaagaagctgccgctcaagaagtaggaaacaatacgttcgctgagaaaatggaaaatagcatcattattacactttgcgttggattgttaggtctcatttatattttcaattacttttatacgaaaggttttaaccttacacttgatatcgttatttttatgttattaattgctggacttattttccaccgtactccgattcaatatattcgtgctttttcagattctacaaaaagtgcttctggtattttacttcagtttccattttatgcaggaattatgggcatgatgattggagcaaatagtgaaggactttcacttggaggagctatttcaaatttctttattagcatttcaaacgaaacgactttcccactctttacttttttaagtgctggcatcgttaatattttcgttccatctggtggcggtcaatgggctgtgcaagcacccattatgattccagctggtgctgaacttggtgtacctgctgcaaaaacagcaatggccattgcatggggcgatgcttggacgaatttaattcaacctttctgggcattacccgcattggcaatagctggtttaggcgctcgtgatattatgggattttgcgtcgtgaacttactatatgcaggatttatcataagtctatgtttcttatttatttaa

SEQ ID NO: 20904 - protein, 448 aa, Bacillus cereus ATCC 10987
MFRSFTNGCVALVQRFLPEPFILSCLLTVFVIFFGMFATHQTPVEMINHWGNGIWGLLAFSMQMALVLVTGSALANAPLIKKWLTKAARLPKTNGQGIIAISIVSLLGAYINWGFGIVVSVLYAKEVARQLEGLDYRLAIASSYSGFLIWHAGLSASIPLTLATGGETLMKTTAGSIKEAIPITETLFSPYALVPVIIFLVTMPLINKAMHPDEKHTITVDPSVFHEEAAAQEVGNNTFAEKMENSIIITLCVGLLGLIYIFNYFYTKGFNLTLDIVIFMLLIAGLIFHRTPIQYIRAFSDSTKSASGILLQFPFYAGIMGMMIGANSEGLSLGGAISNFFISISNETTFPLFTFLSAGIVNIFVPSGGGQWAVQAPIMIPAGAELGVPAAKTAMAIAWGDAWTNLIQPFWALPALAIAGLGARDIMGFCVVNLLYAGFIISLCFLFI

SEQ ID NO: 20905 - DNA, 1347 bp, Bacillus anthracis str. Sterne
  CDS (1)..(1347): transl_table=11
ttgtttcgttcttttactaatggttgcgtcgccttagtgcaacgtttcttgccagaaccgtttatattatcatgtttattaactgtttttgttattttcttcggcatgtttgcaacgcatcaaacacctgtggaaatgattaatcactggggtaatggcatttggggacttctcgccttttctatgcaaatggcacttgtactcgtgacaggatctgctttagcaaacgctcctcttattaaaaaaggattaatgaaagcggcaagactaccaaaaacaaatggacaaggtattattgccatttcaatcgtaagtttactaggggcatacataaactggggatttggtattgttgtatctgttttatacgcaaaagaagtggcaagacaattagaaggattggattatagactagcaatcgcttcttcttactctggatttctcatttggcatgcggggctttctgcttctatccctcttacgttagcaacaggcggagaaacgttaatgaaaacgacagctggaagtattaaagaagcgattccaatcactgaaacgttattctcaccatatgctctcgttccagttattatctttttagttacgatgcctctcattaataaggcgatgcatccagatgcaaaacatacaataacagtagatcctagcgtattccatgaagaagctgccgctcaagaggcaggaaaaaatacgttcgcggaaaaaatggaaaatagcattattattacactttgcgttggattgttaggtctcatttatattttcaactacttttatacgaaaggctttaaccttacactcgatatcgttatttttatgttattaattgctggactcattttccaccgtactccaattcaatatattcgcgctttttcagattccacgaaaagtgcttctggtattttacttcaatttccgttttacgcaggaattatggggatgatgatcggagcaaatagtgaaggcctttcacttggaggagctatttcgaatttctttattagcatttcaaacgaaacaactttcccgctctttacttttttaagtgcgggcatcgttaatattttcgttccatctggtggcggtcaatgggctgtgcaagcacccattatgattccagctggcgctgaacttggtgtacctgctgcaaaaacagcaatggccattgcgtggggcgatgcttggacaaatttaattcaacctttctgggcattaccagcattagcgatagctggtttaggtgctcgtgatattatgggattttgcgttgtgaacttactatatgcaggatttatcataagtctatgtttcttatttatttaa

SEQ ID NO: 20906 - protein, 448 aa, Bacillus anthracis str. Sterne
MFRSFTNGCVALVQRFLPEPFILSCLLTVFVIFFGMFATHQTPVEMINHWGNGIWGLLAFSMQMALVLVTGSALANAPLIKKGLMKAARLPKTNGQGIIAISIVSLLGAYINWGFGIVVSVLYAKEVARQLEGLDYRLAIASSYSGFLIWHAGLSASIPLTLATGGETLMKTTAGSIKEAIPITETLFSPYALVPVIIFLVTMPLINKAMHPDAKHTITVDPSVFHEEAAAQEAGKNTFAEKMENSIIITLCVGLLGLIYIFNYFYTKGFNLTLDIVIFMLLIAGLIFHRTPIQYIRAFSDSTKSASGILLQFPFYAGIMGMMIGANSEGLSLGGAISNFFISISNETTFPLFTFLSAGIVNIFVPSGGGQWAVQAPIMIPAGAELGVPAAKTAMAIAWGDAWTNLIQPFWALPALAIAGLGARDIMGFCVVNLLYAGFIISLCFLFI

SEQ ID NO: 20907 - DNA, 1347 bp, Bacillus thuringiensis serovar konkukian str. 97-27
  CDS (1)..(1347): transl_table=11
ttgtttcgttcttttactaatggttgcgtcgccttagtgcaacgtttcttgccagaaccgtttatattatcatgtttattaactgtttttgttattttctttggcatgtttgcaacgcatcaaacacctgtggaaatgattaatcactggggtaatggcatttggggacttctcgccttttctatgcaaatggcacttgtactcgtgacaggatctgctttagcaaacgctcctcttattaaaaaaggattaacgaaagcggcaagactaccaaaaacaaatggacaaggtattattgccatttcaatcgtaagtttactaggggcatacataaactggggatttggtattgttgtatctgttttatacgcaaaagaagtagcaagacagctggaaggattagattatagactggcaattgcttcttcttactctggatttctcatttggcatgcggggctttctgcttctatccctcttacgttagcaacaggcggagaaacattaatgaaaacgacagctggaagtattaaagaagcaatcccaatcactgaaacgttattctcatcatacgctctcgttccggttattatctttttagttacgatgcctcttattaataaggcgatgcatccagatgaaaaacatacaataacggtagatcctagcgtatttcatgaagaagctgcggctcaagaagtaggaaataatacgttcgctgaaaaaatggaaaatagtatcattattacactttgcattggattgttaggtctcatttatattttcaactacttttatacgaaaggctttaaccttacgctagatatcgttatttttatgttattaattgctggacttattttccaccgtactccgattcaatatattcgtgctttttcagattccacgaaaagtgcttctggtattttacttcaatttccgttttacgcaggaattatggggatgatgattggagcaaatagtgaaggactttcacttggaggagctatttcgaatttctttattagcatttcaaacgaaacaactttcccgctctttacttttttaagtgctggcattgttaacattttcgttccatctggtggtggtcaatgggctgtgcaagcaccaattatgattccagctggtgctgaacttggtgtacctgctgcaaaaacagcaatggccattgcgtggggagatgcttggacaaatttaattcaacctttctgggcattaccagcattggcgatagctggtttaggcgctcgtgatattatgggattttgcgttgtgaacttactatatgcaggttttatcattagtctatgcttcttatttatttaa

SEQ ID NO: 20908 - protein, 448 aa, Bacillus thuringiensis serovar konkukian str. 97-27
MFRSFTNGCVALVQRFLPEPFILSCLLTVFVIFFGMFATHQTPVEMINHWGNGIWGLLAFSMQMALVLVTGSALANAPLIKKGLTKAARLPKTNGQGIIAISIVSLLGAYINWGFGIVVSVLYAKEVARQLEGLDYRLAIASSYSGFLIWHAGLSASIPLTLATGGETLMKTTAGSIKEAIPITETLFSSYALVPVIIFLVTMPLINKAMHPDEKHTITVDPSVFHEEAAAQEVGNNTFAEKMENSIIITLCIGLLGLIYIFNYFYTKGFNLTLDIVIFMLLIAGLIFHRTPIQYIRAFSDSTKSASGILLQFPFYAGIMGMMIGANSEGLSLGGAISNFFISISNETTFPLFTFLSAGIVNIFVPSGGGQWAVQAPIMIPAGAELGVPAAKTAMAIAWGDAWTNLIQPFWALPALAIAGLGARDIMGFCVVNLLYAGFIISLCFLFI

SEQ ID NO: 20909 - DNA, 1410 bp, Acinetobacter sp. ADP1
  CDS (1)..(1410): transl_table=11
atggataaacaacctgcgcttttggagcgttttgccttaaaagtcagtgactggtcagaaaaatggtttcctgattcttatatttttgcgctacttggcgtcattattgtgtcgcttgccgcaattttcattggtgcgccagtcaaagatgtggcaggcgcatttggaaacggtttttggagtctcatcccgtttacactgcaaatgaccatgctgattattgtcggttatgtggtttctgtttctgcacctgtgaaaaaactcattcagaaaatggcacgtttgccacattcaggtcgcggtgccattgtaatggtggccaccgtgagtttgctcatttctttggtcaactgggcaattagtacgatcttgacagcattactggtcattgcgctggcaaaacgcaaagaactcaacatggattatcgtgctgctgccgctgccgcaattattggcatgggcgccacttgggcactcggtattagctcatcggctgcacagttgcaggccaataaaaccagtttgccagaatccatttataacctgacaggtgtgattccatttacccaaactattttcttatggcaatcactggtcatgacactggtgctggtgattgtgtctattgtgattgcatattggtcggcacctaaaggtcaaaatgtcaaaaccatgcaggattttcatctggattttgaagatgaagaaaaagctgaacccaaatcgacccgccctggtgactggctagaaaattcgcctattttaaccattttaattgtggtacttgggctgggctggatgcttatggaattttccaaaaacaatcctattattgcaatttctagtttgaatacttacaactttatctttttgatgctcggtctggcgttgcatcggacaccccgtaatttcctcaatgccgtgagcaaggccgttcctgcggtttcaggcgtgctgatccagtttccactgtatggcagcattgctttcattatgacgcaagcggtcaatgctcaggacttttcgctctctcattatattgctgaattttttgtttcgattgcatcacatgatacttttgcagtggtgatgggaatttactctgccattctgggattttttgtaccttctggcggtggcaaatggattatcgaagcaccttatgtcatgcaggctgcaaacgatcttcagtatcatttgggttggtcagttcaaatttacaatgcagccgaagccttacccaacctgatcaatccattttttatgttgcccatgctaggcattcttaaactcaaacccaaagatgtcattgggtttaccgtaacgcaactggtggtacatttaccgctggtgatgtttttattatggattcttggaaaaacactgagctataccccacccgtattttaa

SEQ ID NO: 20910 - protein, 469 aa, Acinetobacter sp. ADP1
MDKQPALLERFALKVSDWSEKWFPDSYIFALLGVIIVSLAAIFIGAPVKDVAGAFGNGFWSLIPFTLQMTMLIIVGYVVSVSAPVKKLIQKMARLPHSGRGAIVMVATVSLLISLVNWAISTILTALLVIALAKRKELNMDYRAAAAAAIIGMGATWALGISSSAAQLQANKTSLPESIYNLTGVIPFTQTIFLWQSLVMTLVLVIVSIVIAYWSAPKGQNVKTMQDFHLDFEDEEKAEPKSTRPGDWLENSPILTILIVVLGLGWMLMEFSKNNPIIAISSLNTYNFIFLMLGLALHRTPRNFLNAVSKAVPAVSGVLIQFPLYGSIAFIMTQAVNAQDFSLSHYIAEFFVSIASHDTFAVVMGIYSAILGFFVPSGGGKWIIEAPYVMQAANDLQYHLGWSVQIYNAAEALPNLINPFFMLPMLGILKLKPKDVIGFTVTQLVVHLPLVMFLLWILGKTLSYTPPVF

SEQ ID NO: 20911 - DNA, 1347 bp, Bacillus cereus E33L
  CDS (1)..(1347): transl_table=11
ttgtttcgttcttttactaatggttgcgtcgccttagtgcaacgcttcttgccagaaccgtttattttatcatgtttattaactgtttttgttattttctttggcatgtttgcaacgcatcaaacacctgtggaaatgattaatcactgggggaatggcatttggggacttctcgccttttctatgcaaatggcacttgtactcgtaacaggatctgctttagcaaacgctcctcttattaaaaaaggattaacgaaagcggcaagactaccaaaaacaaatggacaaggtattattgctatttcaatcgtaagtttactaggggcatacataaactggggatttggtattgttgtatctgttttatacgcaaaagaagtggcaagacaattagaaggattggattatagactagcaatcgcttcttcttactctggatttctcatttggcatgctgggctttctgcttctatccctcttacgttagcgacaggcggagaaacgttaatgaaaacgacagctggtagtattaaagaagcgattccaatcactgaaacgttattctcaccatacgctctcgttccagttattatctttttagttacgatgcctctcattaataaggcgatgcatccagatgaaaaacatacgattacagtagaccctagcgtgttccatgaagaagctgcagctcaagaggtagggaaaaatacgttcgctgagaaaatggaaaatagtatcatcattacactttgcgttggattgttaggtctcatttatattttcaattacttttatacgaaaggctttaaccttacacttgatatcgttattttcatgctattaattgctggacttattttccaccgtactccgattcaatatattcgcgctttctcagactctacgaaaagtgcttctggcattctacttcaatttccgttttatgcaggaattatggggatgatgatcggagcaaatagtgaaggactttcacttggaggagctatttcgaatttctttattagcatttcaaacgaaacaactttcccgctctttacttttttaagtgctggcatcgttaatattttcgttccatctggtggcggtcaatgggctgtgcaagcacccattatgattccagctggcgctgaacttggtgtacctgctgcaaaaacagcaatggccattgcgtggggggatgcttggacgaatttgattcaacctttctgggcattaccggcattagcgatagccggtttaggcgctcgtgatattatgggattttgcgttgtgaacttactatatgcaggatttatcataagtctatgtttcttatttatttaa

SEQ ID NO: 20912 - protein, 448 aa, Bacillus cereus E33L
MFRSFTNGCVALVQRFLPEPFILSCLLTVFVIFFGMFATHQTPVEMINHWGNGIWGLLAFSMQMALVLVTGSALANAPLIKKGLTKAARLPKTNGQGIIAISIVSLLGAYINWGFGIVVSVLYAKEVARQLEGLDYRLAIASSYSGFLIWHAGLSASIPLTLATGGETLMKTTAGSIKEAIPITETLFSPYALVPVIIFLVTMPLINKAMHPDEKHTITVDPSVFHEEAAAQEVGKNTFAEKMENSIIITLCVGLLGLIYIFNYFYTKGFNLTLDIVIFMLLIAGLIFHRTPIQYIRAFSDSTKSASGILLQFPFYAGIMGMMIGANSEGLSLGGAISNFFISISNETTFPLFTFLSAGIVNIFVPSGGGQWAVQAPIMIPAGAELGVPAAKTAMAIAWGDAWTNLIQPFWALPALAIAGLGARDIMGFCVVNLLYAGFIISLCFLFI

SEQ ID NO: 20913 - DNA, 1404 bp, Haloarcula marismortui ATCC 43049
  CDS (1)..(1404): transl_table=11
atgtcagctaataacacaggcgaaactgccctcgaacgtatcggctatcgactctctgcgtgggtggaacggtggatgccaagcccgttcctgttcgcgctcatcctcagttacgtcgtatttctggccggcgtcggcctcaccggggccggtcccgtggagatggtcgggttctggtacgacggcttctgggccttcctgacgttctcgatgcagatggtcctcatcctgatgacgggcttcgtcgtcgcgtaccacccgcgtgtcaacgccggcatccggcggctgacagagattcccagcaccggaaaacaggcggttgtcctcgtcggcctgttgacgatgctgctcggctgggtccactggggactgagcctcatcctcggcgcgattttcgcccgggagatgggcaagaccgcccacgagaacggcatcgatgtccactatccggtcctctgcgtggcgggctatctcggcctcggtctcacctggcactgggggctgtccgggtccgcgccgctcctgcttgcgacagagggcaacgagttcatccagcagggcgtcatcgacgtcgtcgtctccgcctcggagaccatcttccacccctacggcctcattctgaccggcctgtcgatagcctacgcgctcgtcgtcctctacgtcatcacgccgactggtgaccaggcgcggggcatcacgcactacatccccgaagacgatttgttcgagtccgcgagtgacggcggtgttgagacgactgcgaccaccaagcaggtcccggccgagcgtctcaaccacagccgcgttctcggcgggattatcggtctgaccggtattgcgctggtcgcctcgcagttcgttcagtccggcatcgacgcgctcggactgaacatcgtcaatttcggcttcctgacgattgggatcttcatctacatggacccacagacctaccgggagaagttcggcgaggcggcgaccgccgcgtcgggcatcgtgttgctctttccgttcttcgctggcattcaggggatgatggctacctccgggctggcgcagctgatggccaacgcgctcatctcggtctcgacaccacagacgttcccggtcatcgcctggctcactggtgccacggtcaacattttcgcaccgtccggcggcggtgagtggatcattctcgggccgccgattctcgaagccgcgcagaacctcggcgtcccggccgggcaggcgacgatggcctacgccgtcggtgacgcccacacgaacctcctgaaccccttctgggcgctgccgctgctcgccatcacccgcatcaaggcccgggagatgttcggctacgccatcgcaatgttgctcgcgctcacgccattcctggctgtcgtgctgttcgtcctgccgtactga

SEQ ID NO: 20914 - protein, 467 aa, Haloarcula marismortui ATCC 43049
MSANNTGETALERIGYRLSAWVERWMPSPFLFALILSYVVFLAGVGLTGAGPVEMVGFWYDGFWAFLTFSMQMVLILMTGFVVAYHPRVNAGIRRLTEIPSTGKQAVVLVGLLTMLLGWVHWGLSLILGAIFAREMGKTAHENGIDVHYPVLCVAGYLGLGLTWHWGLSGSAPLLLATEGNEFIQQGVIDVVVSASETIFHPYGLILTGLSIAYALVVLYVITPTGDQARGITHYIPEDDLFESASDGGVETTATTKQVPAERLNHSRVLGGIIGLTGIALVASQFVQSGIDALGLNIVNFGFLTIGIFIYMDPQTYREKFGEAATAASGIVLLFPFFAGIQGMMATSGLAQLMANALISVSTPQTFPVIAWLTGATVNIFAPSGGGEWIILGPPILEAAQNLGVPAGQATMAYAVGDAHTNLLNPFWALPLLAITRIKAREMFGYAIAMLLALTPFLAVVLFVLPY

SEQ ID NO: 20915 - DNA, 1320 bp, Bacillus clausii KSM-K16
  CDS (1)..(1320): transl_table=11
ttgtttgcggccgttactaggtggtttgaccgcatcgtgcaacgctatttgccagatgcctttttgtttgcgggattgttaaccattcttgtttttctattgggcgtgtttgttacagatgcttcgcctgtacaaatggttgattattggggctctggcttttgggatttgctttcctttacgatgcaaatggcgctcattgttgtaaccggttacattttggcgaatacgccactgtttaagcgcctattatcaacgttggccgtattagcaaaaacgccaggccaggcaattgtgcttgtaacgtttgtggccagcattgcttgtctgatcaattatggctttggcctcgttgtcggagcgctttttgccaggcacgttgttcgccaagtaccaagcgtcgactatcgtatactggtggcggctgcctacagtggttttcttgtatggcatgggggattatcggcgtctatccctctgacgattgcaacagaggaccactttttggcggatgtaatggggacgattccaattgccgatacattgctgtctccggccaacctttttattgtatgcgctttcttaattagcttgcctgtcgtgaattatttccttctcaaaacgtcgacttcttcttacacaattgatatggctcgatttgctgaagaaaaacgtgaggaagcggcagctgttgcggaaacgccagcggaaaagttggagaatagtcaatgggtgtcacttgccattgctctgcttggcttaacgtatgtcgtactgtattttatcgaaaacggccttgacttgaacattaatattgtcaattttacgtttttgtttttaggcattttatgccatcgtacgccaaggcgctttttaacagcagttggcgaaggcgtgaaaaacgccggaggcattattattcaattcccattttacgccggaattatggggatgatggtcggctcagggctgtctgaacagctttccctttggtttgtgtcgatttcatcagcagagacgttcccgctatggacgtttcttagcgcagggttactaaacatgtttatcccttctggaggcggacaatgggctgttcaagggccgattatggtgccggcagcactggaactcggtgcggatatggcgaaaacagctatggctgtcgcttggggagacgcatggacgaacatgatccaaccattttgggcgctgccattattagcgatcgcaggcttaaaagtccgtgacatcatgggcttttgtgtcatattgcttttttgggcatttgtgccaattgccattggcctgatgtttttttaa

SEQ ID NO: 20916 - protein, 439 aa, Bacillus clausii KSM-K16
MFAAVTRWFDRIVQRYLPDAFLFAGLLTILVFLLGVFVTDASPVQMVDYWGSGFWDLLSFTMQMALIVVTGYILANTPLFKRLLSTLAVLAKTPGQAIVLVTFVASIACLINYGFGLVVGALFARHVVRQVPSVDYRILVAAAYSGFLVWHGGLSASIPLTIATEDHFLADVMGTIPIADTLLSPANLFIVCAFLISLPVVNYFLLKTSTSSYTIDMARFAEEKREEAAAVAETPAEKLENSQWVSLAIALLGLTYVVLYFIENGLDLNINIVNFTFLFLGILCHRTPRRFLTAVGEGVKNAGGIIIQFPFYAGIMGMMVGSGLSEQLSLWFVSISSAETFPLWTFLSAGLLNMFIPSGGGQWAVQGPIMVPAALELGADMAKTAMAVAWGDAWTNMIQPFWALPLLAIAGLKVRDIMGFCVILLFWAFVPIAIGLMFF

SEQ ID NO: 20917 - DNA, 1419 bp, Pseudomonas syringae pv. syringae B728a
  CDS (1)..(1419): transl_table=11
atggccgccaacatagaagaaagccgctccgcccgatttgccttgcgctgtgctgcgtgggctgaacgctggtttcccgattcatgggtatttgccgcactggcggtggtcatcgtcacgctggcgacgctggccatcggcgcacgtccggtcgaggccgccaaggcgttcggtgacgggttctggagcctgattccgttcaccatgcaaatggccttcgtggtcatcggcggttacgtggtcgccagctcaccgcctgcggtacgcctgatcgaccgcctggcccgggtaccgcgcaacggccgttcggcggtggcctgggtggcgctgatttccatgctcgcttcgctgctcaactggggcctgtcgctggtgttcggcggcctgctggtgcgcgccctcgcccgccgcactgacctgcgcatggattaccgtgcagccggcgccgcggcctatctgggcctgggcgcggtctgggcgctggggctgtcgtcttcggccgcgcaattgcaggccaacccggccagtctgccgccgtcgatcctggcgattaccggggtgatcccgttcaccgaaaccatctttctctggcaatccggggtcatgctcgccgcgctggtggtcatctcactgatcgttgcctacgccaccgcgcccggcccgaacagcgcccgcgacgccaaggcctgcggtgtcgacccggccttcaacctgccgccgctgccgccccgcacacggcccggggaatggctggaatacagcccgctgctgatcatcctcatggtgctgctgggggttggctggctgttcaacgagttttcgagcaaaccggtgatcacagcgatttccgggctcaatacctacaatttcctgttcatcatgctcggtgccctgctgcactggcggccgcgcagttttctcgatgccgtcgcacgggcggtgcccaccaccaccggcgtgctgattcaattccctctgtacggttcgatcgccgcgctactgaccacggtcaagggcggcgatgcgcaaaccctggcgcattacatctcgacgttcttcaccagcattgcttcccacgatacttacgcgattctgatgggggtctattcagccatattgggctttttcattccgtcaggcggcggcaagtggattatcgaagcgccctacgtgatgcaggtcgccaacgacctgcagtatcacctcggctgggcagtacagatctacaacgcagccgaagccctgcccaacctgataaacccgttctacatgctgccgctgctgggtgtactgggcctgaaggcgcgtgacctgatcggcttctcgttcgtgcaactgctggtccacacgccgctggtgctgtttctgctctgggcactgggcaccacgctggcctatgtgccgccggtaatgccctga

SEQ ID NO: 20918 - protein, 472 aa, Pseudomonas syringae pv. syringae B728a
MAANIEESRSARFALRCAAWAERWFPDSWVFAALAVVIVTLATLAIGARPVEAAKAFGDGFWSLIPFTMQMAFVVIGGYVVASSPPAVRLIDRLARVPRNGRSAVAWVALISMLASLLNWGLSLVFGGLLVRALARRTDLRMDYRAAGAAAYLGLGAVWALGLSSSAAQLQANPASLPPSILAITGVIPFTETIFLWQSGVMLAALVVISLIVAYATAPGPNSARDAKACGVDPAFNLPPLPPRTRPGEWLEYSPLLIILMVLLGVGWLFNEFSSKPVITAISGLNTYNFLFIMLGALLHWRPRSFLDAVARAVPTTTGVLIQFPLYGSIAALLTTVKGGDAQTLAHYISTFFTSIASHDTYAILMGVYSAILGFFIPSGGGKWIIEAPYVMQVANDLQYHLGWAVQIYNAAEALPNLINPFYMLPLLGVLGLKARDLIGFSFVQLLVHTPLVLFLLWALGTTLAYVPPVMP

SEQ ID NO: 20919 - DNA, 1344 bp, Haemophilus influenzae 86-028NP
  CDS (1)..(1344): transl_table=11
atgattagtcgcgtttctcgttttatgacgacattcgtcagtaaatacctgccagacccacttatttttgccgtgttacgcacctttgtcacattcatttgtgcttggggattaaccgatagtacacctgttgatttagttaatatgtggggtaatggcttttggaatttacttggttttggtatgcaaatggcattaattgtcgtaactggtaatgctcttgcaacctcaccacaaattcgtaagtttctttctacaatcgcttcaatagcaaaaacaccagcacaaggtgttgtcttagttacgtttatgggttcaattgcctgtatcattaactggggcttcggtttggtcgttggtgcgatgtttgcaaaagaagtcgcgcggagaataaaaggcagtgactacgccttactgattgcctgcgcctatattgcatttatgacatggggtggaggtttttcaggctcaatgccacttttagccgcaacaccaggcaacccagttgctcatttaatggtgagcgaaagcaacccacaaggtattattcctgcagttagtacgcttttctctgggtacaatatttttatcacgttaagtttagtcatttgcttgcctttcattacctatatgatgatgcccaaaaatggcgaagcaaaaagtattgatccaaaacttattgcgcccgatccaacatttgataaaaaattggataaagatgcaacacttgctgaaaaaatggaagaaagccgcttcttagcctatacaatcggggcattaggatatagttacctcggtatgtatttctacaaaaacggattcaatctcacaattaataatgtaaaccttattttcttaatcacaggaattgtgcttcatggctcgccaatggcctatatgcgagcaattattaatgccacaagaagcacagcagggatcttagtgcaattcccattctatgcgggtgtgcaactaatgatggagcattcaggcttaggtggtttaatcacagaattctttatcaatgttgctaacaaagattctttcccattattaaccttctttagttctgcctttattaactttgcagtgccttctggtggcggtcactgggtcatccaaggaccatttgttatccctgctgctcaagcattaggtacagatctgggtaagtctacaatggcaattgcctatggtgagcaatggatgaacatggctcagccattttgggcattaccagcactgggtatcgcagggcttggcgtgagagatattatgggcttctgtatgaccgcacttatcttcaccgcaccaatttttattattggtttatatttcttatag

SEQ ID NO: 20920 - protein, 447 aa, Haemophilus influenzae 86-028NP
MISRVSRFMTTFVSKYLPDPLIFAVLRTFVTFICAWGLTDSTPVDLVNMWGNGFWNLLGFGMQMALIVVTGNALATSPQIRKFLSTIASIAKTPAQGVVLVTFMGSIACIINWGFGLVVGAMFAKEVARRIKGSDYALLIACAYIAFMTWGGGFSGSMPLLAATPGNPVAHLMVSESNPQGIIPAVSTLFSGYNIFITLSLVICLPFITYMMMPKNGEAKSIDPKLIAPDPTFDKKLDKDATLAEKMEESRFLAYTIGALGYSYLGMYFYKNGFNLTINNVNLIFLITGIVLHGSPMAYMRAIINATRSTAGILVQFPFYAGVQLMMEHSGLGGLITEFFINVANKDSFPLLTFFSSAFINFAVPSGGGHWVIQGPFVIPAAQALGTDLGKSTMAIAYGEQWMNMAQPFWALPALGIAGLGVRDIMGFCMTALIFTAPIFIIGLYFL

SEQ ID NO: 20921 - DNA, 1419 bp, Pseudomonas fluorescens Pf-5
  CDS (1)..(1419): transl_table=11
gtggccgctgatattcaagatagccgctccgcccgctttgccctgcgctgctcgaactgggccgaacgctggtttcccgactcctgggtgttcgccgcgctggcggtgatcatcgttgccctggccacgctggccatgggcgccaagcccaccgatgccgccatggcgtttggcgacggcttctggagcctgatccccttcaccatgcagatggccttcgtggtcattggcggctatgtggtagccagctcgccgccggcggtgaagctgatcgacaagctggcgcgcattcccaggaacggccgctcggcggtggcctgggtggcgctgatttccatggtcgcctccctgctcaactggggcctgtccctggtgttcggtggcctgctggtgcgggccctggcccggcgtaccgaactgcgcatggactaccgcgccgccggcgctgccgcctacctgggcctgggcgcggtctgggccctggggctgtcgtcttcggcggcgcagttgcaggccaaccccggcagcctgccaccgtcgatcctggccatcaccggggtcattcccttcacccagaccatctttctctggcaatccggcgtcctgctgctggccctggtggtggtctcgctgatcgtcgcctacgccacggcgcccggccccggcagcgcccgggatgcccaggcctgcggggtcgacccgagcttcagcatgcccaagccgcaaccccggacccgacctggcgaatggctggaatacagcccgctgctgacccttctcctggcgctgctggcggccggctggctgtatcacgagttcgccaccaaaccggcgatcaccgcgatctccgggctcaacacctacaacttcctgttcctgatggccggcgccctgctgcactggcgcccgcgcagcttcctcgatgccgtggcccgggcagtgcccaccaccaccggggtgctgatccagttcccgctgtacggttcgatcgccgcgctgatgaccgtggtcaagggcgtggatggccagaccctggcccaccacatctcgaccttcttcgtgcagatcgcttcccacgacacctacgcgctgctgatggggctgtactcagcggtgctgggcttcttcattccttcgggcggcggcaagtggatcatcgaggcgccctacgtgatgcaggtggccaatgacctgcagtaccacctgggctgggcggtacagatctacaacgccgccgaggccctgccgaacctgatcaaccccttctacatgctgccgctgctgggggtgctgggcttgaaggcccgggacctgatcggcttctcctttgtccagttgctggtgcatgcgcccctggtgctggtgctgctctgggccctggggaccaccctgtcctacctgccgccggtcattccctga

SEQ ID NO: 20922 - protein, 472 aa, Pseudomonas fluorescens Pf-5
MAADIQDSRSARFALRCSNWAERWFPDSWVFAALAVIIVALATLAMGAKPTDAAMAFGDGFWSLIPFTMQMAFVVIGGYVVASSPPAVKLIDKLARIPRNGRSAVAWVALISMVASLLNWGLSLVFGGLLVRALARRTELRMDYRAAGAAAYLGLGAVWALGLSSSAAQLQANPGSLPPSILAITGVIPFTQTIFLWQSGVLLLALVVVSLIVAYATAPGPGSARDAQACGVDPSFSMPKPQPRTRPGEWLEYSPLLTLLLALLAAGWLYHEFATKPAITAISGLNTYNFLFLMAGALLHWRPRSFLDAVARAVPTTTGVLIQFPLYGSIAALMTVVKGVDGQTLAHHISTFFVQIASHDTYALLMGLYSAVLGFFIPSGGGKWIIEAPYVMQVANDLQYHLGWAVQIYNAAEALPNLINPFYMLPLLGVLGLKARDLIGFSFVQLLVHAPLVLVLLWALGTTLSYLPPVIP

SEQ ID NO: 20923 - DNA, 1425 bp, Pseudomonas syringae pv. phaseolicola 1448A
  CDS (1)..(1425): transl_table=11
atggccgccaacgccaacatagaagaaagccgctctgcccgattcgccttgcgctgcgccgcatgggctgaacgctggtttcccgattcatgggtatttgccgcgctggcggtggtcatcgtcacactggcaacactggccattggcgcacgtccggccgaggctgccaaagcgttcggtgacgggttttggagcctgattccgttcaccatgcaaatggccttcgtggtcatcggcggttacgtcgtggccagttcgccgcccgcggtgcgcctgatcgaccgcttggcccttgtgccgcgtaacggtcgttcggcagtggcatgggtggcgctgatttccatgctggcttcgctgctcaactgggggctgtcactggtgttcggcggcctgctggtgcgcgccctcgcccgccgtaccgacctgcgcatggattatcgtgcagccggtgctgccgcgtatctggggctgggcgcagtctgggcgttggggctgtcgtcttcggcggcacagttgcaggccaacccggccagtctgccgccttcgatcctggcgataaccggcgtgatccctttcactgaaaccatctttctctggcaatccggggtcatgctcgccgcgctggtagtcatatcgctgatcgtggcctatgccaccgcccctggcccgaacagcgcccgggacgccaaagcctgcggtgtcgacccggcattcagcctgccgccactggcacctcgcacacggcccggcgaatggctggaatacagcccgctgttgatcatcctgatggtgctgctgggggtcggctggctgttcagcgagttttcgagcaaaccggcgatcaccgcaatctccgggctcaacacctacaattttctgttcatcatgctcggagcgttgctgcactggcgaccacgcagctttctcgatgccgtagcgcgggccgtgcccaccaccaccggcgtgttgattcaattcccgctttacggctcgatcgctgcgttactgaccacagtcaaaggcgctgatgcgcagaccctggcgcactacatctcgacattctttaccagcattgcctcccacgacacctacgcgattctgatgggcgtctattcggccattctgggcttcttcattccgtcgggcggcggcaagtggatcattgaagcgccttacgtgatgcaagtcgccaacgacctgcagtatcacctcggttgggcggtgcagatctacaatgcagccgaagcgctgcccaacctgatcaatccgttctacatgctgccgctgctgggcgtgctgggcctcaaggcacgtgacctgatcggtttctcgttcgtgcagttgctggtccacacgccgctggtgctgtttctgctctgggcattgggcactacgctggtctatacgccaccggtaatgccctga

SEQ ID NO: 20924 - protein, 474 aa, Pseudomonas syringae pv. phaseolicola 1448A
MAANANIEESRSARFALRCAAWAERWFPDSWVFAALAVVIVTLATLAIGARPAEAAKAFGDGFWSLIPFTMQMAFVVIGGYVVASSPPAVRLIDRLALVPRNGRSAVAWVALISMLASLLNWGLSLVFGGLLVRALARRTDLRMDYRAAGAAAYLGLGAVWALGLSSSAAQLQANPASLPPSILAITGVIPFTETIFLWQSGVMLAALVVISLIVAYATAPGPNSARDAKACGVDPAFSLPPLAPRTRPGEWLEYSPLLIILMVLLGVGWLFSEFSSKPAITAISGLNTYNFLFIMLGALLHWRPRSFLDAVARAVPTTTGVLIQFPLYGSIAALLTTVKGADAQTLAHYISTFFTSIASHDTYAILMGVYSAILGFFIPSGGGKWIIEAPYVMQVANDLQYHLGWAVQIYNAAEALPNLINPFYMLPLLGVLGLKARDLIGFSFVQLLVHTPLVLFLLWALGTTLVYTPPVMP

SEQ ID NO: 20925 - DNA, 1407 bp, Streptococcus pyogenes MGAS5005
  CDS (1)..(1407): transl_table=11
atgaataacatcaaaaccaaaaaaaggtttatggatcgctatattgatggctttatgaaatggatgccagaatcgctttttatctgttttattttaacctttttagtcgttactatgtctgtgttgatgacggatagtccctttattggtacggaaaagacgggcgggattatctatggctgggtaaatggtttttgggggctgttgtcctttgccatgcagatgactattttacttgcgacagggaatgctgtagcgagttctccacctgctcataagatgtttaagtcccttgccaaactgcctcaaaccaggactcagatttttatcttttccattgtagtaggctctatctttggctttttacactggggtcttggtatgatggttgctattgtgtttgggaaagagttgcttgttcaggctaggcaaaaagggattaaggtgcatacgcctttgtttgttgctactttattttttacctttttaccagctacttctggtctatctggtgctgcggtgctttattcggctactccagattatttgcgaaatagtgtcgcagatgcttataaacaggttgttcctgaaagtgttcctctgacagaatcagttttgaatcttccatttatcagtcttttagtggtgtgtatgctggaaccgctttgctttgctttattggcgcacccaaaagatgaaactaaaatcatggaacttgatgatgagatctatcaccatagtcttgataccgcttcacatgttgttattgcaagaaacacacctgctgaaaagatgaacgcatctcgcttagtgatgtatcttgttggtggggccattgttagctatagcctttatcatttttcggtggtgggcttgtctggtctagatctcaattgttttaactttttatttttaggcttaggcttgcttctttgtggtcaacaaggaccagaatattatggttccttattcaaagatggggtcatgtcatcttggggcttggtgcttcagtttccattttacgctggtatttttggaatcattcaaagtacaggtttaggattagagatttcccatttctttgtcgctatttcaaatgggacaacatggccggtctttgcttatctttactcggctttgctgaatattgcggtaccatcaggaggctcaaaatttgtgattgaagctccctatatcgtccctgcaactatcgaagttggtaatgacttaggtaagattttgcaggcttatcaattaggagatgccacaacaaacttgatagttcctttttgggccttatcttacctctcaaacttcaaactaaaattcaatcaaattgtggcttatactattccttgtgtcttggtggtcacaggtattgccatcatttacctatttgtattttag

SEQ ID NO: 20926 - protein, 468 aa, Streptococcus pyogenes MGAS5005
MNNIKTKKRFMDRYIDGFMKWMPESLFICFILTFLVVTMSVLMTDSPFIGTEKTGGIIYGWVNGFWGLLSFAMQMTILLATGNAVASSPPAHKMFKSLAKLPQTRTQIFIFSIVVGSIFGFLHWGLGMMVAIVFGKELLVQARQKGIKVHTPLFVATLFFTFLPATSGLSGAAVLYSATPDYLRNSVADAYKQVVPESVPLTESVLNLPFISLLVVCMLEPLCFALLAHPKDETKIMELDDEIYHHSLDTASHVVIARNTPAEKMNASRLVMYLVGGAIVSYSLYHFSVVGLSGLDLNCFNFLFLGLGLLLCGQQGPEYYGSLFKDGVMSSWGLVLQFPFYAGIFGIIQSTGLGLEISHFFVAISNGTTWPVFAYLYSALLNIAVPSGGSKFVIEAPYIVPATIEVGNDLGKILQAYQLGDATTNLIVPFWALSYLSNFKLKFNQIVAYTIPCVLVVTGIAIIYLFVF

SEQ ID NO: 20927 - DNA, 1449 bp, Ralstonia eutropha JMP134
  CDS (1)..(1449): transl_table=11
atgaaagagacaacaagcatggcattcccggatgccgggaagctgcaacaaggcggactggaacgccttgcgatacgggtgactgactggtccgagcggtggttcccggactcgtatatttttgcggccatcgccgtggtcgtggtggcgttgggcgcaatgttggtgggcgcgccagcgcaggccgtggcgaaggcctttggcgacggcttctggagcctgatccctttcaccatgcagatggcagtggtcgcgattgccggctacgtggtggcggtgtcgccgccggcagccatgctgatcaaccgtctggcagccttgccgcggacagcgcgcggtgccgtggctttcgtcgcgctcgtgagcctgtcgacgtcgctgctcaactgggcaatcagtttgatcttcagtggcttgctggtacgcgcaattgccaggcggcgcggcttccgtgtcgactacagggcagccagcgcggcagcctaccttggcatgggggcaacctgggcactgggactcagctcctccgccgcgcagctacaggcaaatgccgccagcctgcccaaatctctgctggatatcaccggggtcatcccgttctccgatacgatctttctttggcaatccatggcgatgaccgccgtattgatcgtcgtgtccctggcggtggcgtacttctcggcccctaccgaggcgcgtgctcgcacggcggccgatatgggggttgacctgaacgatgccgatgaagcggtcgcgcggccatctcggccaggtgaatggctggaatacagtccgatcctgacgttggttctggtcgccatgggcgcgagctggctctatcaggagttttcgaccaagaatccgattctcgccatctccaacctgaatacctacaacttcctgttcctgctgctcggcatgctgctgaactggcgtccgaagcgctttctgcgcgccgtcgcgaagtccgtgccgtccacggccggcgtcctgatccagtttccgctgtatggcggcattgcctttatcctgaccaaggcgaccggcggcaacggcgccccgctgtcgcaccatctggcgtcagcctttgtctccatggcgaccacggagtcgttctccgcggtcatgggagtgtattccgccgtgctcggcttcttcgtaccgtccggcggcggcaaatggatcatcgaagctccttacgtgatgcaggccgccaacgaactaaaggtacaccttggctgggcagtacaggtctacaacgccgctgaagcgctgccgaatttgatcaatcctttttggatgctgccgttgctcggtgtgctcggcatccgggccaaggacgtggtcggcttcaccttcacccagttgctggtgcatacgccgttagttctgctcatgttatgggctttcgccgcgacgctttcctaccatcctccggtgatgccctga

SEQ ID NO: 20928 - protein, 482 aa, Ralstonia eutropha JMP134
MKETTSMAFPDAGKLQQGGLERLAIRVTDWSERWFPDSYIFAAIAVVVVALGAMLVGAPAQAVAKAFGDGFWSLIPFTMQMAVVAIAGYVVAVSPPAAMLINRLAALPRTARGAVAFVALVSLSTSLLNWAISLIFSGLLVRAIARRRGFRVDYRAASAAAYLGMGATWALGLSSSAAQLQANAASLPKSLLDITGVIPFSDTIFLWQSMAMTAVLIVVSLAVAYFSAPTEARARTAADMGVDLNDADEAVARPSRPGEWLEYSPILTLVLVAMGASWLYQEFSTKNPILAISNLNTYNFLFLLLGMLLNWRPKRFLRAVAKSVPSTAGVLIQFPLYGGIAFILTKATGGNGAPLSHHLASAFVSMATTESFSAVMGVYSAVLGFFVPSGGGKWIIEAPYVMQAANELKVHLGWAVQVYNAAEALPNLINPFWMLPLLGVLGIRAKDVVGFTFTQLLVHTPLVLLMLWAFAATLSYHPPVMP

SEQ ID NO: 20929 - DNA, 1344 bp, Haemophilus somnus 2336
  CDS (1)..(1344)
atgattagccgtatttctcggtttatgacaactatcgttagtaagtatatgccagagccactggttttagcagtgctattgagtatcatcatcttcttttgggcactttggggcacagaacacagtacaggtgcattggttgagatgtggggtaatggtttttggaatttgcttgctttctcaatgcagatggcgatggtggtagtaactggtaatgctcttgcttcagctccacaaattcgtcgatttctttcaactgctgcatctattgcgaaaacaccaactcaaagcattatgcttgttacctttatgagttgtgttgcctgtgcaattaactgggggtttggcttggttgtgggagcaatgtttgcaaaagaagttgcacgccgtattaaaggtgtggactacgccttgctgattgcctgtgcatacattggctttatgacttggggaggtggcttttcaggctcaatgccactccaagcggcaacgccaaataacccaattgcacgttttatcacagatggaaattatgctgatggtattattcctgttactaaaacactattaaccagctataacatattcattattggtatgttaatcattacgttaccgtttctcactaaaatgatgcacccaaaagcagaaaatgtaaaaataattgatcctcgcttattacaagaagatccaaaattcagcaaaaagttaacagaatcttccactattgctgagaaaattgaagagagttgcattctggcttacattattgcagggacaggttttgcttatcttgcaatatattttgcgaaaaacggcttcaatttaacgatcaacaccgtaaatcttatctttttaatggctggtttagccttgcatggctcaccagctgcttatgttcgtgctattacccatgcagcacacagtacagcaggaatattaattcaatttccgttctatgctggtatgcagttaatgatggagcattccggtttaggtggcatgattacagaattttttgtaaatatttcaacgaaagacacctttccggtattaacctttttcagttcagcattagtgaattttgcagtaccgtctggcggtggtcactgggtagtgcaaggtccatttattattcccgcagcacaagaactgggtgcagatttaggcaaatcagtcatgggtattgcgtatggtgatatgtgggcgaatatggcacagccattttgggcattgcctgctttaggtatagcaggacttggtgtgcgtgacattatgggctactgcatgacagcattacttttcacagcaccaattttcgttattggactttatttcctttaa

SEQ ID NO: 20930 - protein, 447 aa, Haemophilus somnus 2336
MISRISRFMTTIVSKYMPEPLVLAVLLSIIIFFWALWGTEHSTGALVEMWGNGFWNLLAFSMQMAMVVVTGNALASAPQIRRFLSTAASIAKTPTQSIMLVTFMSCVACAINWGFGLVVGAMFAKEVARRIKGVDYALLIACAYIGFMTWGGGFSGSMPLQAATPNNPIARFITDGNYADGIIPVTKTLLTSYNIFIIGMLIITLPFLTKMMHPKAENVKIIDPRLLQEDPKFSKKLTESSTIAEKIEESCILAYIIAGTGFAYLAIYFAKNGFNLTINTVNLIFLMAGLALHGSPAAYVRAITHAAHSTAGILIQFPFYAGMQLMMEHSGLGGMITEFFVNISTKDTFPVLTFFSSALVNFAVPSGGGHWVVQGPFIIPAAQELGADLGKSVMGIAYGDMWANMAQPFWALPALGIAGLGVRDIMGYCMTALLFTAPIFVIGLYFL

SEQ ID NO: 20931 - DNA, 1326 bp, Fusobacterium nucleatum subsp. vincentii ATCC 49256
  CDS (1)..(1326): transl_table=11
gtgtgtttcgtgtatggaaagatggcttccagatccatttatattttgtgcttgttaacttttatagtgtttataggggctatatttcttacaaaagcaactcctttacaagtagttggattttgggctgatggtttttggtctttacttgctttctcaatgcaaatggcattagttttagttacagggcatactttggcaagttcaagattatttaaaaagatgttgtcaacatttgcttctggaataaagggacctaaacaagcaatacttattgtatcaatagtttcaggaatagcttgtgcattaaactggggttttggactagtaattggggctatttttgccaaagaaattgctaaaaaagtaaaaggagtggattatagacttcttatagcttcagcttatacagggttcttagtatggcatggaggattatcaggttctattccattacaacttgcaagtggtggagaaggattagcaaagcaaacagcaggtgctgtaacagaggctgttccaataagtcaaacattgttttcaccaatgaacatttttataattgtagggcttttaataatagtacctttattgaatatggcaatgtttccaagtaaggatgaagttgtagaagttgatccaaaattattagcagaaccaaaagaaattgtacttgatgtttctaaaatgactccagctgaaagaatagaaaatagcagagtagtttctatcttactttcaattatgggatttatatatataggatattatttaatgacaaaaggatttgcattaaatcttaatatagtaaactttatattcttattcttaggaattttattacatggaactccaagaagatatttgaatgcacttgcagaagcagtaaagggtgcagggggaatattattacaatttccattttatgcaggtattatgggaataatggtaggaatggatgctgatggaatatctcttgcaaagcttatgtctaatttctttgtaaatatttctactgaaagaacattcccagtattttcatttatcagtgcaggagttgtaaatttctttgttccatcaggtggaggacaatgggcagttcaagctccaatagtaatgccagcaggacaagcaataggagtaacagcagcaaaatctgctatggcaatagcttggggagatgcttggacaaatatgatacaaccattctgggctttaccagcattaggaattgcaggattaggtgctaaggatataatgggctattgtttaattgtaacagtggtatcaggattattcatttgcacaggtttcttattattctaa

SEQ ID NO: 20932 - protein, 441 aa, Fusobacterium nucleatum subsp. vincentii ATCC 49256
MCFVYGKMASRSIYILCLLTFIVFIGAIFLTKATPLQVVGFWADGFWSLLAFSMQMALVLVTGHTLASSRLFKKMLSTFASGIKGPKQAILIVSIVSGIACALNWGFGLVIGAIFAKEIAKKVKGVDYRLLIASAYTGFLVWHGGLSGSIPLQLASGGEGLAKQTAGAVTEAVPISQTLFSPMNIFIIVGLLIIVPLLNMAMFPSKDEVVEVDPKLLAEPKEIVLDVSKMTPAERIENSRVVSILLSIMGFIYIGYYLMTKGFALNLNIVNFIFLFLGILLHGTPRRYLNALAEAVKGAGGILLQFPFYAGIMGIMVGMDADGISLAKLMSNFFVNISTERTFPVFSFISAGVVNFFVPSGGGQWAVQAPIVMPAGQAIGVTAAKSAMAIAWGDAWTNMIQPFWALPALGIAGLGAKDIMGYCLIVTVVSGLFICTGFLLF

SEQ ID NO: 20933 - DNA, 1344 bp, Haemophilus influenzae R2866
  CDS (1)..(1344)
atgattagtcgtgtttctcgttttatggcgacattcgtcagtaaatacctgccagacccacttatttttgccgtgttactcacctttgtcacattcatttgtgcttggggattaaccgatagtacacctgttgatttagttaatatgtggggtaatggcttttggaatttacttggttttggtatgcaaatggcattaattgtcgtaactggtaatgctcttgcaacctcaccacaaattcgtaagtttctttctacaatcgcttcaatagcaaaaacaccggcacaaggtgttgtcttagttacgtttatgggttcaattgcctgtatcattaactggggcttcggtttggtcgttggtgcgatgtttgcaaaagaagtcgcgcggagaataaaaggcagtgactacgccttactgattgcctgtgcctatattgcatttatgacatggggtggaggtttttcaggctcaatgccacttttagccgcaacaccaggcaacccagttgctcatttaatggtgagcgaaagcaacccacaaggtattattcctgcagttagtacgcttttctctgggtacaatatttttatcacgttaagtttagtcatttgcttgcctttcattacctatatgatgatgcccaaaaatggcgaaacaaaaagtattgatccaaaacttattgcgcccgatccaacatttgataaaaaattggataaagatgcaacacttgctgaaaaaatggaagaaagccgcttcttagcctatacaatcggggcattaggatatagttacctcggtatgtatttctacaaaaacggattcaatctcacaattaataatgtaaaccttattttcttaatcacaggaattgtgcttcatggctcgccaatggcctatatgcgagcaattattaatgccacacgaagcacagcagggatcttagtgcaattcccattctatgcgggtgtgcaactaatgatggagcattcaggcttaggtggtttaatcaccgaattctttatcaatgttgctaacaaagattctttcccattattaaccttctttagttctgcctttattaactttgcagtgccttctggtggcggtcactgggtcatccaaggaccatttgttatccctgctgctcaagcattaggtgcagatctaggtaagtctacaatggcgattgcctatggtgagcaatggatgaacatggctcagccattttgggcattaccagcactgggtatcgcagggcttggcgtgagagatattatgggcttctgtatgaccgcacttatcttcaccgcaccaatttttattattggtttatatttcttatag

SEQ ID NO: 20934 - protein, 447 aa, Haemophilus influenzae R2866
MISRVSRFMATFVSKYLPDPLIFAVLLTFVTFICAWGLTDSTPVDLVNMWGNGFWNLLGFGMQMALIVVTGNALATSPQIRKFLSTIASIAKTPAQGVVLVTFMGSIACIINWGFGLVVGAMFAKEVARRIKGSDYALLIACAYIAFMTWGGGFSGSMPLLAATPGNPVAHLMVSESNPQGIIPAVSTLFSGYNIFITLSLVICLPFITYMMMPKNGETKSIDPKLIAPDPTFDKKLDKDATLAEKMEESRFLAYTIGALGYSYLGMYFYKNGFNLTINNVNLIFLITGIVLHGSPMAYMRAIINATRSTAGILVQFPFYAGVQLMMEHSGLGGLITEFFINVANKDSFPLLTFFSSAFINFAVPSGGGHWVIQGPFVIPAAQALGADLGKSTMAIAYGEQWMNMAQPFWALPALGIAGLGVRDIMGFCMTALIFTAPIFIIGLYFL

SEQ ID NO: 20935 - DNA, 1452 bp, Burkholderia cepacia R18194
  CDS (1)..(1452)
atgaaggatctgatggaagtgccgcacgttggtgcggcggcgacggaccgtgaaggggcgctcgagcggatggccgccggcgtggcgcgctggtcggagaagtggttcccggacgcttatattttcgccgcgattgccgtggtcgtcgtggcggcgggcgcgacggcaatcggcgcgccaatcaggcaggtcggtgtggcgttcggcgacggcttctggagtctcatcccgttcacgatgcagatggcgatcgttgccatttcgggttatgtcgtcgcggtatcgccacccgcgtcgaaactgatcggcgcgctcgcgcgctttccgtcgtccggacgggcggccgtggcgttcgttgcattcgtcagcatcgtcgcgtccctgttcaactgggcgatcagcctgatcttcagcggcctgctggttcgggcactggcgcgtcgcgccgatctccgcatggactaccgggcagcgggcgcggcggcttatctcggcatgggggcgacgtgggcgcttggattgagctcgtccgcatcgcaactgcaagcgaatccggacagcctgcccaagacgctgctcgccatctccggcgtcattcccttcgcggaaaccatcttcctgccgcagtcgatgttgatggccgccgtgctgacggtcgtgtcgctgctgattgcctggctgtccgcgcccggcggcacgcgtgcaaagacggcggcggagctcgggattccgctcgacgaggcccacgcgacgatcccgcgcccgactcgcccgggtgactggctcgagtacagcccgctcatcaccctcgcgatcgttgcgatcgggtcggtctgggtcgcgcacgaattcacgacgaaaaacccgatgatcgcgatttcgaacctgaacacgtacaacttcctgttcctgatgctgggcatgctgctgaactggcgaccgaggcgattcctcaatgccgtcgcgcgtgccgtgccatcggtcgcaggtgtactgatccagtttccgttgtacggcggcatcgcctacatcctgaccaaggcgtcggcgcctgccggactgccgctctccgatcatctcgcgcatttcttcgtcgcgctgtcgtcgcaatcgtcgtttcccgcggtgatgggggcgtactcggccgtcctcggattcttcgtgccgtccggcggcggcaagtggatcatcgaagcgccctacgtgatcgaggcggcaaaactgctgcacgtccatctgggctgggcggtgacggtctacaacgcggccgaggcattgccgaacctggtcaatccgttctggatgctgccgctcctcggtgtgctcgggctgcgcgcccgcgacatcgtgggattcacgttcacgcagctggcggtgcatcttccgctggtgattttcatgctctgggcgcttgcgagcacgctcagctaccatccgccagtcatgccgtga

SEQ ID NO: 20936 - protein, 483 aa, Burkholderia cepacia R18194
MKDLMEVPHVGAAATDREGALERMAAGVARWSEKWFPDAYIFAAIAVVVVAAGATAIGAPIRQVGVAFGDGFWSLIPFTMQMAIVAISGYVVAVSPPASKLIGALARFPSSGRAAVAFVAFVSIVASLFNWAISLIFSGLLVRALARRADLRMDYRAAGAAAYLGMGATWALGLSSSASQLQANPDSLPKTLLAISGVIPFAETIFLPQSMLMAAVLTVVSLLIAWLSAPGGTRAKTAAELGIPLDEAHATIPRPTRPGDWLEYSPLITLAIVAIGSVWVAHEFTTKNPMIAISNLNTYNFLFLMLGMLLNWRPRRFLNAVARAVPSVAGVLIQFPLYGGIAYILTKASAPAGLPLSDHLAHFFVALSSQSSFPAVMGAYSAVLGFFVPSGGGKWIIEAPYVIEAAKLLHVHLGWAVTVYNAAEALPNLVNPFWMLPLLGVLGLRARDIVGFTFTQLAVHLPLVIFMLWALASTLSYHPPVMP

SEQ ID NO: 20937 - DNA, 1290 bp, Burkholderia cepacia R18194
  CDS (1)..(1290)
atggtccaccgcgtgttgcccgacccgttgattttcgcgatcctgctgacggtcgtcgcgttcgcactcgcgttcggcctcacgccgaacacgcccgtgcagctcacgacgatgtggggttcgggtttctggaacctgctcgcgttctcgatgcagatggtgatgattctcgtcaccggccacgcactcgcgagttcgccgccggtgaagcgcatgctcgtcgcgctcgcgagcaccgcgcgcacgccggggcagggcgtgatgctcgtcgcgttcgtcggcgcgctcgcgtgcgcgatcaactggggcttcggcctcgtgctcggtgcgatgctcgcgcgcgaagtggcgcgccgtgtcgccggcagcgattaccggctgctcgttgcgtccgcgtacatgggcttcctgagctggcacggcggattgtcgggttcggtcccgctcgtcgcggccacgaagggcaatccgatggaaaagaccatcgggctgattcccgtgtcgcagacgatcttcaccggctacaacgcgttcatcacgatcggcctgatcgtgatgctgccgttcctcgcgcggatgatgatgccgaagccgggtgaggtcgtcagcgtcgatccggcgctgctggccgaaccgccgagcgtggagcgccagctcgggcccgacgcgacgttcgcggaacggctggaggaaagccgcttgctgtcggttctcgtcgcggcgctgtgcgcggcgttcctcgtgctgaagttcgtgcagaagggcttcgcgctcgacatcgacaccgtgaaccttgcgttcctcgcggccggcatcctgctgcaccgtacgccgatggcctatgcgcgcgcggtggccggtgcggcgcgcggcgcgtcggggatcatgatccagttcccgttctacgcgggcatccaggcgctgatggatcactcggggctcgcgggcgtgatcacgaaatggttcgtcgatatcgcgaacgtgcacacgttcccgctgctcgcgttcctgagctcggccgtgatcaatttcgcggtgccgtccggcggcggccactgggtcgtgcagggtccgttcgtgatgccggccgcccaggcgctcggcgccgatctcggcaaggccgcgatggcgatcgcgtatggcgaagcgtggaccaacatggcgcagccgttctgggcgctgcccgcgctggcgattgccgggctcggcgtgcgcgacatcatggggtattgcgtgacgacgctgctgttctcgggtgttgtgttcgtcgcggggatgtatctgttctga

SEQ ID NO: 20938 - protein, 429 aa, Burkholderia cepacia R18194
MVHRVLPDPLIFAILLTVVAFALAFGLTPNTPVQLTTMWGSGFWNLLAFSMQMVMILVTGHALASSPPVKRMLVALASTARTPGQGVMLVAFVGALACAINWGFGLVLGAMLAREVARRVAGSDYRLLVASAYMGFLSWHGGLSGSVPLVAATKGNPMEKTIGLIPVSQTIFTGYNAFITIGLIVMLPFLARMMMPKPGEVVSVDPALLAEPPSVERQLGPDATFAERLEESRLLSVLVAALCAAFLVLKFVQKGFALDIDTVNLAFLAAGILLHRTPMAYARAVAGAARGASGIMIQFPFYAGIQALMDHSGLAGVITKWFVDIANVHTFPLLAFLSSAVINFAVPSGGGHWVVQGPFVMPAAQALGADLGKAAMAIAYGEAWTNMAQPFWALPALAIAGLGVRDIMGYCVTTLLFSGVVFVAGMYLF

SEQ ID NO: 20939 - DNA, 1347 bp, Bacillus cereus G9241
  CDS (1)..(1347): transl_table=11
ttgtttcgttcctttacaaatggttgcgtcgccttagtgcaacgtttcttgccagagccgtttattttatcatgtttattaactgtttttgttatcttcttcggcatgtttgcaacgcatcaaacacctgtggaaatgattaatcattggggtaatggcatttggggactactcgccttttctatgcaaatggcacttgtacttgtgacaggatctgctttagcaaacgcgcctctcattaaaaaaggactaacgaaagcggcaaaactaccgaaaacgactggacaaggtattattgccatttcaatcgtaagtttacttggggcatacataaactggggatttggtattgttgtatctgttttatatgcaaaagaagtggcaaggcagctggaaggattagattatagactggcaattgcttcttcttactctggatttctcatttggcatgcggggctttctgcttctattcctcttacgttagcaactggcggtgaaacgttaattaaaacgacagcaggaagtataaaagaagcgattccaataacagaaacgttattctcaccatacgctctcgtgccagttattatttttctcgttacgatgcctctcattaataaagcgatgcatccagatgaaaaacatacgataacggtagatcctagtgtattccatgaagaagctgccgctcaagaagtaggaaacaatacgttcgctgagaaaatggaaaatagtatcatcattacactttgtgttggattgttaggtctcatttatatttccaattacttttatacgaaaggttttaaccttacgctagacatcgttatttttatgttattaattgctggacttatttttcaccgtactccgattcaatatattcgcgctttttcagactctacgaaaagtgcttctggtattttactccagtttccgttttatgctggaattatgggaatgatgattggagcaaatagtgacggactttcacttggaggagctatttcgaatttctttattagcatttcaaatgaaacgactttcccactctttacatttttaagtgctggcatcgttaatatttttgttccatctggtggcggtcaatgggctgtgcaagcccccattatgattccagctggagctgaacttggtgtacctgctgcaaaaacagcgatggccattgcttggggagatgcttggacgaatttaattcaaccattctgggcattaccggcattagcgatagcaggtttaggcgctcgtgatattatgggattttgcgttgtgaacttactatatgcaggatttatcataagtctatgtttcttatttatttaa

SEQ ID NO: 20940 - protein, 448 aa, Bacillus cereus G9241
MFRSFTNGCVALVQRFLPEPFILSCLLTVFVIFFGMFATHQTPVEMINHWGNGIWGLLAFSMQMALVLVTGSALANAPLIKKGLTKAAKLPKTTGQGIIAISIVSLLGAYINWGFGIVVSVLYAKEVARQLEGLDYRLAIASSYSGFLIWHAGLSASIPLTLATGGETLIKTTAGSIKEAIPITETLFSPYALVPVIIFLVTMPLINKAMHPDEKHTITVDPSVFHEEAAAQEVGNNTFAEKMENSIIITLCVGLLGLIYISNYFYTKGFNLTLDIVIFMLLIAGLIFHRTPIQYIRAFSDSTKSASGILLQFPFYAGIMGMMIGANSDGLSLGGAISNFFISISNETTFPLFTFLSAGIVNIFVPSGGGQWAVQAPIMIPAGAELGVPAAKTAMAIAWGDAWTNLIQPFWALPALAIAGLGARDIMGFCVVNLLYAGFIISLCFLFI

SEQ ID NO: 20941 - DNA, 1332 bp, Pseudomonas fluorescens PfO-1
  CDS (1)..(1332)
atgttcgccgcactggcggtgatcatcgtcgcgctggcgaccctggccatgggcgccaaacccaccgacgccgccatggcgttcggggacggattctggagcctgatcccgttcaccatgcagatggcgttcgtggtgatcggtggttatgtcgtggccagttcgccgcccgccgtgaaactgatcgatcgcctggcgcggatcccgaagaacggtcgctctgccgtggcgtgggtcgcgctgatctcgatggtcgcgtccttgctcaactggggcctgtcgctggtgttcggcggtctgctggttcgcgccctcgcccgccgcaccgatctgaaaatggactatcgcgccgccggtgccgccgcctaccttggcctcggcgccgtgtgggcactgggactgtcgtcgtccgccgcgcagttgcaggccaacccggccagcctgccgccgtcgatcctgtcgatcaccggggtgattccgttcacccagacgattttcctctggcagtcgggcgtgatgctgctggcgctgatcgtgatttcgatcatcatcgcctacgccaccgcgcccggcccgaactcggcgcgtgacgccaaggcctgcggcatcgacccggccttcaacctgccaccgctgcaaccgcgcacccgccctggcgaatggctggaacacagcccgctgctgatcatcctgctggtgctgctggcggccggatggctgttccacgagttttcgaccaaacctgcgatcaccgcgatttccgggctcaacacctacaacttcctgttcatcatgctcggcgcgttgctgcactggcgcccgcgcagtttcctcgatgcggtgtcgcgcgccgtgccgaccaccaccggggtactgatccagttcccgctgtacggctcgattgccgcgctgatgaccacggtcaagggcaccgacgcccagaccctggcccatcacatctcgacgttcttcgtaagcatcgcttcccacgacacctatgcgttgctgatgggtgtgtactcggcgattctcggtttcttcattccgtccggcggcggcaaatggatcatcgaggcgccgtacgtaatgcaggtggccaacgatctcaactatcacctcggctgggcggtgcagatctacaacgccgcagaagccctgccgaatctgatcaacccgttttatatgctgccgctgctgggcgtgctggggctcaaggcgcgggatctgatcggtttttcgttcgtgcaattactggtgcacacgccgctggtattggtgctgctgtgggctctgggtacgacgctgtcgtatctgccgcccgtcatgccctaa

SEQ ID NO: 20942 - protein, 443 aa, Pseudomonas fluorescens PfO-1
MFAALAVIIVALATLAMGAKPTDAAMAFGDGFWSLIPFTMQMAFVVIGGYVVASSPPAVKLIDRLARIPKNGRSAVAWVALISMVASLLNWGLSLVFGGLLVRALARRTDLKMDYRAAGAAAYLGLGAVWALGLSSSAAQLQANPASLPPSILSITGVIPFTQTIFLWQSGVMLLALIVISIIIAYATAPGPNSARDAKACGIDPAFNLPPLQPRTRPGEWLEHSPLLIILLVLLAAGWLFHEFSTKPAITAISGLNTYNFLFIMLGALLHWRPRSFLDAVSRAVPTTTGVLIQFPLYGSIAALMTTVKGTDAQTLAHHISTFFVSIASHDTYALLMGVYSAILGFFIPSGGGKWIIEAPYVMQVANDLNYHLGWAVQIYNAAEALPNLINPFYMLPLLGVLGLKARDLIGFSFVQLLVHTPLVLVLLWALGTTLSYLPPVMP

SEQ ID NO: 20943 - DNA, 1434 bp, Rhodospirillum rubrum
  CDS (1)..(1434)
atggaaaccaccgcggaccaggaaagccgcggcaagaccggggttgaatcccaaggtcgtctggcgcatatggccttcgagttcacccgcatcgccgagaagtggtttcccgacgccttcgtcttcgtcgtcctgaccacccttgtcgtcaccgccgccgatctggccatcggcgcctcgcccttgcagatcgccaagggcttcggagcggggttctggacgctcattcccttcaccatgcagatggcgatggtcgccatcaccggctatgtggtcgccacctcgccgccctgcacccggctgatcaccaaattagccgccttcccgtcaacgccggccggcgccgtcgcctgggtggccttcatctcgatggcggcctcctatctcaactgggcgctcagtctagtgctgggtggtttgctcgtccgcgccctcgcccgccgcgtcgacctgaagatggactatcgcgccgccggagccgccgcctatatgggcctgggctcgacctgggcgctggggctcagttcgtcctcggccatgctgcaggccaatccgctgtccctgcccaagtcgatctccgacatcagcggcgtcattccgctcagccaaacgatcttcctgtggcagtcggtggttctgtatctcagcttgatgaccctggccgtcgtcgtcttctacttcgccgcgccgcgcggcaagcatgtgcgcaccgcccaggacatgggcgtggacgtctcgatcgagcccgagcccgcgcagaagcccaagcgccccggcgaatggctggaattcacccccgtcctgcccatcctcgtcgtcatcttgtcggtcggctacttctgggagcagttcagcagccagggcgtgctggtcacggtttccagcctcaacaactataacttcgccttcctgatgctcggcctgctgctgcaccgcaatatccgcagcttcctgaccgccgtcacccgggcggtgccgacctcggcgggcgtgctgatccagttcccgttctatggcgccatcgccgccatgctgaccggcgtgctgggatcggacgggatctcgatctcccaccacatctcggagctgttcgtcagcatcgccaccaccaacagcttcccgatcgtcatcggcatctattcggccatcctcggcttcctcatcccctcgggtggcggcaagtggatcatcgaggcgccctatgtgttgcaggcggccaaggacatccacgcccacatgggctgggcggttcaggtctacaacgcggccgaagccctgcccaatctgatcaaccccttctggatgctccccttgctcggcatcctcaagcttcaggcccgcgacatcgtcggcttctgcttcacccagctgatcttcagcgccccggtggtgatgctgttgctgtgggtttttgcccagactctcgcgccctga

SEQ ID NO: 20944 - protein, 477 aa, Rhodospirillum rubrum
METTADQESRGKTGVESQGRLAHMAFEFTRIAEKWFPDAFVFVVLTTLVVTAADLAIGASPLQIAKGFGAGFWTLIPFTMQMAMVAITGYVVATSPPCTRLITKLAAFPSTPAGAVAWVAFISMAASYLNWALSLVLGGLLVRALARRVDLKMDYRAAGAAAYMGLGSTWALGLSSSSAMLQANPLSLPKSISDISGVIPLSQTIFLWQSVVLYLSLMTLAVVVFYFAAPRGKHVRTAQDMGVDVSIEPEPAQKPKRPGEWLEFTPVLPILVVILSVGYFWEQFSSQGVLVTVSSLNNYNFAFLMLGLLLHRNIRSFLTAVTRAVPTSAGVLIQFPFYGAIAAMLTGVLGSDGISISHHISELFVSIATTNSFPIVIGIYSAILGFLIPSGGGKWIIEAPYVLQAAKDIHAHMGWAVQVYNAAEALPNLINPFWMLPLLGILKLQARDIVGFCFTQLIFSAPVVMLLLWVFAQTLAP

SEQ ID NO: 20945 - DNA, 1035 bp, Haemophilus influenzae 86-028NP
  CDS (1)..(1035)
atgattagtcgcgtttctcgttttatgacgacattcgtcagtaaatacctgccagacccacttatttttgccgtgttacgcacctttgtcacattcatttgtgcttggggattaaccgatagtacacctgttgatttagttaatatgtggggtaatggcttttggaatttacttggttttggtatgcaaatggcattaattgtcgtaactggtaatgctcttgcaacctcaccacaaattcgtaagtttctttctacaatcgcttcaatagcaaaaacaccagcacaaggtgttgtcttagttacgtttatgggttcaattgcctgtatcattaactggggcttcggtttggtcgttggtgcgatgtttgcaaaagaagtcgcgcggagaataaaaggcagtgactacgccttactgattgcctgcgcctatattgcatttatgacatggggtggaggtttttcaggctcaatgccacttttagccgcaacaccaggcaacccagttgctcatttaatggtgagcgaaagcaacccacaaggtattattcctgcagttagtacgcttttctctgggtacaatatttttatcacgttaagtttagtcatttgcttgcctttcattacctatatgatgatgcccaaaaatggcgaagcaaaaagtattgatccaaaacttattgcgcccgatccaacatttgataaaaaattggataaagatgcaacacttgctgaaaaaatggaagaaagccgcttcttagcctatacaatcggggcattaggatatagttacctcggtatgtatttctacaaaaacggattcaatctcacaattaataatgtaaaccttattttcttaatcacaggaattgtgcttcatggctcgccaatggcctatatgcgagcaattattaatgccacaagaagcacagcagggatcttagtgcaattcccattctatgcgggtgtgcaactaatgatggagcattcaggcttaggtggtttaatcacagaatttctttatcaatgttgctaa

SEQ ID NO: 20946 - protein, 344 aa, Haemophilus influenzae 86-028NP
MISRVSRFMTTFVSKYLPDPLIFAVLRTFVTFICAWGLTDSTPVDLVNMWGNGFWNLLGFGMQMALIVVTGNALATSPQIRKFLSTIASIAKTPAQGVVLVTFMGSIACIINWGFGLVVGAMFAKEVARRIKGSDYALLIACAYIAFMTWGGGFSGSMPLLAATPGNPVAHLMVSESNPQGIIPAVSTLFSGYNIFITLSLVICLPFITYMMMPKNGEAKSIDPKLIAPDPTFDKKLDKDATLAEKMEESRFLAYTIGALGYSYLGMYFYKNGFNLTINNVNLIFLITGIVLHGSPMAYMRAIINATRSTAGILVQFPFYAGVQLMMEHSGLGGLITEFLYQCC

SEQ ID NO: 20947 - DNA, 1431 bp, Ralstonia eutropha JMP134
  CDS (1)..(1431)
atggcattcccggatgccgggaagctgcaacaaggcggactggaacgccttgcgatacgggtgactgactggtccgagcggtggttcccggactcgtatatttttgcggccatcgccgtggtcgtggtggcgttgggcgcaatgttggtgggcgcgccagcgcaggccgtggcgaaggcctttggcgacggcttctggagcctgatccctttcaccatgcagatggcagtggtcgcgattgccggctacgtggtggcggtgtcgccgccggcagccatgctgatcaaccgtctggcagccttgccgcggacagcgcgcggtgccgtggctttcgtcgcgctcgtgagcctgtcgacgtcgctgctcaactgggcaatcagtttgatcttcagtggcttgctggtacgcgcaattgccaggcggcgcggcttccgtgtcgactacagggcagccagcgcggcagcctaccttggcatgggggcaacctgggcactgggactcagctcctccgccgcgcagctacaggcaaatgccgccagcctgcccaaatctctgctggatatcaccggggtcatcccgttctccgatacgatctttctttggcaatccatggcgatgaccgccgtattgatcgtcgtgtccctggcggtggcgtacttctcggcccctaccgaggcgcgtgctcgcacggcggccgatatgggggttgacctgaacgatgccgatgaagcggtcgcgcggccatctcggccaggtgaatggctggaatacagtccgatcctgacgttggttctggtcgccatgggcgcgagctggctctatcaggagttttcgaccaagaatccgattctcgccatctccaacctgaatacctacaacttcctgttcctgctgctcggcatgctgctgaactggcgtccgaagcgctttctgcgcgccgtcgcgaagtccgtgccgtccacggccggcgtcctgatccagtttccgctgtatggcggcattgcctttatcctgaccaaggcgaccggcggcaacggcgccccgctgtcgcaccatctggcgtcagcctttgtctccatggcgaccacggagtcgttctccgcggtcatgggagtgtattccgccgtgctcggcttcttcgtaccgtccggcggcggcaaatggatcatcgaagctccttacgtgatgcaggccgccaacgaactaaaggtacaccttggctgggcagtacaggtctacaacgccgctgaagcgctgccgaatttgatcaatcctttttggatgctgccgttgctcggtgtgctcggcatccgggccaaggacgtggtcggcttcaccttcacccagttgctggtgcatacgccgttagttctgctcatgttatgggctttcgccgcgacgctttcctaccatcctccggtgatgccctga

SEQ ID NO: 20948 - protein, 476 aa, Ralstonia eutropha JMP134
MAFPDAGKLQQGGLERLAIRVTDWSERWFPDSYIFAAIAVVVVALGAMLVGAPAQAVAKAFGDGFWSLIPFTMQMAVVAIAGYVVAVSPPAAMLINRLAALPRTARGAVAFVALVSLSTSLLNWAISLIFSGLLVRAIARRRGFRVDYRAASAAAYLGMGATWALGLSSSAAQLQANAASLPKSLLDITGVIPFSDTIFLWQSMAMTAVLIVVSLAVAYFSAPTEARARTAADMGVDLNDADEAVARPSRPGEWLEYSPILTLVLVAMGASWLYQEFSTKNPILAISNLNTYNFLFLLLGMLLNWRPKRFLRAVAKSVPSTAGVLIQFPLYGGIAFILTKATGGNGAPLSHHLASAFVSMATTESFSAVMGVYSAVLGFFVPSGGGKWIIEAPYVMQAANELKVHLGWAVQVYNAAEALPNLINPFWMLPLLGVLGIRAKDVVGFTFTQLLVHTPLVLLMLWAFAATLSYHPPVMP

SEQ ID NO: 20949 - DNA, 1380 bp, Brevibacterium linens BL2
  CDS (1)..(1380)
atgtcggcaccgaagccgtcgacccaggtcaacgccgcggcctcaaaagggttcatgcgtccgatcaaccgtttcctcgaacagtggattccgtcagcactgacgttcgccatcgttctcactctcatcgtcgccgtcctggcgttcatccttaccggggccagtcccgtcgacgttgtcaccggctggggtgagggactggccgggctcctcgagttcatgacccagatggccctcattctgttgctcggtcacatcctcgcgaacaccggacccgtgcagaagctgctgacatggctagcccgagttcccggcaacccggccttcgcctatgtcttcgtcttcgtcatcgccgcagtggcctgtctcatcacctggggcctcggcctcgtcgtcggcgctctgctgtctcgcgagatcgctgttcaggcccgcgagcgcgggtacaaggtccacttccctctcctcgtggccgccggctattcggggatggtcgtctggcacatggggtattcgggttcgggccccctgaccgcggcgacccctgattccttcctcgccgagtccttgggcggtgaggtcattcctgtcagcgagaccatcttctcgacctggaatctcctcgccatccttgccgtcatcgtcgtctgtgcgctcctgttcttcttcgttgcgccgaagaaggacgcgcccgtctacgaattgtccgactcggtcaattccgaatcgcgggcagccttcgacgaagatgtcgtcacgcccgccgaccgcatcgatgcttcgcgggtcctcacgctcatcatcggtctggcgctcgtgatctacctgatcatccacttcgcccagggtggtggactgacgctggacatcgtcaattggtcattcctcgcactcatcttcctgctcgtgaagaaccccttcgaactcatccacctgacgaaggaagccgcctcgaacgtcggcgagatcctgctgcagttccccctctacgcaggaattctgggcatcatgtccggcaccggcctcatcgcagtcttctccgacgctctcgtctcgatcgcgaacccgacgaccttcggcgtcctcgcgctgctctcggcaggactggtcaacttcttcgtcccttcaggcggcggccagttcgccgtccaggggccgatcatgctcgatgccgccaaccagctgggagtcgatccgtcgatcgcgatcatggcggtctcctacggtgaccagtggacgaacatgctccagcccttctgggctctgccggtgctggccatcgcgggactgaagatgcgtgacattctcggctacacctcggtgaccttcctcggatccggtgtcgtcatggctctggctctgttactcgtctcactgtga

SEQ ID NO: 20950 - protein, 459 aa, Brevibacterium linens BL2
MSAPKPSTQVNAAASKGFMRPINRFLEQWIPSALTFAIVLTLIVAVLAFILTGASPVDVVTGWGEGLAGLLEFMTQMALILLLGHILANTGPVQKLLTWLARVPGNPAFAYVFVFVIAAVACLITWGLGLVVGALLSREIAVQARERGYKVHFPLLVAAGYSGMVVWHMGYSGSGPLTAATPDSFLAESLGGEVIPVSETIFSTWNLLAILAVIVVCALLFFFVAPKKDAPVYELSDSVNSESRAAFDEDVVTPADRIDASRVLTLIIGLALVIYLIIHFAQGGGLTLDIVNWSFLALIFLLVKNPFELIHLTKEAASNVGEILLQFPLYAGILGIMSGTGLIAVFSDALVSIANPTTFGVLALLSAGLVNFFVPSGGGQFAVQGPIMLDAANQLGVDPSIAIMAVSYGDQWTNMLQPFWALPVLAIAGLKMRDILGYTSVTFLGSGVVMALALLLVSL

SEQ ID NO: 20951 - DNA, 1242 bp, Bacillus anthracis str. A2012
  CDS (1)..(1242): Xaa of translated CDS can stand for any naturally occuring amino acid which can be translated from respective CDS-codon
atgtttgcaacgcatcaaacacctgtggaaatgattaatcactggggtaatggcatttggggacttctcgccttttctatgcaaatggcacttgtactcgtgacaggatctgctttagcaaacgctcytcttattaaaaaaggattaatgaaagcggcaagactaccaaaaacaaatggacaaggtattattgccatttcaatcgtaagtttactaggggcatacataaactggggatttggtatwgttgtatctgttttatacgcaaaagaagtggcaagacaattagaaggattggattatagactagcaatcgcttcttcttactctggatttctcatttggcatgcggggctttctgcttctatccctcttacgttagcamcaggcggagaaacgttaatgaaaacgacagctggaagtattaaagaagcgattccaatcactgaaacgttattctcaccatatgctctcgttccagttattatctttttagttacgatgcctctcattaataaggcgatgcatccagatgcaaaacatacaataacagtagatcctagcgtattccatgaagaagctgccgctcaagaggcaggaaaaaatacgttcgcggaaaaaatggaaaatagcattattattacactttgcgttggattgttaggtctcatttatattttcaactacttttatacgaaaggctttaaccttacactcgatatcgttatttttatgttattaattgctggactcattttccaccgtactccaattcaatatattcgcgctttttcagattccacgaaaagtgcttctggtattttacttcaatttccgttttacgcaggaattatggggatgatgatcggagcaaatagtgaaggcctttcacttggaggagctatttcgaatttctttattagcatttcaaacgaaacaactttcccgctctttacttttttaagtgcgggcatcgttaatattttcgttccatctggtggcggtcaatgggctgtgcaagcacccattatgattccagctggcgctgaacttggtgtacctgctgcaaaaacagcaatggccattgcgtggggcgatgcttggacaaatttaattcaacctttctgggcattaccagcattagcgatagctggtttaggtgctcgtgatattatgggattttgcgttgtgaacttactatatgcaggatttatcataagtctatgtttcttatttatttaa

SEQ ID NO: 20952 - protein, 413 aa, Bacillus anthracis str. A2012
  misc_feature (43)..(43): Xaa can be any naturally occuring amino acid
  misc_feature (129)..(129): Xaa can be any naturally occuring amino acid
MFATHQTPVEMINHWGNGIWGLLAFSMQMALVLVTGSALANAXLIKKGLMKAARLPKTNGQGIIAISIVSLLGAYINWGFGIVVSVLYAKEVARQLEGLDYRLAIASSYSGFLIWHAGLSASIPLTLAXGGETLMKTTAGSIKEAIPITETLFSPYALVPVIIFLVTMPLINKAMHPDAKHTITVDPSVFHEEAAAQEAGKNTFAEKMENSIIITLCVGLLGLIYIFNYFYTKGFNLTLDIVIFMLLIAGLIFHRTPIQYIRAFSDSTKSASGILLQFPFYAGIMGMMIGANSEGLSLGGAISNFFISISNETTFPLFTFLSAGIVNIFVPSGGGQWAVQAPIMIPAGAELGVPAAKTAMAIAWGDAWTNLIQPFWALPALAIAGLGARDIMGFCVVNLLYAGFIISLCFLFI

SEQ ID NO: 20953 - DNA, 1440 bp, Azotobacter vinelandii AvOP
  CDS (1)..(1440): transl_table=11
atggcaacctgtgccgaagaccgtcgctacatcgaagaagacagtcgctatgcccgtttcgcaatcaattgttcgaactgggccgagcgctggtttcccgattcctgggtattcgccgtgctggcggtggtcgtcgtcgcgctggcggcgctggccatgggcgcgcgcccggccgagaccgccaaggccttcggcgacggtttctggagcctgatcccgttcaccatgcagatggccttcgtggtcatcggcggctacgtggtcgccagctcgccgccggcctcccggctgatcggcctgctcgcggccgtgccgaacaacggtcgctcggcggtctgctgggtggccctgatctcgatgctcgcctcgctgctgaactggggcctgagcctggtgttcggcggcttgctggtgcgcgcgctggcgcgccgcgaggagttgcgcatggactaccgggcggccggcgccgccgcctacctgggcctgggcgcggtgtgggcgctcggcctgtcgtcctcggcggcgcagttgcaggcgaatccgggcagcctgccgccttcgatcctgtcgatcaccggcgtcattcccttcaccgagaccatcttcctctggcagtccggcgtactgctggtggcgctcgtgctggtgtcgctgctggtcgcctatgtcaccgcgccgggcgccgccagcgcgcgcaccgcgcaggcctgcggggtcgacccgggcttcgcgccgccgccaccggcgcagcgcacgcgccccggcgagtggctggaatacagcccgctgctgatcatcctgctggttctgctcgccgccggctggctggcccaggagttcgccagcaagccggccatcgaggcgatttccgggctcaacacctacaacctgctgttcctgatgctcggcgcgctgcttcactggcggccgcgcagcttcctcgatgccgtggcgcgcgcggtgccggccaccgccggggtgctgatccagtttccgctgtacggttccatcgccgcgatcatgaccaaggtcgccggtggcgacggccagacccttacccatcacatttccacgctcttcgtgcaggtcgcctcgcacgacacctacgctctgctgatgggggtgtattcggccgtgctcgggttcttcattccgtcggggggcggcaagtggatcatcgaggcgccctacgtgatgcaggtcgccaacgaactgcgctaccacctgggctgggcggtgcagatctacaatgccgccgaggcgctgcccaacctgatcaacccgttctacatgctgcctctgctgggtgtgctgggactgaaggcgcgcgacgtgatcggcttttccttcgtccaactggtggtgcatgcgccgttggtgctggtacttctctgggcgttgggaacgacattggaataccgaccgccgcttgtgccctga

SEQ ID NO: 20954 - protein, 479 aa, Azotobacter vinelandii AvOP
MATCAEDRRYIEEDSRYARFAINCSNWAERWFPDSWVFAVLAVVVVALAALAMGARPAETAKAFGDGFWSLIPFTMQMAFVVIGGYVVASSPPASRLIGLLAAVPNNGRSAVCWVALISMLASLLNWGLSLVFGGLLVRALARREELRMDYRAAGAAAYLGLGAVWALGLSSSAAQLQANPGSLPPSILSITGVIPFTETIFLWQSGVLLVALVLVSLLVAYVTAPGAASARTAQACGVDPGFAPPPPAQRTRPGEWLEYSPLLIILLVLLAAGWLAQEFASKPAIEAISGLNTYNLLFLMLGALLHWRPRSFLDAVARAVPATAGVLIQFPLYGSIAAIMTKVAGGDGQTLTHHISTLFVQVASHDTYALLMGVYSAVLGFFIPSGGGKWIIEAPYVMQVANELRYHLGWAVQIYNAAEALPNLINPFYMLPLLGVLGLKARDVIGFSFVQLVVHAPLVLVLLWALGTTLEYRPPLVP

SEQ ID NO: 20955 - DNA, 1311 bp, Chromohalobacter salexigens DSM 3043
  CDS (1)..(1311): transl_table=11
atgctgaagctgctgtctcgccccgcggtacgcctggtcgaacgctacctgcccgatccttacatcttcgtgctgatcctgaccctggtggcggccatcgcggccatgctggtcgagcggcagtcgccactggcgatcatgcgctactggggagatggcttctggggactgctgtccttctcgatgcagatgctgctggtgctggtcactggcttcatgctggccagcagcccacccgtcaagcgcctgctcgacaggatcgcccggctcgccaagagcccggccggcgccatcgtgctggtgtcgctggtctcgctggccgccagctggatcaactggggcttcggcctggtcatcggcgccctgttcgccaaggccctcgcacgacaggtgcgtgtcgactaccgcctgttgatcgccagcgcctattcgggcttcgtggtatggcacggcggcctggccggctcgattcccttgaccatcgccaccgaagggcatttcacggcggaccagatcggtgtcattcccacctccgagaccatcttcgcgttcttcaacctggccatcgtgctggcgatgttcgtggccgtgccgctggtcaaccggttcatgcttcccgacgagcgtgacagcgtctacatcgaccccgcacaactcgacgacgccccgcgcgacctcggtcccgccacgcgtccggcggaacgcctggaaaagagctcctggctgtcatggctggtcggcattcccggcttgctgttcctgctcgaccatttcgtgttccgtgacggcggcctgaacctcaacgtggtcaatttcctgttcctgtccctggccatcgtgctgcatcgcacgccccgcagcctgctggacagcctccacgaggccatcaagggtggtaccggtatcgtcatccagtttcccttctacgccggcatcatggcgatcatcatgcagtccgggctggcacagacgctttccgaggggttcgtggcgatctccaccgcccagacgctgcctttctggtcattcatcagtgccggcatcgtcaacctgttcgtgccttcgggcggcgggcaatgggccgtccaggccccggtcatgctgcccgccgccgcctccctgggcgcggatatcccccgcgtcgccatggcggtcgcctggggcgatgcctggaccaacctgctgcagccgttctgggcgcttcccatgctcgccatcgcggggctcaaggccaaggacatcatgggcttctgcctgatccagctggtggtgacgggcgtcatcatcgcgctcgggctgacctttctgtga

SEQ ID NO: 20956 - protein, 436 aa, Chromohalobacter salexigens DSM 3043
MLKLLSRPAVRLVERYLPDPYIFVLILTLVAAIAAMLVERQSPLAIMRYWGDGFWGLLSFSMQMLLVLVTGFMLASSPPVKRLLDRIARLAKSPAGAIVLVSLVSLAASWINWGFGLVIGALFAKALARQVRVDYRLLIASAYSGFVVWHGGLAGSIPLTIATEGHFTADQIGVIPTSETIFAFFNLAIVLAMFVAVPLVNRFMLPDERDSVYIDPAQLDDAPRDLGPATRPAERLEKSSWLSWLVGIPGLLFLLDHFVFRDGGLNLNVVNFLFLSLAIVLHRTPRSLLDSLHEAIKGGTGIVIQFPFYAGIMAIIMQSGLAQTLSEGFVAISTAQTLPFWSFISAGIVNLFVPSGGGQWAVQAPVMLPAAASLGADIPRVAMAVAWGDAWTNLLQPFWALPMLAIAGLKAKDIMGFCLIQLVVTGVIIALGLTFL

SEQ ID NO: 20957 - DNA, 1356 bp, Shewanella baltica OS155
  CDS (1)..(1356): transl_table=11
atgttaaacaaagcggcaaaacctttggtcaaactcgtcgaccgatatctacccgatccctatattttcgtccttttactcaccttagtggtgttaattgcagctgtggtcgcagaacacaaaactccgctggaagtcatcaactattggggcgatggcttttggaccttgctgagtttttcgatgcagatgctgttagtgctggtggcgggattcatgctggcaagctcgccgccgattaaaaagctgctcgatgcgattgcaggatgcgctaaatcggcaccgcaagccattattttagtaaccttggtctcactggccgccagttgggttaactggggattcgggctagtggtgggcgcgttatttgccaaagccttagcgcgtaaagtgaaagtggattatcggctgctggtcgccagcgcctattctggctttgtggtttggcatggtgggcttgcgggttctatcccattaaccatagcaacggcggggcatttctccgaagcacaaattggcattatccccaccagtgaaaccattttcgcgagctttaacttattgttagtggcgattctgtttgtggtcatgcccttagtgaatcgctttatgttgcctgaagacaaggactgcatttatgtcgacccaagtgcccttgacgacaaaggcagcgaacccgcagcttcggcgctggagtttacccctgccaatgtgagtgagcgtcagcttgaaaaccgtcctgcggataagttagaaaatagccgcttactcggctggagcgtgggtggcgcagggcttgtgtacttaggctattacttttgggtacagggcggcagcttaaaccttaacttagtgaacttcttattcttgttcctcgccatcctcttacaccaaacgccacgcagtttattaaccagcttgaatgaggccattaagggcggcgcagggattgtgatccaattccctttctatgcgggcattatggcggtgatggtgcagtcgggtttagcccaaagtatttcggaaggttttgtggccatagccagtgccgagagcctgccattttggagctttattagcgcgggaattgtaaatatttttgtgccatcgggaggcggtcaatgggccgtgcaggcgccgattatgttacccgctgccgaagccttgggtgccgatgttgctcgggtggctatggccgtagcttggggtgatgcctggactaacctaattcaacctttctgggcactgcccgtgctggcaattgcgggcttaaaagcacgggatattatgggtttttgtttaatgcagctgatgatcacaggcgtgattatcagtatcgcgttgagctggttttaa

SEQ ID NO: 20958 - protein, 451 aa, Shewanella baltica OS155
MLNKAAKPLVKLVDRYLPDPYIFVLLLTLVVLIAAVVAEHKTPLEVINYWGDGFWTLLSFSMQMLLVLVAGFMLASSPPIKKLLDAIAGCAKSAPQAIILVTLVSLAASWVNWGFGLVVGALFAKALARKVKVDYRLLVASAYSGFVVWHGGLAGSIPLTIATAGHFSEAQIGIIPTSETIFASFNLLLVAILFVVMPLVNRFMLPEDKDCIYVDPSALDDKGSEPAASALEFTPANVSERQLENRPADKLENSRLLGWSVGGAGLVYLGYYFWVQGGSLNLNLVNFLFLFLAILLHQTPRSLLTSLNEAIKGGAGIVIQFPFYAGIMAVMVQSGLAQSISEGFVAIASAESLPFWSFISAGIVNIFVPSGGGQWAVQAPIMLPAAEALGADVARVAMAVAWGDAWTNLIQPFWALPVLAIAGLKARDIMGFCLMQLMITGVIISIALSWF

SEQ ID NO: 20959 - DNA, 1338 bp, Ralstonia metallidurans CH34
  CDS (1)..(1338): transl_table=11
ttgagtaaggtcgccgggttctttactgaactgatgcgccggtatttgccggacccctttgtattcgccatcggcctgacgttgctgacgatggtcatggcaatgctggtagaaggacaggccgcccaggcggtcatcacgaactggggcaaggggttctggaacctgctctcgttcaccacccagatggcggtgattctggcgatgggctacgtgctggccaccgcgccgctggtcgaccgcttcctcaatgccatcgtcgcccgcgtgcagacgccgcgcggcgccatcatcgtggccacactggtcggcggtatcggcagctacctgaactggggcttcggcctggtgatcggcggcatcatcgcccgcaagctggcgctgaaggtcaagggcgtgcattaccccctgatcatcgcctcggcctacagcggcttcacgatgtatggcctgggcctgtctgccagcatcccggtactgatctccaccccgggccacccgatggaaaagctgatgggcgtgatcggtctcaaggagacgatcttctccacaccgatgctgctgacgagccttgccgtcatcgtcacgctgccgctgctcaacgcgatgctgcacccgcgtgacgccaaggaagtggtggaaatccgcgaggagaacagctccgaggaccgcgccgccgggcacggccacagcatgggcatcgagaacacgcttgccacgcgcatgaacaacagccgcctgctgagcctgatcatcggcctgtgcgggctggcctacgcgggtctgcatttctcgcagggtggttcgctggacctgaacctgatcaacttcctgatcctgtttatcggcgtgctgttgctgggcaccccggccaactacgtggccaagctgaacgaaggcatcaagacgatctccggcatcatcctgcagtatccgttctacgcaggcatcatggcggtcatggccggctccgggctggtggacagcatctcgcgcgtgttcgtcgatatcgccacgccgcagacgctgccgttctggggtctggtcagctcgttcgtgatcaacttcttcgcgccgtccggcggtggccactgggtgatccagggtccgttcatgatcgacgcggccaaggccatcaacagctcggtggcgcagacgtcgatgtcggtcatgctcggcaacgcctggaatgacctggtgcagccgttctggattctgccggcgctggcgctgtcgaagctgaagctcaaggacgtgatgggctacaccgtgatcatgatgttctgggtcggcgcgatctatatcgtcgccatgctggcctggggcgcgcagatctga

SEQ ID NO: 20960 - protein, 445 aa, Ralstonia metallidurans CH34
MSKVAGFFTELMRRYLPDPFVFAIGLTLLTMVMAMLVEGQAAQAVITNWGKGFWNLLSFTTQMAVILAMGYVLATAPLVDRFLNAIVARVQTPRGAIIVATLVGGIGSYLNWGFGLVIGGIIARKLALKVKGVHYPLIIASAYSGFTMYGLGLSASIPVLISTPGHPMEKLMGVIGLKETIFSTPMLLTSLAVIVTLPLLNAMLHPRDAKEVVEIREENSSEDRAAGHGHSMGIENTLATRMNNSRLLSLIIGLCGLAYAGLHFSQGGSLDLNLINFLILFIGVLLLGTPANYVAKLNEGIKTISGIILQYPFYAGIMAVMAGSGLVDSISRVFVDIATPQTLPFWGLVSSFVINFFAPSGGGHWVIQGPFMIDAAKAINSSVAQTSMSVMLGNAWNDLVQPFWILPALALSKLKLKDVMGYTVIMMFWVGAIYIVAMLAWGAQI

SEQ ID NO: 20961 - DNA, 1395 bp, Rubrobacter xylanophilus DSM 9941
  CDS (1)..(1395): transl_table=11
atgcaggagcggctcagcgccccgcgcagcttcgggggaaacagggtgaccggcttcttcgtcgggctcgccgagaggtacctgccggacgcctacctcttcgcggtcgtgctcaccctcatagccggcctgctcacggccatcttcgtcacggcggacatcttcgtgttggtggacgcctggtacaacgggatgtggaacatcctcaccttcgccctgcagatggcgctcatcctgctcaccggctacaccgtggcccgctcgcggcccgtctcgcggctgctcgactggatagcctccaagcccaagaaccaggggcaggcgctcgccttcatcatcgtcgtctcctccgtcgccagcctcatcaactggggcttcgggctggtcgtcgccgcgatcatggcccgctacatcggcaagcggctggagaacgtggactacgccatcctggtctccgccgggtacgccgggttcatcgtgtgggccagcggcctctcctcctccatagccctcgccgtctccacccccggcagcgaggccaacataacccagcaggtcaccgggcaggtgctggacttcggccggaccatcctcacctggtggaacatcgtccccgtggtgctcatcgtcgtgctgctcgtccccctgtactggtggatgatgcccaagcggcccgagcacatgcgcaaggtcgaccgcgccctgctcgcccgcgaggacgaggaggccgggcgggcggagaccccggacaccccggccggcaggctggagcgcttctggcccctcaacctcgcgatagccggcgccatcttcctctacttcgggcatcagctcgccgccggcgagttcgtcttcgacttcaacgccgtcatcgcgctgtttctggctgtcggcctgatcctccactggacccccatctcctacgtccggtccttcaccggcagcgcgggggccatgggccccatagccctccagtacccgctctacggcggcatccaggggctcatggtgctcaccgtgggcgggatcagcctcgccgggaccatcgccgactggttcctggccttctccaacgagtacaccttcgccttctggaccttcgtctcctccaacgtcatcagcctcttcatcccctccggcggcgggcactgggtggtgcaggggccggtgatggtcccggcggccgagaggctcggcgtggaccaggggctgaccgcgatggcggtggcctggggggaggggacggcgaacatggtgcagcccttctgggcgctccccattctgggcatcgtgggcctcgggatccgggacatcatgggctacggggtcttcaccctcgggctgagcttcgcgatctacggggccttcaccctcatagcccccttcttcctgtag

SEQ ID NO: 20962 - protein, 464 aa, Rubrobacter xylanophilus DSM 9941
MQERLSAPRSFGGNRVTGFFVGLAERYLPDAYLFAVVLTLIAGLLTAIFVTADIFVLVDAWYNGMWNILTFALQMALILLTGYTVARSRPVSRLLDWIASKPKNQGQALAFIIVVSSVASLINWGFGLVVAAIMARYIGKRLENVDYAILVSAGYAGFIVWASGLSSSIALAVSTPGSEANITQQVTGQVLDFGRTILTWWNIVPVVLIVVLLVPLYWWMMPKRPEHMRKVDRALLAREDEEAGRAETPDTPAGRLERFWPLNLAIAGAIFLYFGHQLAAGEFVFDFNAVIALFLAVGLILHWTPISYVRSFTGSAGAMGPIALQYPLYGGIQGLMVLTVGGISLAGTIADWFLAFSNEYTFAFWTFVSSNVISLFIPSGGGHWVVQGPVMVPAAERLGVDQGLTAMAVAWGEGTANMVQPFWALPILGIVGLGIRDIMGYGVFTLGLSFAIYGAFTLIAPFFL

SEQ ID NO: 20963 - DNA, 1320 bp, Psychrobacter cryohalolentis K5
  CDS (1)..(1320): transl_table=11
atgaaagggattacccgtttttcgaatagcttaatggagaagtatttaccggatccatttttgttcgttattatcttaacagtggttatttttgtactgggtttaggattaactgattcttcaccggtacaaatggtggcgttttggggtgaaggtttttgggcattactcgcattctcaatgcagatggtgttggtattagtcacaggttttgtattggcaagcagtccgatatttaaaaaaggtttaggaaggctggcaagtttagcaaaatcgccgggcagtgccattatcttggtaactttagtatcccttgcagcaagctggatcaactggggatttgggttggtgattggagcattattcgccaaagaattggcaaagcgtgtagagaatgtcgattaccgtttattgattgccagtgcttattctggttttattatttggcatgctgggttttcgggttccattccgttatccattgcgacagcaggtcatccgttcgctgataagattggtgttattccaaccagtgaaacgatttttgccagctataacttaattattgtggctgcattgattgtcatcgttcctttactcaaccgtttgatgatgccaaaaacagaagatacggtgacggtagatccgagacttctggttgaaccaattgatgaagtgctgccagcaaaatcggatatgacaccagcagagcgtttagaaaacagctggattttgtcaatggttatcggtatgttgggcattgcttttatcgtctattattttgtgcaaaatggctttgccttgacactagatttggtcaactttatgtttttgttcctcggaattatctttcacggaacgcctcgtaagtatttgattgccgttcaagaagcggtcaaaggcgccggtgctattattgtccagtttccgttttatgcaggaatcatgggtatgatgacagcgtcaggcttggcaggcgtgatgtcagaagcattcgtcaatatttcgtcagctgagacattaccacttttcgccttcttaagcgcaggactggttaacttctttgttccttcaggtggcggacagtgggcagtgcaagcacccattatgttagaggcggcagagatgctgggcagcgatcctgcaaaggttgctatggcagttgcatggggtgatgcatggacaaatatgattcagccattttgggcattgccagccttggcaattgcgggactcaaagccaaagatatcatgggtttttgtgtcattgtcctgattgttagtggtgttgtgattggtttagggctattgtttttataa

SEQ ID NO: 20964 - protein, 439 aa, Psychrobacter cryohalolentis K5
MKGITRFSNSLMEKYLPDPFLFVIILTVVIFVLGLGLTDSSPVQMVAFWGEGFWALLAFSMQMVLVLVTGFVLASSPIFKKGLGRLASLAKSPGSAIILVTLVSLAASWINWGFGLVIGALFAKELAKRVENVDYRLLIASAYSGFIIWHAGFSGSIPLSIATAGHPFADKIGVIPTSETIFASYNLIIVAALIVIVPLLNRLMMPKTEDTVTVDPRLLVEPIDEVLPAKSDMTPAERLENSWILSMVIGMLGIAFIVYYFVQNGFALTLDLVNFMFLFLGIIFHGTPRKYLIAVQEAVKGAGAIIVQFPFYAGIMGMMTASGLAGVMSEAFVNISSAETLPLFAFLSAGLVNFFVPSGGGQWAVQAPIMLEAAEMLGSDPAKVAMAVAWGDAWTNMIQPFWALPALAIAGLKAKDIMGFCVIVLIVSGVVIGLGLLFL

SEQ ID NO: 20965 - DNA, 1353 bp, Burkholderia ambifaria AMMD
  CDS (1)..(1353): transl_table=11
atgtccgtatcaggaaacgaggagctcaagttggtccaacgcatttcccgctttttcacgcaggtggtccaccgcgtgctgcccgacccgttgattttcgcgatcctgctgacgatcgtcacgttcgcgctcgccttcggtctcacgccgaccacgccggtgcaactcacgacgatgtggggttcaggcttctggaacctgctcgcgttttcgatgcagatggtgatgatcctcgtcaccggccacgcgctcgcgagttcgccgccggtgcgccgcctgctcgttgcgctcgcaagcaccgcgcgcacgccggggcagggcgtgatgctcgtcgcgttcgtcggcgcgctcgcctgcgcgatcaactggggcttcggcctcgtgctcggcgcgatgcttgcgcgcgaagtcgcgcgccgcgtcgccggcagcgactaccggctgctcgtcgcatccgcgtacatgggtttcctgagctggcacggtgggctgtcgggttcggtcccgctcgtcgccgcgacgaagggcaatccgatggaaaagaccatcgggctgattcccgtgtcggacacgatcttcaccggctacaacgcgttcatcacgatcgggctgatcgtgatgctgccgtttctcgcgcggatgatgatgccgaagccgggcgacgtcgtcagcgtcgatccggcgctgctcgcggaaccgccgagcgtcgagcgccagctcgggcccgacgcgacgttcgcggaacggatggaagagagccgcgcgctgtcggtcgtcgttgcggcgctgtgcgcggcgttcctcgtgctgcgtttcatgcagaagggcttcgcgctcgacatcgacaccgtgaacctcgcgttcctcgcggccggcatcctgctgcaccgtacgccgatggcctatgcgcgcgcggtggccggcgcggcgcgcggcgcatcggggatcatgatccagtttcccttttacgcgggcatccaggcgctgatggatcactcggggctcgcgggcgtgatcacgaagtggttcgtcgatatcgcgaacgtgcacacgttcccgctgctcgcgttcctcagttcggccgtgatcaatttcgcggtgccgtcgggcggcggccactgggtcgtgcagggcccgtttgtgatgccggccgcgcaggcgctcggtgccgatctcggcaaggccgcgatggcgatcgcctacggcgaggcgtggaccaacatggcgcagccgttctgggcgctgcccgccctcgcgatcgccgggctcggcgtgcgcgacatcatggggtactgcgtgacgacgctgttgttctcgggcgtggtgttcgtcgcagggatgtatctgttctga

SEQ ID NO: 20966 - protein, 450 aa, Burkholderia ambifaria AMMD
MSVSGNEELKLVQRISRFFTQVVHRVLPDPLIFAILLTIVTFALAFGLTPTTPVQLTTMWGSGFWNLLAFSMQMVMILVTGHALASSPPVRRLLVALASTARTPGQGVMLVAFVGALACAINWGFGLVLGAMLAREVARRVAGSDYRLLVASAYMGFLSWHGGLSGSVPLVAATKGNPMEKTIGLIPVSDTIFTGYNAFITIGLIVMLPFLARMMMPKPGDVVSVDPALLAEPPSVERQLGPDATFAERMEESRALSVVVAALCAAFLVLRFMQKGFALDIDTVNLAFLAAGILLHRTPMAYARAVAGAARGASGIMIQFPFYAGIQALMDHSGLAGVITKWFVDIANVHTFPLLAFLSSAVINFAVPSGGGHWVVQGPFVMPAAQALGADLGKAAMAIAYGEAWTNMAQPFWALPALAIAGLGVRDIMGYCVTTLLFSGVVFVAGMYLF

SEQ ID NO: 20967 - DNA, 1344 bp, Bacillus cereus
  CDS (1)..(1344): transl_table=11
ttgtttcgttcttttacaaatggttgcgtcaccttagtgcaacgtttcttgccagaaccgtttattttatcatgtttattaactgtttttgttatcttcttcggcatgtttgcaactcaccaaacaccggtcgaaatgattaatcattggggtaatggcatttggggacttctcgccttttctatgcaaatggcactagtacttgtcactggatctgctttagcgaacgctcctcttattaaaaaggggttaacgaaagctgccaggctaccgaaaacgaatggccaaggtattattgccatttcaattgtaagtttacttggtgcatacataaactggggatttggtattgttgtatctgttttatatgcaaaagaagttgcaagacaacttgaaggattagattacagattagcaattgcttcttcttactctggacttctcatttggcatgcgggtctttctgcttctatccctcttacgttagctactggcggtgaaacgttaattaaaacgacagctggaagtattaaagaagtgattccaataacagaaacgttattctcaccatacgctctcgttccagttattatctttctcattacgatgccactcattaaccgggcaatgcatcccgatgaaaaacatacggtaacagtagatcctagcgtatttcatgaagaagctgctgctatagaagtagagccaaaaacagtcgctgaaaaaatggaaaatagcatcattattacactttgcgttgggttattaggtctcatttatattttcaattacttttatacgaaaggttttaaccttacactcgatatcgttatttttatgttattaattgctggtcttatttttcaccggactccgattcaatatattcgtgcattttcagactctacaaaaagtgcttctggcattctacttcagtttccgttttacgcaggaattatgggtatgatgattggagtaaatagtgaaggtctttctcttggaggagctatttctaatttctttattagtatttcaaacgaaacgactttcccgctctttacttttttaagtgctggcatcgttaatatttttgttccatctggtggcggtcaatgggctgtacaggcacccattatgattccagctggtgctgaacttggtgtacctgctgcaaaaacagcaatggcaattgcgtggggcgatgcttggacgaatttaattcaacctttctgggcattaccagcgttagcgatagctggtttaggtgctcgtgatattatgggattttgcgttgtgaacttactatatgcaggatttatcattagtttatgcttcttattttag

SEQ ID NO: 20968 - protein, 447 aa, Bacillus cereus
MFRSFTNGCVTLVQRFLPEPFILSCLLTVFVIFFGMFATHQTPVEMINHWGNGIWGLLAFSMQMALVLVTGSALANAPLIKKGLTKAARLPKTNGQGIIAISIVSLLGAYINWGFGIVVSVLYAKEVARQLEGLDYRLAIASSYSGLLIWHAGLSASIPLTLATGGETLIKTTAGSIKEVIPITETLFSPYALVPVIIFLITMPLINRAMHPDEKHTVTVDPSVFHEEAAAIEVEPKTVAEKMENSIIITLCVGLLGLIYIFNYFYTKGFNLTLDIVIFMLLIAGLIFHRTPIQYIRAFSDSTKSASGILLQFPFYAGIMGMMIGVNSEGLSLGGAISNFFISISNETTFPLFTFLSAGIVNIFVPSGGGQWAVQAPIMIPAGAELGVPAAKTAMAIAWGDAWTNLIQPFWALPALAIAGLGARDIMGFCVVNLLYAGFIISLCFLF

SEQ ID NO: 20969 - DNA, 1341 bp, Alcaligenes eutrophus
  CDS (1)..(1341): transl_table=11
atgagcaagattgccgggttcttcaccgaactcatgcgccggtacctgccggatccctttgtatttgccatcggcctgaccttgctgacgatggcgctggcggtgacggtgcaagggcaggcagcgccggccgtgatcgccagctggggcaaggggttctggaacctgctggcatttaccacgcagatggcggtgatcctggcgatgggctacgtgctggccaccgcgccgttcactgaccgcatgctcgaccgcatcgtcagtgccgtgcactcgccgcgcaccgcggtgatcgtcgccacgctggtgggcggcatcggcagctacctgaactggggcttcgggctggtgatcggcggcatcatcgccaggaagctggcgctgaaggtccgtggcgtgcattacccgctcatcatcgccgccgcgtacagcggcttcaccctgtacgggctgggcctgtcggccagcatcccggtgctgatctccaccccgggccacccgatggaaaagctgatgggcgtgatcccgctgtctgaaaccatcttctccacgccgatgctgctgaccagcctggcggtgatcgtcacgctgccgctgctcaatgcctggctgcatccgcgcaacccggccgatgtggtggagatccgccgcgaccaggaacccgccaaggccgaggccggctcggcccacagcatgggcggcgagaacaccctggccgcgcgcctgaacaacagccgtatcctgagcctggccatcggcctgtgcggcatggcctacgcggtcatctacttcacgcagggcggctcgctcgacctgaacctgatcaacttcctgatcctgttcgcgggcgtgctgctgctgggcacgccggtcaactacgtggccaagctgaacgaaggcatcaagaccatttccggcatcatcctgcagtatccgttctatgcaggcatcatggcgatcatggccggctcggggctggtggataccatctcgcgtgtgttcgtggagatcgccacgccgcagacgctgccgttctgggggctgctcagttcgttcgtgatcaacttcttcgcaccgtcgggcggtggccactggatgatccagggcccgttcatggtcgatgcggccaaggccatcaacagctcggtcagccagacctcgatgtcggtgatgctcggcaatgcctggaacgacctggtgcagccgttctggatattgccggcgctggcgctgtccaggctgaacctgaaggacgtgatgggctacaccgtgatcatgatgttctgggtgggcctgatctacattgccgcgctgctgctgtggggcgcgcagattgcctga

SEQ ID NO: 20970 - protein, 446 aa, Alcaligenes eutrophus
MSKIAGFFTELMRRYLPDPFVFAIGLTLLTMALAVTVQGQAAPAVIASWGKGFWNLLAFTTQMAVILAMGYVLATAPFTDRMLDRIVSAVHSPRTAVIVATLVGGIGSYLNWGFGLVIGGIIARKLALKVRGVHYPLIIAAAYSGFTLYGLGLSASIPVLISTPGHPMEKLMGVIPLSETIFSTPMLLTSLAVIVTLPLLNAWLHPRNPADVVEIRRDQEPAKAEAGSAHSMGGENTLAARLNNSRILSLAIGLCGMAYAVIYFTQGGSLDLNLINFLILFAGVLLLGTPVNYVAKLNEGIKTISGIILQYPFYAGIMAIMAGSGLVDTISRVFVEIATPQTLPFWGLLSSFVINFFAPSGGGHWMIQGPFMVDAAKAINSSVSQTSMSVMLGNAWNDLVQPFWILPALALSRLNLKDVMGYTVIMMFWVGLIYIAALLLWGAQIA

SEQ ID NO: 20971 - DNA, 1239 bp, Aeropyrum pernix
  CDS (1)..(1239): transl_table=11
gtgggctcattgggggacgagtctaggcgtcccttcctagaggctttcggcgaggcgctggagcgaagggtcaggggcgtcatgccagaccccttcatcttcgccatactccttacattcatagcaatagtgctcgacctcatcctcctgaggcccatacagcatgtggggctggggggtactgtcaagtttctagtctacagtgcatggtacggcggcttctggaagctcctgaccttcagcatgcagatgacccttatactggtgacgggctacgttatagcctaccacccactcgtatacagggttctctccaggatagccggcctacctagggacacgaagcaggcagccgtcctcgccgcagccgtcgccatagcactctcatacctcagctggggcctgagcctgataggcggggccatactggccagggagatagggaggcaggccgccttccgcggaaggaagatccactatccagtagtggtcgtcgctgcatacagcggcctagggctaacatggcactggggtctcacggcaagcgccccgctgctcatgaacactcccggccacttcctggccaacgttgtgaaggagctctacggcgtcgagacaataccgctctcacagacgattttccacccctacactatcataaacttcctgctgataaccctggcagcactggcgatatactggctcataagcccctcccgagggcccgtcagggggatagaggagttcgaccccgacgccctcaaggaagaggctgcgcccgctggtgagaagcccaggatcgagaccctggcggacaggcttgagaactccaggacactggccatactcaccgtcatactgggtttcacggcggttgcaatagagctgtatacacggggcataagcagggcgctcaacctcaacaccatgaacttcatcttcctaatgacaggactcctgctctacgccaaccccatgagctacgcaagggccttctacaggagcgtctcatcggccgcgggcgtcatactacagttccacttctacgccggcatcttcggcctcctaaacacgcccttcgagcctctcggcaagagctcggcccagatcatcgcagaaggcctggccgacgtttcaacacccttcatatggccggtagtggccttcctaaccgcgggcatagtgaacctcttcataccaagcgggggcggcgagtgggctgcgataggagaatactag

SEQ ID NO: 20972 - protein, 412 aa, Aeropyrum pernix
MGSLGDESRRPFLEAFGEALERRVRGVMPDPFIFAILLTFIAIVLDLILLRPIQHVGLGGTVKFLVYSAWYGGFWKLLTFSMQMTLILVTGYVIAYHPLVYRVLSRIAGLPRDTKQAAVLAAAVAIALSYLSWGLSLIGGAILAREIGRQAAFRGRKIHYPVVVVAAYSGLGLTWHWGLTASAPLLMNTPGHFLANVVKELYGVETIPLSQTIFHPYTIINFLLITLAALAIYWLISPSRGPVRGIEEFDPDALKEEAAPAGEKPRIETLADRLENSRTLAILTVILGFTAVAIELYTRGISRALNLNTMNFIFLMTGLLLYANPMSYARAFYRSVSSAAGVILQFHFYAGIFGLLNTPFEPLGKSSAQIIAEGLADVSTPFIWPVVAFLTAGIVNLFIPSGGGEWAAIGEY

SEQ ID NO: 20973 - DNA, 1344 bp, Haemophilus influenzae
  CDS (1)..(1344): transl_table=11
atgattagtcgcgtttctcgttttatgacgacattcgtcagtaaatacctgccagacccacttatttttgccgtgttactcacctttgtcacattcatttgtgcttggggattaaccgatagtacacctgttgatttagttaatatgtggggtaatggcttttggaatttacttggttttggtatgcaaatggcattaattgtcgtaactggtaatgctcttgcaacctcaccacaaattcgtaagtttctttctacaatcgcttcaatcgcaaaaacaccagcacaaggtgttgtcttagttacgtttatgggttcaattgcctgtatcattaactggggcttcggtttggtcgttggtgcgatgtttgcaaaagaagtcgcgcggagaataaaaggcagtgactacgccttactgattgcctgtgcctatattgcatttatgacatggggtggaggtttttcaggctcaatgccacttttagccgcaacaccaggcaacccagttgctcatttaatgatgagcgaaagcaacccacaaggtattattcctgcagttagtacgcttttctctgggtacaatatttttatcacgttaagtttagtcatttgcttgcctttcattacctatatgatgatgcccaaaaatggcgaaacaaaaagtattgatccaaaacttattgcgcccgatccaacatttgataaaaaattggataaagatgcaacacttgctgaaaaaatggaagaaagccgcttcttagcctatacaatcggggcattaggatatagttacctcggtatgtatttctacaaaaacggattcaatctcacaattaataatgtaaaccttattttcttaatcacaggaattgtgcttcatggctcgccaatggcctatatgcgagcaattattaatgccacacgaagcacagcagggatcttagtgcaattcccattctatgcgggtgtgcaactaatgatggagcattcaggcttaggtggtttaatcaccgaattctttatcaatgttgctaacaaagattctttcccattattaaccttctttagttctgcctttattaactttgcagttccttctggtggcggtcactgggtcatccaaggaccatttgttatccctgctgctcaagcattaggtgcagatctaggtaagtctacaatggcgattgcctatggtgagcaatggatgaacatggctcagccattttgggcattaccagcactgggtatcgcagggcttggcgtgagagatattatgggcttctgtatgaccgcacttatcttcaccgcaccaatttttattattggtttatatttcttatag

SEQ ID NO: 20974 - protein, 447 aa, Haemophilus influenzae
MISRVSRFMTTFVSKYLPDPLIFAVLLTFVTFICAWGLTDSTPVDLVNMWGNGFWNLLGFGMQMALIVVTGNALATSPQIRKFLSTIASIAKTPAQGVVLVTFMGSIACIINWGFGLVVGAMFAKEVARRIKGSDYALLIACAYIAFMTWGGGFSGSMPLLAATPGNPVAHLMMSESNPQGIIPAVSTLFSGYNIFITLSLVICLPFITYMMMPKNGETKSIDPKLIAPDPTFDKKLDKDATLAEKMEESRFLAYTIGALGYSYLGMYFYKNGFNLTINNVNLIFLITGIVLHGSPMAYMRAIINATRSTAGILVQFPFYAGVQLMMEHSGLGGLITEFFINVANKDSFPLLTFFSSAFINFAVPSGGGHWVIQGPFVIPAAQALGADLGKSTMAIAYGEQWMNMAQPFWALPALGIAGLGVRDIMGFCMTALIFTAPIFIIGLYFL

SEQ ID NO: 20975 - DNA, 24 bp, Artificial sequence
  Primer sequence
atgattggtcgcatatcgcgtttt

SEQ ID NO: 20976 - DNA, 26 bp, Artificial sequence
  Primer sequence
ttagaacagcgttaaaccaatgacga

SEQ ID NO: 20977 - protein, 465 aa, Artificial sequence
  Consensus
  Variant (3)..(3): Xaa in position 3 is any amino acid
  Variant (6)..(7): Xaa in position 6 to 7 is any amino acid
  Variant (9)..(11): Xaa in position 9 to 11 is any amino acid
  Variant (13)..(15): Xaa in position 13 to 15 is any amino acid
  Variant (17)..(34): Xaa in position 17 to 34 is any amino acid
  Variant (35)..(44): Xaa in position 35 to 44 is any or no amino acid
  Variant (47)..(47): Xaa in position 47 is any amino acid
  Variant (51)..(51): Xaa in position 51 is any amino acid
  Variant (54)..(54): Xaa in position 54 is any amino acid
  Variant (56)..(56): Xaa in position 56 is any amino acid
  Variant (60)..(60): Xaa in position 60 is any amino acid
  Variant (65)..(65): Xaa in position 65 is any amino acid
  Variant (67)..(68): Xaa in position 67 to 68 is any amino acid
  Variant (71)..(71): Xaa in position 71 is any amino acid
  Variant (74)..(76): Xaa in position 74 to 76 is any amino acid
  Variant (78)..(78): Xaa in position 78 is any amino acid
  Variant (80)..(81): Xaa in position 80 to 81 is any amino acid
  Variant (84)..(91): Xaa in position 84 to 91 is any amino acid
  Variant (94)..(95): Xaa in position 94 to 95 is any amino acid
  Variant (97)..(98): Xaa in position 97 to 98 is any amino acid
  Variant (100)..(101): Xaa in position 100 to 101 is any amino acid
  Variant (103)..(105): Xaa in position 103 to 105 is any amino acid
  Variant (110)..(111): Xaa in position 110 to 111 is any amino acid
  Variant (114)..(115): Xaa in position 114 to 115 is any amino acid
  Variant (118)..(119): Xaa in position 118 to 119 is any amino acid
  Variant (121)..(121): Xaa in position 121 is any amino acid
  Variant (125)..(127): Xaa in position 125 to 127 is any amino acid
  Variant (128)..(132): Xaa in position 128 to 132 is any or no amino acid
  Variant (134)..(134): Xaa in position 134 is any amino acid
  Variant (136)..(139): Xaa in position 136 to 139 is any amino acid
  Variant (144)..(144): Xaa in position 144 is any amino acid
  Variant (146)..(148): Xaa in position 146 to 148 is any amino acid
  Variant (149)..(149): Xaa in position 149 is any or no amino acid
  Variant (151)..(152): Xaa in position 151 to 152 is any amino acid
  Variant (156)..(156): Xaa in position 156 is any amino acid
  Variant (158)..(162): Xaa in position 158 to 162 is any amino acid
  Variant (164)..(175): Xaa in position 164 to 175 is any amino acid
  Variant (176)..(183): Xaa in position 176 to 183 is any or no amino acid
  Variant (186)..(188): Xaa in position 186 to 188 is any amino acid
  Variant (192)..(195): Xaa in position 192 to 195 is any amino acid
  Variant (197)..(203): Xaa in position 197 to 203 is any amino acid
  Variant (205)..(208): Xaa in position 205 to 208 is any amino acid
  Variant (210)..(214): Xaa in position 210 to 214 is any amino acid
  Variant (216)..(241): Xaa in position 216 to 241 is any amino acid
  Variant (242)..(256): Xaa in position 242 to 256 is any or no amino acid
  Variant (259)..(259): Xaa in position 259 is any amino acid
  Variant (262)..(262): Xaa in position 262 is any amino acid
  Variant (264)..(265): Xaa in position 264 to 265 is any amino acid
  Variant (267)..(269): Xaa in position 267 to 269 is any amino acid
  Variant (271)..(273): Xaa in position 271 to 273 is any amino acid
  Variant (275)..(276): Xaa in position 275 to 276 is any amino acid
  Variant (279)..(281): Xaa in position 279 to 281 is any amino acid
  Variant (283)..(289): Xaa in position 283 to 289 is any amino acid
  Variant (290)..(293): Xaa in position 290 to 293 is any or no amino acid
  Variant (295)..(297): Xaa in position 295 to 297 is any amino acid
  Variant (299)..(299): Xaa in position 299 is any amino acid
  Variant (303)..(304): Xaa in position 303 to 304 is any amino acid
  Variant (310)..(311): Xaa in position 310 to 311 is any amino acid
  Variant (312)..(313): Xaa in position 312 to 313 is any or no amino acid
  Variant (315)..(316): Xaa in position 315 to 316 is any amino acid
  Variant (319)..(319): Xaa in position 319 is any amino acid
  Variant (321)..(323): Xaa in position 321 to 323 is any amino acid
  Variant (325)..(329): Xaa in position 325 to 329 is any amino acid
  Variant (337)..(337): Xaa in position 337 is any amino acid
  Variant (342)..(343): Xaa in position 342 to 343 is any amino acid
  Variant (346)..(349): Xaa in position 346 to 349 is any amino acid
  Variant (350)..(356): Xaa in position 350 to 356 is any or no amino acid
  Variant (358)..(360): Xaa in position 358 to 360 is any amino acid
  Variant (363)..(364): Xaa in position 363 to 364 is any amino acid
  Variant (367)..(367): Xaa in position 367 is any amino acid
  Variant (370)..(372): Xaa in position 370 to 372 is any amino acid
  Variant (373)..(373): Xaa in position 373 is any or no amino acid
  Variant (375)..(380): Xaa in position 375 to 380 is any amino acid
  Variant (382)..(382): Xaa in position 382 is any amino acid
  Variant (387)..(389): Xaa in position 387 to 389 is any amino acid
  Variant (396)..(396): Xaa in position 396 is any amino acid
  Variant (398)..(398): Xaa in position 398 is any amino acid
  Variant (400)..(400): Xaa in position 400 is any amino acid
  Variant (403)..(403): Xaa in position 403 is any amino acid
  Variant (406)..(406): Xaa in position 406 is any amino acid
  Variant (409)..(410): Xaa in position 409 to 410 is any amino acid
  Variant (412)..(415): Xaa in position 412 to 415 is any amino acid
  Variant (417)..(424): Xaa in position 417 to 424 is any amino acid
  Variant (427)..(429): Xaa in position 427 to 429 is any amino acid
  Variant (437)..(437): Xaa in position 437 is any amino acid
  Variant (440)..(440): Xaa in position 440 is any amino acid
  Variant (444)..(445): Xaa in position 444 to 445 is any amino acid
  Variant (447)..(448): Xaa in position 447 to 448 is any amino acid
  Variant (455)..(458): Xaa in position 455 to 458 is any amino acid
  Variant (461)..(464): Xaa in position 461 to 464 is any amino acid
RWXPDXXIXXXLXXXVXXXXXXXXXXXXXXXXXXXXXXXXXXXXWGXGFWXLLXFXMQMXLVLVXGXXLAXSPXXXKXLXXLAXXXXXXXXAIXXVXXVXXLXXXINWGXXLVXXALXXKXLARXXXXXXXXVXYXXXXAAAYXGXXXXWXXGLSXSXXXXXAXXXXXXXXXXXXXXXXXXXXIPXXXTIFXXXXLXXXXXXXVXXXXIXXXXXPXXXXXXXXXXXXXXXXXXXXXXXXXXXXXXXXXXXXXXXXXAEXLEXSXXLXXXIXXXGXXYLXXXFXXXXXXXXXXXLXXXNXLFLXXGILLHXXXXPXXYLXAXXXAXXXXXGILLQFPXYAGIXXIMXXXXXXXXXXXLXXXISXXFVXIAXXXXTXXXXXXLXSAIVXXXVPSGGGXWXIXAPXVIXAAXXLXXXXGXXXXXXXXGDXXXNLIQPFWXLPXLAIXXLXXRDIMGFXXXXLLXXXXI

SEQ ID NO: 20978 - protein, 36 aa, Artificial sequence
  Consensus
  Variant (2)..(2): Xaa in position 2 is any amino acid
  Variant (3)..(3): Xaa in position 3 is any or no amino acid
  Variant (5)..(5): Xaa in position 5 is any amino acid
  Variant (7)..(7): Xaa in position 7 is Ile or Leu
  Variant (8)..(8): Xaa in position 8 is any amino acid
  Variant (10)..(10): Xaa in position 10 is Ala, Gly, Ser or Thr
  Variant (14)..(14): Xaa in position 14 is any amino acid
  Variant (15)..(15): Xaa in position 15 is Phe, Ile, Leu, Met or Val
  Variant (16)..(16): Xaa in position 16 is Ile, Leu or Val
  Variant (17)..(17): Xaa in position 17 is Ala, Ile, Leu or Val
  Variant (18)..(18): Xaa in position 18 is Ala, Ile or Val
  Variant (19)..(19): Xaa in position 19 is any amino acid
  Variant (21)..(22): Xaa in position 21 to 22 is any amino acid
  Variant (23)..(23): Xaa in position 23 is Ile, Leu or Val
  Variant (25)..(32): Xaa in position 25 to 32 is any amino acid
  Variant (33)..(35): Xaa in position 33 to 35 is any or no amino acid
GXXWXLXXFXMQMXXXXXXGXXXAXXXXXXXXXXXL

SEQ ID NO: 20979 - protein, 29 aa, Artificial sequence
  Consensus
  Variant (2)..(2): Xaa in position 2 is any amino acid
  Variant (3)..(3): Xaa in position 3 is Ala, Leu or Val
  Variant (4)..(4): Xaa in position 4 is Ala, Ile, Leu or Val
  Variant (5)..(5): Xaa in position 5 is any amino acid
  Variant (6)..(6): Xaa in position 6 is Ala or Val
  Variant (7)..(7): Xaa in position 7 is Ala, Cys or Ser
  Variant (8)..(8): Xaa in position 8 is Ala, Gly or Ser
  Variant (10)..(10): Xaa in position 10 is any amino acid
  Variant (12)..(15): Xaa in position 12 to 15 is any amino acid
  Variant (16)..(18): Xaa in position 16 to 18 is any or no amino acid
  Variant (20)..(20): Xaa in position 20 is Phe, Leu or Met
  Variant (21)..(21): Xaa in position 21 is Ala, Gly, Ser or Thr
  Variant (22)..(22): Xaa in position 22 is Ala, Gly or Ser
  Variant (24)..(24): Xaa in position 24 is any amino acid
  Variant (25)..(25): Xaa in position 25 is Ala, Pro or Ser
  Variant (26)..(28): Xaa in position 26 to 28 is any amino acid
  Variant (29)..(29): Xaa in position 29 is Ala, Asn, Ser or Thr
YXXXXXXXYXGXXXXXXXGXXXSXXXXXX

SEQ ID NO: 20980 - protein, 48 aa, Artificial sequence
  Consensus
  Variant (2)..(2): Xaa in position 2 is Phe or Leu
  Variant (3)..(3): Xaa in position 3 is any amino acid
  Variant (4)..(4): Xaa in position 4 is Phe, Ile or Leu
  Variant (5)..(7): Xaa in position 5 to 7 is any amino acid
  Variant (8)..(8): Xaa in position 8 is Ala, Gly or Ile
  Variant (9)..(10): Xaa in position 9 to 10 is any amino acid
  Variant (12)..(14): Xaa in position 12 to 14 is any amino acid
  Variant (15)..(21): Xaa in position 15 to 21 is any or no amino acid
  Variant (23)..(28): Xaa in position 23 to 28 is any amino acid
  Variant (29)..(29): Xaa in position 29 is Phe, Ile, Leu or Val
  Variant (30)..(31): Xaa in position 30 to 31 is any amino acid
  Variant (32)..(32): Xaa in position 32 is Ala, Gly or Ser
  Variant (33)..(34): Xaa in position 33 to 34 is any amino acid
  Variant (35)..(35): Xaa in position 35 is Ala, Gly, Ser or Thr
  Variant (36)..(37): Xaa in position 36 to 37 is any amino acid
  Variant (39)..(39): Xaa in position 39 is Ile, Leu or Val
  Variant (40)..(40): Xaa in position 40 is Ile, Leu, Met or Val
  Variant (41)..(41): Xaa in position 41 is Ile, Leu or Val
  Variant (43)..(43): Xaa in position 43 is Phe or Tyr
  Variant (45)..(45): Xaa in position 45 is Phe or Leu
  Variant (47)..(47): Xaa in position 47 is Ala or Gly
  Variant (48)..(48): Xaa in position 48 is Gly or Ser
NXXXXXXXXXLXXXXXXXXXXPXXXXXXXXXXXXXXXGXXXQXPXYXX

SEQ ID NO: 20981 - protein, 52 aa, Artificial sequence
  Consensus
  Variant (5)..(5): Xaa in position 5 is Gly or Ser
  Variant (6)..(6): Xaa in position 6 is any amino acid
  Variant (7)..(7): Xaa in position 7 is Phe or Trp
  Variant (8)..(8): Xaa in position 8 is Ala, Ile or Val
  Variant (9)..(9): Xaa in position 9 is Ile or Val
  Variant (10)..(10): Xaa in position 10 is any amino acid
  Variant (11)..(11): Xaa in position 11 is Ala, Gly or Ser
  Variant (13)..(16): Xaa in position 13 to 16 is any amino acid
  Variant (17)..(17): Xaa in position 17 is any or no amino acid
  Variant (19)..(39): Xaa in position 19 to 39 is any amino acid
  Variant (40)..(40): Xaa in position 40 is any or no amino acid
  Variant (42)..(42): Xaa in position 42 is Leu or Met
  Variant (43)..(43): Xaa in position 43 is Ala, Ile, Leu or Val
  Variant (44)..(44): Xaa in position 44 is any amino acid
  Variant (47)..(47): Xaa in position 47 is Phe, Trp or Tyr
  Variant (48)..(48): Xaa in position 48 is any amino acid
  Variant (50)..(50): Xaa in position 50 is Pro or Ser
  Variant (51)..(51): Xaa in position 51 is any amino acid
PSGGXXXXXXXPXXXXXAXXXXXXXXXXXXXXXXXXXXXXNXXXPFXXLXXL

SEQ ID NO: 20982 - DNA, 1185 bp, Saccharomyces cerevisiae; identical to SEQ ID NO: 19013
  CDS (1)..(1185)

SEQ ID NO: 20983 - protein, 394 aa, Saccharomyces cerevisiae; identical to SEQ ID NO: 19014

SEQ ID NO: 20984 - DNA, 1362 bp, Saccharomyces cerevisiae; identical to SEQ ID NO: 19015
  CDS (1)..(1362)

SEQ ID NO: 20985 - protein, 453 aa, Saccharomyces cerevisiae; identical to SEQ ID NO: 19016

SEQ ID NO: 20986 - DNA, 1338 bp, Saccharomyces cerevisiae; identical to SEQ ID NO: 19017
  CDS (1)..(1338)

SEQ ID NO: 20987 - protein, 445 aa, Saccharomyces cerevisiae; identical to SEQ ID NO: 19018

SEQ ID NO: 20988 - DNA, 1287 bp, Schizosaccharomyces pombe; identical to SEQ ID NO: 19019
  CDS (1)..(1287)

SEQ ID NO: 20989 - protein, 428 aa, Schizosaccharomyces pombe; identical to SEQ ID NO: 19020

SEQ ID NO: 20990 - DNA, 1621 bp, Arabidopsis thaliana; identical to SEQ ID NO: 19021
  CDS (86)..(1342)

SEQ ID NO: 20991 - protein, 418 aa, Arabidopsis thaliana; identical to SEQ ID NO: 19022

SEQ ID NO: 20992 - DNA, 1068 bp, Caenorhabditis elegans; identical to SEQ ID NO: 19023
  CDS (1)..(1068)

SEQ ID NO: 20993 - protein, 355 aa, Caenorhabditis elegans; identical to SEQ ID NO: 19024

SEQ ID NO: 20994 - DNA, 1152 bp, Oryza sativa; identical to SEQ ID NO: 19025
  CDS (1)..(1152)

SEQ ID NO: 20995 - protein, 383 aa, Oryza sativa; identical to SEQ ID NO: 19026

SEQ ID NO: 20996 - DNA, 1485 bp, Debaryomyces hansenii CBS767; identical to SEQ ID NO: 19027
  CDS (1)..(1485)

SEQ ID NO: 20997 - protein, 494 aa, Debaryomyces hansenii CBS767; identical to SEQ ID NO: 19028

SEQ ID NO: 20998 - DNA, 1329 bp, Debaryomyces hansenii CBS767; identical to SEQ ID NO: 19029
  CDS (1)..(1329)

SEQ ID NO: 20999 - protein, 442 aa, Debaryomyces hansenii CBS767; identical to SEQ ID NO: 19030

SEQ ID NO: 21000 - DNA, 1413 bp, Debaryomyces hansenii CBS767; identical to SEQ ID NO: 19031
  CDS (1)..(1413)

SEQ ID NO: 21001 - protein, 470 aa, Debaryomyces hansenii CBS767; identical to SEQ ID NO: 19032

SEQ ID NO: 21002 - DNA, 1404 bp, Debaryomyces hansenii CBS767; identical to SEQ ID NO: 19033
  CDS (1)..(1404)

SEQ ID NO: 21003 - protein, 467 aa, Debaryomyces hansenii CBS767; identical to SEQ ID NO: 19034

SEQ ID NO: 21004 - DNA, 1260 bp, Yarrowia lipolytica CLIB99; identical to SEQ ID NO: 19035
  CDS (1)..(1260)

SEQ ID NO: 21005 - protein, 419 aa, Yarrowia lipolytica CLIB99; identical to SEQ ID NO: 19036

SEQ ID NO: 21006 - DNA, 1470 bp, Yarrowia lipolytica CLIB99; identical to SEQ ID NO: 19037
  CDS (1)..(1470)

SEQ ID NO: 21007 - protein, 489 aa, Yarrowia lipolytica CLIB99; identical to SEQ ID NO: 19038

SEQ ID NO: 21008 - DNA, 1230 bp, Kluyveromyces lactis NRRL Y; identical to SEQ ID NO: 19039
  CDS (1)..(1230)

SEQ ID NO: 21009 - protein, 409 aa, Kluyveromyces lactis NRRL Y; identical to SEQ ID NO: 19040

SEQ ID NO: 21010 - DNA, 1086 bp, Xenopus laevis; identical to SEQ ID NO: 19041
  CDS (1)..(1086)

SEQ ID NO: 21011 - protein, 361 aa, Xenopus laevis; identical to SEQ ID NO: 19042

SEQ ID NO: 21012 - DNA, 1161 bp, Candida glabrata CBS138; identical to SEQ ID NO: 19043
  CDS (1)..(1161)

SEQ ID NO: 21013 - protein, 386 aa, Candida glabrata CBS138; identical to SEQ ID NO: 19044

SEQ ID NO: 21014 - DNA, 1356 bp, Candida glabrata CBS138; identical to SEQ ID NO: 19045
  CDS (1)..(1356)

SEQ ID NO: 21015 - protein, 451 aa, Candida glabrata CBS138; identical to SEQ ID NO: 19046

SEQ ID NO: 21016 - DNA, 1272 bp, Candida glabrata CBS138; identical to SEQ ID NO: 19047
  CDS (1)..(1272)

SEQ ID NO: 21017 - protein, 423 aa, Candida glabrata CBS138; identical to SEQ ID NO: 19048

SEQ ID NO: 21018 - DNA, 1155 bp, Ashbya gossypii; identical to SEQ ID NO: 19049
  CDS (1)..(1155)

SEQ ID NO: 21019 - protein, 384 aa, Ashbya gossypii; identical to SEQ ID NO: 19050

SEQ ID NO: 21020 - DNA, 1602 bp, Neurospora crassa; identical to SEQ ID NO: 19051
  CDS (1)..(1602)

SEQ ID NO: 21021 - protein, 533 aa, Neurospora crassa; identical to SEQ ID NO: 19052

SEQ ID NO: 21022 - DNA, 1080 bp, Caenorhabditis elegans; identical to SEQ ID NO: 19053
  CDS (1)..(1080)

SEQ ID NO: 21023 - protein, 359 aa, Caenorhabditis elegans; identical to SEQ ID NO: 19054

SEQ ID NO: 21024 - DNA, 1029 bp, Mus musculus; identical to SEQ ID NO: 19055
  CDS (1)..(1029)

SEQ ID NO: 21025 - protein, 342 aa, Mus musculus; identical to SEQ ID NO: 19056

SEQ ID NO: 21026 - DNA, 1029 bp, Homo sapiens; identical to SEQ ID NO: 19057
  CDS (1)..(1029)

SEQ ID NO: 21027 - protein, 342 aa, Homo sapiens; identical to SEQ ID NO: 19058

SEQ ID NO: 21028 - DNA, 1328 bp, Homo sapiens; identical to SEQ ID NO: 19059
  CDS (7)..(1056)

SEQ ID NO: 21029 - protein, 349 aa, Homo sapiens; identical to SEQ ID NO: 19060

SEQ ID NO: 21030 - DNA, 25 bp, Artificial sequence
  Primer sequence
atgtggacaaacactttcaaatggt

SEQ ID NO: 21031 - DNA, 25 bp, Artificial sequence
  Primer sequence
ttactttgacaggaacgagactaaa

SEQ ID NO: 21032 - protein, 474 aa, Artificial sequence; identical to SEQ ID NO: 19063
  Consensus
  Variant (9)..(12): Xaa in position 9 to 12 is any amino acid
  Variant (14)..(19): Xaa in position 14 to 19 is any amino acid
  Variant (21)..(29): Xaa in position 21 to 29 is any amino acid
  Variant (30)..(35): Xaa in position 30 to 35 is any or no amino acid
  Variant (38)..(38): Xaa in position 38 is any amino acid
  Variant (40)..(40): Xaa in position 40 is any amino acid
  Variant (42)..(42): Xaa in position 42 is any amino acid
  Variant (44)..(55): Xaa in position 44 to 55 is any amino acid
  Variant (56)..(108): Xaa in position 56 to 108 is any or no amino acid
  Variant (110)..(111): Xaa in position 110 to 111 is any amino acid
  Variant (114)..(115): Xaa in position 114 to 115 is any amino acid
  Variant (118)..(118): Xaa in position 118 is any amino acid
  Variant (121)..(124): Xaa in position 121 to 124 is any amino acid
  Variant (126)..(129): Xaa in position 126 to 129 is any amino acid
  Variant (130)..(134): Xaa in position 130 to 134 is any or no amino acid
  Variant (140)..(140): Xaa in position 140 is any amino acid
  Variant (145)..(147): Xaa in position 145 to 147 is any amino acid
  Variant (149)..(149): Xaa in position 149 is any amino acid
  Variant (153)..(164): Xaa in position 153 to 164 is any or no amino acid
  Variant (166)..(167): Xaa in position 166 to 167 is any amino acid
  Variant (169)..(170): Xaa in position 169 to 170 is any amino acid
  Variant (172)..(172): Xaa in position 172 is any amino acid
  Variant (174)..(175): Xaa in position 174 to 175 is any amino acid
  Variant (177)..(177): Xaa in position 177 is any amino acid
  Variant (179)..(205): Xaa in position 179 to 205 is any amino acid
  Variant (206)..(279): Xaa in position 206 to 279 is any or no amino acid
  Variant (282)..(283): Xaa in position 282 to 283 is any amino acid
  Variant (286)..(286): Xaa in position 286 is any amino acid
  Variant (287)..(287): Xaa in position 287 is any or no amino acid
  Variant (289)..(290): Xaa in position 289 to 290 is any amino acid
  Variant (292)..(324): Xaa in position 292 to 324 is any amino acid
  Variant (325)..(354): Xaa in position 325 to 354 is any or no amino acid
  Variant (356)..(362): Xaa in position 356 to 362 is any amino acid
  Variant (364)..(364): Xaa in position 364 is any amino acid
  Variant (367)..(379): Xaa in position 367 to 379 is any amino acid
  Variant (380)..(405): Xaa in position 380 to 405 is any or no amino acid
  Variant (409)..(411): Xaa in position 409 to 411 is any amino acid
  Variant (414)..(417): Xaa in position 414 to 417 is any amino acid
  Variant (419)..(427): Xaa in position 419 to 427 is any amino acid
  Variant (428)..(454): Xaa in position 428 to 454 is any or no amino acid
  Variant (456)..(457): Xaa in position 456 to 457 is any or no amino acid
  Variant (461)..(461): Xaa in position 461 is any amino acid
  Variant (464)..(464): Xaa in position 464 is any amino acid
  Variant (467)..(469): Xaa in position 467 to 469 is any amino acid
  Variant (471)..(473): Xaa in position 471 to 473 is any amino acid

SEQ ID NO: 21033 - protein, 9 aa, Artificial sequence
  Consensus
  Variant (2)..(2): Xaa in position 2 is any or no amino acid
  Variant (4)..(4): Xaa in position 4 is any or no amino acid
  Variant (6)..(6): Xaa in position 6 is any amino acid
  Variant (8)..(8): Xaa in position 8 is any amino acid
DXLXGXGXS

SEQ ID NO: 21034 - protein, 26 aa, Artificial sequence
  Consensus
  Variant (3)..(3): Xaa in position 3 is Phe or Tyr
  Variant (4)..(4): Xaa in position 4 is any amino acid
  Variant (5)..(5): Xaa in position 5 is Ala, Ser or Thr
  Variant (6)..(7): Xaa in position 6 to 7 is any amino acid
  Variant (9)..(9): Xaa in position 9 is any amino acid
  Variant (10)..(10): Xaa in position 10 is Phe, Ile, Leu, Met or Val
  Variant (11)..(11): Xaa in position 11 is any amino acid
  Variant (12)..(12): Xaa in position 12 is His or Tyr
  Variant (13)..(13): Xaa in position 13 is Asn or Pro
  Variant (14)..(18): Xaa in position 14 to 18 is any amino acid
  Variant (19)..(19): Xaa in position 19 is Ala or Leu
  Variant (20)..(23): Xaa in position 20 to 23 is any amino acid
  Variant (24)..(24): Xaa in position 24 is Pro, Gln or Ser
  Variant (25)..(25): Xaa in position 25 is any amino acid
  Variant (26)..(26): Xaa in position 26 is Ala, Gly or Ile
GGXXXXXYXXXXXXXXXXXXXXXXXX

SEQ ID NO: 21035 - protein, 12 aa, Artificial sequence
  Consensus
  Variant (3)..(3): Xaa in position 3 is Ala, Asp, Glu, Gln or Ser
  Variant (4)..(4): Xaa in position 4 is any amino acid
  Variant (5)..(5): Xaa in position 5 is Asp, Ser or Thr
  Variant (6)..(6): Xaa in position 6 is any amino acid
  Variant (7)..(7): Xaa in position 7 is Ile, Met or Val
  Variant (8)..(8): Xaa in position 8 is Asp or Asn
  Variant (9)..(10): Xaa in position 9 to 10 is any amino acid
  Variant (11)..(11): Xaa in position 11 is Ala, Gly, Ser or Thr
  Variant (12)..(12): Xaa in position 12 is Ala or Gly
YGXXXXXXXXXX

SEQ ID NO: 21036 - protein, 13 aa, Artificial sequence
  Consensus
  Variant (2)..(2): Xaa in position 2 is any or no amino acid
  Variant (4)..(4): Xaa in position 4 is any amino acid
  Variant (5)..(5): Xaa in position 5 is Ile, Leu or Val
  Variant (6)..(6): Xaa in position 6 is Phe or Tyr
  Variant (7)..(7): Xaa in position 7 is any amino acid
  Variant (9)..(9): Xaa in position 9 is Asp, Asn or Gln
  Variant (10)..(12): Xaa in position 10 to 12 is any amino acid
GXHXXXXDXXXXF

SEQ ID NO: 21037 - DNA, 1113 bp, Saccharomyces cerevisiae
  CDS (1)..(1113)
atggctgaagcaagcatcgaaaagactcaaattttacaaaaatatctagaactggaccaaagaggtagaataattgccgaatacgtttggatcgatggtactggtaacttacgttccaaaggtagaactttgaagaagagaatcacatccattgaccaattgccagaatggaacttcgacggttcttctaccaaccaagcgccaggccacgactctgacatctatttgaaacccgttgcttactacccagatcccttcaggagaggtgacaacattgttgtcttggccgcatgttacaacaatgacggtactccaaacaagttcaaccacagacacgaagctgccaagctatttgctgctcataaggatgaagaaatctggtttggtctagaacaagaatacactctatttgacatgtatgacgatgtttacggatggccaaagggtgggtacccagctccacaaggtccttactactgtggtgttggtgccggtaaggtttatgccagagacatgatcgaagctcactacagagcttgtttgtatgccggattagaaatttctggtattaacgctgaagtcatgccatctcaatgggaattccaagtcggtccatgtaccggtattgacatgggtgaccaattatggatggccagatactttttgcacagagtggcagaagagtttggtatcaagatctcattccatccaaagccattgaagggtgactggaacggtgccggttgtcacgctaacgtttccaccaaggaaatgagacaaccaggtggtacgaaatacatcgaacaagccatcgagaagttatccaagagacacgctgaacacattaagttgtacggtagcgataacgacatgagattaactggtagacatgaaaccgcttccatgactgccttttcttctggtgtcgccaacagaggtagctcaattagaatcccaagatccgtcgccaaggaaggttacggttactttgaagaccgtagaccagcttccaacatcgacccatacttggttacaggtatcatgtgtgaaactgtttgcggtgctattgacaatgctgacatgacgaaggaatttgaaagagaatcttcataa

SEQ ID NO: 21038 - protein, 370 aa, Saccharomyces cerevisiae
MAEASIEKTQILQKYLELDQRGRIIAEYVWIDGTGNLRSKGRTLKKRITSIDQLPEWNFDGSSTNQAPGHDSDIYLKPVAYYPDPFRRGDNIVVLAACYNNDGTPNKFNHRHEAAKLFAAHKDEEIWFGLEQEYTLFDMYDDVYGWPKGGYPAPQGPYYCGVGAGKVYARDMIEAHYRACLYAGLEISGINAEVMPSQWEFQVGPCTGIDMGDQLWMARYFLHRVAEEFGIKISFHPKPLKGDWNGAGCHANVSTKEMRQPGGTKYIEQAIEKLSKRHAEHIKLYGSDNDMRLTGRHETASMTAFSSGVANRGSSIRIPRSVAKEGYGYFEDRRPASNIDPYLVTGIMCETVCGAIDNADMTKEFERESS

SEQ ID NO: 21039 - DNA, 1389 bp, Aeropyrum pernix
  CDS (1)..(1389)
atgaaggcacacatgcctgagaccggaccacagagagataaagacggtcaaagggagggacgcgtcctagttcactatacagatatagctgggtacctaagacaagtcgaggttccgctaaggaacgtcgagaaggagtttgtggcatcatttgacggtagcagcgtctacggcttcacccctgtagaggacagcgatcttcttctaaaacatgtgccggagaccctagtcagcgtcccttggaggagcgggctttggagggttatagctactgtctacaacgctactcgtgagagaagcccgagggatccgaggttagcagcagaaacagctgaaaagataatgtcgtctatgggctatagggtcaaggctggcgctgagatagagttcttcattttcgataagataggtgtcgacgttctaaacccggccagggggcttggctacattgttgagagtagggaacaacccggcgggcaggacggcatttttggccaggtcaagaagtcgtaccacatgccagaacctccagacagcctccttgactatagacttatgctcacagaaactctgcagaggttcaaagttgacgtggcagtctcccaccacgaggtggccgttagccaggtcgaggtctctatcggatctaggacgagcttggcaagacttggagatgacataatgacagtcaagtgggtttcaaaggttttagcccgcatggacgggagggtggctacatttatgccaaaacctatattcggcgacaacggctccggcatgcacatccacctgagtctatggagtccaggtggtgagaacctcttcgccggccatggagacagtgatctctcggaaacagcgctgcatttcatagccgggattctcgagcacgcgcgaagcctaagcgctattctatctcccacgaccaactcgtatcgcaggctagtagcaggctatgaggctccggtttatgttgcctggggttggagaaacaggagtgctatgattaggatacctgcgtccgctggcaatatagatgctgtaaggatcgaggtaaggagccccgatcccacagccaatccttacctggctttggcggcgctgtttatggcaggactcgacggtgtaaaaaagaagctcgctccgccagatccctatgagggcaacctctacaagattagccctgaggagcttagagaaaagggtataaagacgctacctaggaacctagatgaggcgctagacgagctggagtccgacaatgactatttgaagccagcattcactagggagatgctagagtcttatatagaggtaaagaggaaggaatcggaggatacgagactgtatccccatcccatcgaagtatataaatatttaaacctgtag

SEQ ID NO: 21040 - protein, 462 aa, Aeropyrum pernix
MKAHMPETGPQRDKDGQREGRVLVHYTDIAGYLRQVEVPLRNVEKEFVASFDGSSVYGFTPVEDSDLLLKHVPETLVSVPWRSGLWRVIATVYNATRERSPRDPRLAAETAEKIMSSMGYRVKAGAEIEFFIFDKIGVDVLNPARGLGYIVESREQPGGQDGIFGQVKKSYHMPEPPDSLLDYRLMLTETLQRFKVDVAVSHHEVAVSQVEVSIGSRTSLARLGDDIMTVKWVSKVLARMDGRVATFMPKPIFGDNGSGMHIHLSLWSPGGENLFAGHGDSDLSETALHFIAGILEHARSLSAILSPTTNSYRRLVAGYEAPVYVAWGWRNRSAMIRIPASAGNIDAVRIEVRSPDPTANPYLALAALFMAGLDGVKKKLAPPDPYEGNLYKISPEELREKGIKTLPRNLDEALDELESDNDYLKPAFTREMLESYIEVKRKESEDTRLYPHPIEVYKYLNL

SEQ ID NO: 21041 - DNA, 1035 bp, Agrobacterium tumefaciens
  CDS (1)..(1035)
atgactaagttcaaactcgagtacatctggctggacggatacaagccggtcgcaaacctgcgcggcaagacacagatcaaggaattcgatgaattccccacactcgagcagttgccgctttggggttttgacggctcctccacccagcaggccgaaggccactcatcggattgcgtgctgaagcccgttgcgatctacccggatccggcccgcaccaacggcgcgctcgtcatgtgcgaagtcatgatgcccgatggcgtcaccccgcacgcttccaacagccgcgccacgatcctcgaagacgaagacgcatggttcggtttcgaacaggaatatttcttctaccaggacggccgcccgctcggtttcccggaacagggttaccccgctccgcagggtccgtattacaccggcgtcggcttcaagaacgtcggctcggttgcccgcgaaatcgttgaagagcacctcgatctctgcctcgaagccggcatcaaccatgaaggcatcaacgccgaagtggccaagggccagtgggaattccaggtattcggcaagggctccaagcgcgccgccgaccagatctggatcgcccgttacctgctgctgcgtctttgcgaacagtacggcatcgacgtcgagttccattgcaagccgctcggcgataccgactggaacggctccggcatgcattgcaacttctcgaccaagttcatgcgcgaagttggcggcaaggactatttcgaagccctcatggccgctttcgccaagaattggcaggagcacatcgacgtttacggtccggacaaccatctgcgcctgaccggcaagcacgaaaccgctccgtggaacaagttctcctatggcgtggcagaccgtggcgcctcgatccgcgttccgcactccttcgtcaacaacggttaccgtggttacctcgaagaccgtcgtccgaattcgcagggctgcccctaccagatcgcttccgtcgttctgaagacgatcgcagaagtgccgctcgcaaagtcggctgctgcctga

SEQ ID NO: 21042 - protein, 344 aa, Agrobacterium tumefaciens
MTKFKLEYIWLDGYKPVANLRGKTQIKEFDEFPTLEQLPLWGFDGSSTQQAEGHSSDCVLKPVAIYPDPARTNGALVMCEVMMPDGVTPHASNSRATILEDEDAWFGFEQEYFFYQDGRPLGFPEQGYPAPQGPYYTGVGFKNVGSVAREIVEEHLDLCLEAGINHEGINAEVAKGQWEFQVFGKGSKRAADQIWIARYLLLRLCEQYGIDVEFHCKPLGDTDWNGSGMHCNFSTKFMREVGGKDYFEALMAAFAKNWQEHIDVYGPDNHLRLTGKHETAPWNKFSYGVADRGASIRVPHSFVNNGYRGYLEDRRPNSQGCPYQIASVVLKTIAEVPLAKSAAA

SEQ ID NO: 21043 - DNA, 1338 bp, Medicago sativa (alfalfa)
  CDS (121)..(1191)
gcgccgacatcataacggttctggcaaatattctgaaatgagctgttgacaattaatcatcggctcgtataatgtgtggaattgtgagcggataacaatttcacacaggaaacagtcgacatgtctctcctttcagatcttatcaaccttgacctctccgaaaccaccgagaaaatcatcgccgaatacatatggattggtggatctggtttggacttgaggagcaaagcaaggactctaccaggaccagttactgacccttcacagcttcccaagtggaactatgatggttccagcacaggtcaagctcctggagaagatagtgaagttattatctacccacaagccattttcaaggacccatttagaaggggtaacaatatcttggttatgtgtgatgcatacactccagctggagagcccattcccaccaacaagagacatgcagctgccaagattttcagccatcctgatgttgttgctgaagtaccatggtatggtattgagcaagaatacaccttgttgcagaaagacatcaattggcctcttggttggccagttggtggttttcctggacctcagggaccatactattgtggagctggtgctgacaaggcatttggccgtgacattgttgactcacattacaaagcctgtctttatgccggcatcaacatcagtggaatcaatggtgaagtgatgcctggtcaatgggaattccaagttggtccctcagttggtatctctgctggtgatgagatatgggttgctcgttacattttggagaggatcactgaggttgctggtgtggtgctttcctttgacccaaaaccaattaagggtgattggaatggtgctggtgctcacacaaattacagcaccaagtctatgagagaagatggtggctatgaagtcatcttgaaagcaattgagaagcttgggaagaagcacaaggagcacattgctgcttatggagaaggcaacgagcgtagattgacagggcgacatgagacagctgacattaacaccttcttatggggtgttgcaaaccgtggtgcgtcgattagagttggaagggacacagagaaagcagggaaaggttatttcgaggataggaggccatcatctaacatggatccatatgttgttacttccatgattgcagacaccaccattctctggaaaccataagccaccacacacacatgcattgaagtatttgaaagtcattgttgattccgcattagaatttggtcattgttttttctaggatttggatttgtgttattgttatggttcacactttgtttgtttgaatttgaggcctctgcctcgcgc

SEQ ID NO: 21044 - protein, 356 aa, Medicago sativa (alfalfa)
MSLLSDLINLDLSETTEKIIAEYIWIGGSGLDLRSKARTLPGPVTDPSQLPKWNYDGSSTGQAPGEDSEVIIYPQAIFKDPFRRGNNILVMCDAYTPAGEPIPTNKRHAAAKIFSHPDVVAEVPWYGIEQEYTLLQKDINWPLGWPVGGFPGPQGPYYCGAGADKAFGRDIVDSHYKACLYAGINISGINGEVMPGQWEFQVGPSVGISAGDEIWVARYILERITEVAGVVLSFDPKPIKGDWNGAGAHTNYSTKSMREDGGYEVILKAIEKLGKKHKEHIAAYGEGNERRLTGRHETADINTFLWGVANRGASIRVGRDTEKAGKGYFEDRRPSSNMDPYVVTSMIADTTILWKP

SEQ ID NO: 21045 - DNA, 1950 bp, Azotobacter vinelandii
  CDS (478)..(1881)
gtcgaggttgtcccacacgcccgtcaccgccagctccggatccaggtcgcgcacgacggtgcggatgttcttcgccagttggcgaatgaagcgcttgcgcaccggcgggctcttgatggtgatttccgggaagaccttgacgatgagtttcatggaggctgcacgggccggtcaggcaaaagagggggcgggattatagcggatcttgttcaagacttgaccaactatcggcaaggcgcccacagcgcaccaaaatgaaacaaatcttctgacccaggcacataaacagagcagaaattttcgccagaatagccggtaccgggcaggcccgaccggcgaagaattcccctactccgccaaggtagtggcatgaaacttgctcccttgtggcgcggcttgccttggcggatgatcgccgcccggttttacccgaattcccgagggtcttttcgaggctctctccacctggaggacaatatgtcgaagtcgcttcaactgatcaaagaacatgacgtgaagtggattgatctccgcttcaccgacaccaaaggcaagcagcaacacgtaaccatgccggcgcgtgacgtggacgacgacttcttcgaatacggcaagatgttcgacggctcctccatcgccggctggaagggcatcgaagcctccgacatgatcctgatgccggacgacagcaccgccgtgctggatccgttcaccgaagagccgaccctgatcatcgtctgcgacatcatcgagccctcgaccatgcagggctacgatcgcgacccgcgcgccatcgcccgccgcgccgaggaatacctgaagtccaccggcatcggcgacaccgccttcttcggtccggagcccgagttcttcatcttcgacgaagtgaagtacaagtccgacatctccggctccatgttcaagatcttctccgaacaggctgcctggaacaccgacgccgacttcgaaggcggcaacaagggccatcgtccgggcgtcaagggcggctacttcccggttccgccggtcgaccacgaccacgaaatccgcaccgccatgtgcaacgccctggaagagatgggcctgaaggtcgaggttcaccaccacgaagtggccaccgccggccagaacgagatcggcgtcagcttcaacaccctggtggccaaggccgacgaagtgcagaccctgaagtactgcgtgcacaacgtcgccgacgcctacggcaagaccgtgaccttcatgccgaagccgctgtacggcgacaacggctcgggcatgcacgtgcacatgtccatcgccaaagacggcaagaacaccttcgccggcgaaggctatgccggcctgtccgacaccgccctgtacttcatcggcggcatcatcaagcacggcaaggcgctgaacggcttcaccaacccgtcgaccaactcctacaagcgtctggtccccggtttcgaagctccggtcatgctggcctactcggcccgcaaccgttccgcctccatccgcatcccctacgtcaacagcccgaaagcccgccgcatcgaagcgcgcttcccggacccgtcggccaacccctacctggccttcgccgcgctgctgatggccggcctggacggcatccagaacaagatccatcccggcgatgccgccgacaagaacctgtacgacttgccgccggaagaagccaaggaaatcccgcaggtgtgcggcagcctgaaggaggccctggaagaactggacaagggccgcgccttcctgaccaagggcggcgtcttctccgacgacttcatcgatgcctacctcgagctgaagagcgaagaggaaatcaaggtgcgcaccttcgtgcacccgctggaatacgacctgtactacagcgtctgatccagccggcgatactctggaaggcctcctcgggaggcctttcttttttgagtgatcgccataacgctt

SEQ ID NO: 21046 - protein, 467 aa, Azotobacter vinelandii
MSKSLQLIKEHDVKWIDLRFTDTKGKQQHVTMPARDVDDDFFEYGKMFDGSSIAGWKGIEASDMILMPDDSTAVLDPFTEEPTLIIVCDIIEPSTMQGYDRDPRAIARRAEEYLKSTGIGDTAFFGPEPEFFIFDEVKYKSDISGSMFKIFSEQAAWNTDADFEGGNKGHRPGVKGGYFPVPPVDHDHEIRTAMCNALEEMGLKVEVHHHEVATAGQNEIGVSFNTLVAKADEVQTLKYCVHNVADAYGKTVTFMPKPLYGDNGSGMHVHMSIAKDGKNTFAGEGYAGLSDTALYFIGGIIKHGKALNGFTNPSTNSYKRLVPGFEAPVMLAYSARNRSASIRIPYVNSPKARRIEARFPDPSANPYLAFAALLMAGLDGIQNKIHPGDAADKNLYDLPPEEAKEIPQVCGSLKEALEELDKGRAFLTKGGVFSDDFIDAYLELKSEEEIKVRTFVHPLEYDLYYSV

SEQ ID NO: 21047 - DNA, 1600 bp, Hordeum vulgare (barley)
  CDS (281)..(1585)
cttggtttctggcctggtttgcctccgttgcagctgcaaggggcgcctcaaatctcgtccacccagagccctatcgcctaatgacgagccagatgccatgcccgccccgcgccactcagaatctccccccgcaatctaaaatacttataccacccaccccccgcttccataaatattatttccagcgcgatctcacaggtcgcccccccttccctccctcgcctccgccgcgtccgccgtctctctggtttaggggccgcggagtcgctgtacgtaagtaatgcaagtacgtagagacgacgatggcgcaggcggttgtgcaggcgatgcagtgccaggtgggggtgaggggcaggacggcgtcccggcgaggcagcccgcgggcagggtgtggggcgtcagcagggccgcccgcgccacctccgggttcaaggtgctggcgctcggcccggagaccaccggggtcatccagaggatgcagcagctgctcgacatggacaccacgcccttcaccgacaagatcatcgccgagtacatctgggttggaggatctggaattgacctcagaagcaaatcaaggacgatttcgaagccagtggaggacccgtcagagctgccgaaatggaactacgacggatcgagcacggggcaggctcctggggaagacagtgaagtcatcctatacccacaggccatattcaaggacccattccgaggaggcaacaacatactggttatctgtgacacctacacaccacagggggaacccatccctactaacaaacgccacatggctgcacaaatcttcagtgaccccaaggtcacttcacaagtgcaatggttcggaatcgaacaggagtacactctgatgcagagggatgtgaactggcctcttggctggcctgttggagggtaccctggcccccagggtccatactactgcgccgtaggatcagacaagtcatttggccgtgacatatcagatgctcactacaaggcgtgcctttacgctggaattgaaatcagtggaacaaacggggaggtcatgcctggtcagtgggagtaccaggttggacccagcgttggtattgatgcaggagaccacatatgggcttccagatacattctcgagagaatcacggagcaagctggtgtggtgctcacccttgacccaaaaccaatccagggtgactggaacggagctggctgccacacaaactacagcacattgagcatgcgcgaggatggaggtttcgacgtgatcaagaaggcaatcctgaacctttcacttcgccatgacttgcacatagccgcatatggtgaaggaaacgagcggaggttgacagggctacacgagacagctagcatatcagacttctcatggggtgtggcgaaccgtggctgctctattcgtgtggggcgagacaccgaggcgaagggcaaaggatacctggaggaccgtcgcccggcctccaacatggacccgtacaccgtgacggcgctgctggccgagaccacgatcctgtgggagccgaccctcgaggcggaggccctcgctgccaagaagctggcgctgaaggtatgaaggacctgaaaaaag

SEQ ID NO: 21048 - protein, 434 aa, Hordeum vulgare (barley)
MQVRRDDDGAGGCAGDAVPGGGEGQDGVPARQPAGRVWGVSRAARATSGFKVLALGPETTGVIQRMQQLLDMDTTPFTDKIIAEYIWVGGSGIDLRSKSRTISKPVEDPSELPKWNYDGSSTGQAPGEDSEVILYPQAIFKDPFRGGNNILVICDTYTPQGEPIPTNKRHMAAQIFSDPKVTSQVQWFGIEQEYTLMQRDVNWPLGWPVGGYPGPQGPYYCAVGSDKSFGRDISDAHYKACLYAGIEISGTNGEVMPGQWEYQVGPSVGIDAGDHIWASRYILERITEQAGVVLTLDPKPIQGDWNGAGCHTNYSTLSMREDGGFDVIKKAILNLSLRHDLHIAAYGEGNERRLTGLHETASISDFSWGVANRGCSIRVGRDTEAKGKGYLEDRRPASNMDPYTVTALLAETTILWEPTLEAEALAAKKLALKV

SEQ ID NO: 21049 - DNA, 1335 bp, Bacillus subtilis
  CDS (1)..(1335)
atggcaaagtacactagagaagatatcgaaaaattagtaaaagaagaaaacgtgaagtatatccgccttcaatttactgacattcttggaacaatcaagaatgttgagattcctgtaagccagcttggaaaagcgcttgataataaagtcatgtttgacggttcttctattgagggattcgttcgtatcgaagagtcagacatgtacctgtatccagatctaaatacatttgttatcttcccatggacagctgaaaaaggtaaagtagcacgtttcatctgtgatatttacaatccggatggcacaccttttgaaggtgacccgcgaaacaacttaaaacggattctgaaagaaatggaagacctcggcttcagtgattttaaccttgggcctgagcctgaattcttcttattcaaattggacgaaaaaggcgagccgacgcttgaactaaacgacaaaggcggatatttcgacttagctccaactgatttaggagaaaactgccgccgcgatatcgtacttgagcttgaagagatgggctttgaaatcgaagcgtctcaccacgaagtagcacctggtcagcacgaaatcgactttaaatatgctggagcagtccgctcttgtgatgacatccaaacatttaaactagttgtcaaaacaattgcccgtaaacacggcctgcatgcgacatttatgccaaaaccattgttcggtgtaaacggttcaggtatgcactgcaatctatcactcttcaaaaatggtgttaacgcattctttgacgaaaacgcagatcttcagttaagtgaaacagcgaagcacttcattgcaggtatcgtgaagcacgcaacaagctttacagcagtaacaaacccgacagtaaactcttacaaacgtcttgttcctggctatgaagcaccttgttatgtagcatggagcgcgcaaaacagaagcccgcttatccgtatcccggcttctcgcggcatcagcacacgtgttgaagtacgcagtgtagacccagctgcaaacccataccttgcacttagcgtattgcttgctgcaggattagacggaatcaaaaacaaactggaagcgccggctccaatcgaccgcaacatctatgtgatgagcaaagaagagcgcatggaaaacggaatcgttgaccttccagcaacacttgcggaagcactagaagaattcaaatcaaacgaagtcatggtcaaagcgctgggcgagcacctattcgaacacttcatcgaagcaaaagaaatcgaatgggatatgttccgcacgcaagtacatccttgggaacgcgaacagtatatgtctcagtattaa

SEQ ID NO: 21050 - protein, 444 aa, Bacillus subtilis
MAKYTREDIEKLVKEENVKYIRLQFTDILGTIKNVEIPVSQLGKALDNKVMFDGSSIEGFVRIEESDMYLYPDLNTFVIFPWTAEKGKVARFICDIYNPDGTPFEGDPRNNLKRILKEMEDLGFSDFNLGPEPEFFLFKLDEKGEPTLELNDKGGYFDLAPTDLGENCRRDIVLELEEMGFEIEASHHEVAPGQHEIDFKYAGAVRSCDDIQTFKLVVKTIARKHGLHATFMPKPLFGVNGSGMHCNLSLFKNGVNAFFDENADLQLSETAKHFIAGIVKHATSFTAVTNPTVNSYKRLVPGYEAPCYVAWSAQNRSPLIRIPASRGISTRVEVRSVDPAANPYLALSVLLAAGLDGIKNKLEAPAPIDRNIYVMSKEERMENGIVDLPATLAEALEEFKSNEVMVKALGEHLFEHFIEAKEIEWDMFRTQVHPWEREQYMSQY

SEQ ID NO: 21051 - DNA, 2352 bp, Bacillus cereus
  CDS (860)..(2194)
atgcatccccgattaattctcacttcactccatatgctaactatatgccggggtatgaagatgatgtaattatggctgcgggaacttttattcaaggtgcaagtattgaattgtcagctgatggtccaattcgtccgccttatgttgcttacgtacaaggtgggctaacttattcgcatgtgaagattgcgatctgttctgcaattgatgcattaattgaaaaagaattattaacaatttcttaaagggaagctgtcgatttcgacagctttttttcgtgtgaaagtaatgatttattgcattagaaaaaagaatgaaaaaacttttaaaaaaatcatgtaagaaaagctaacatctattgacatcaaacataacatggtataaaatgagaagcagttaaggcgaaggaggaactgaaacgatgaaagaagatagacgttctgccccgctgtttcctattggtattgttatggatttaacacaattatctgcacgtcaaattcgctactatgaagagcataatcttgtttctccaacccgtacaaaggggaatcgtagattattttcatttaacgatgtagataagttgttagagattaaagatttattagatcaaggcttgaatatggctggtattaaacaagtgttactaatgaaagaaaatcaaacagaagcagtgaaagtaaaagaagaaacgaaagaaatttcaaaaactgagcttcgcaaaatacttcgagacgaactacaacatacaggtagatttaatcgaacttcattgcgacaaggtgatatttcaaggttttttcactaaagagaactgattctgaaggtgtttagagggactaaggaggaatttataatggctaggtacacaaaagaagatattttccgtttggcgaaagaagagaatgtaaagtatatacgtttacaatttacggaccttttaggagtaattaagaacgtagaaattccagtgagccaattaacaaaagctcttgataacaaaatgatgtttgatggatcttctattgaaggtttcgtacgtattgaagaatctgatatgtacttatatccagacttagatacttgggtgattttcccttggacagctgaaaaaggtaaagtagctcgattgatctgtgatatttacaatgcagatggcactccatttgaaggggatccacgtaacaacttaaaacgtgtattaaaagaaatggaagctttaggattctcagatttcaatcttggaccagagccagaattcttcctattcaaagtagatgaaaaaggaaatccaacattagaattaaacgataacggtggatacttcgaccttgcgccgatggatctaggggaaaactgtcgtcgtgatatcgttcttgaacttgaagaaatgggctttgaaattgaagcgtctcaccatgaggttgctccagggcagcacgaaattgacttcaaatatgcaaatgcaattcgttcatgtgatgacattcaaacattcaaacttgttgtaaaaacaattgctcgtaaacacggtttacacgcaacatttatgccaaaaccattatacggtgtgaacggttcaggtatgcactgtaacttatcactattcaaaaatggtgagaacgtattctatgatcaaaacggtgacttacaattaagtgatgatgctcgtcacttcatcgcaggtattttaaaacacgcaccagcatttacagcggtggcaaacccaactgtaaactcttacaagcgtttagtacctggatacgaagctccttgttacgtagcatggtctgcacaaaaccgtagtccattagtacgtatccctgcatctcgtggtattagtacacgcgtagaagtacgtagtgttgacccagctgcaaacccatatttagtaatggctacattattagcagcaggtcttgatggaattaaaaacaaattaactccaccagctgcagtagatcgtaacatctacgtaatgacaaaagaagagcgcgaagaagcaggtatcgttgacttaccagcaacattagcgcaagctttagttacattacaatctaacgaagtaattagtaacgcattaggagatcacttacttgagcacttcatcgaagcgaaagaatttgagtgggatatcttccgtacgcaagttcaccaatgggaacgcgatcaatatatgtctctttactaagaggtgaggtgaggagccctgatactacggtatcagggcttttttatttgttggcaatataggtgttagttgaaatgaattgaatagatgtctgaaaaaattatgacggtatttaaatttctattccatatctttaatgtaacgtggtgaaattcgaa

SEQ ID NO: 21052 - protein, 444 aa, Bacillus cereus
MARYTKEDIFRLAKEENVKYIRLQFTDLLGVIKNVEIPVSQLTKALDNKMMFDGSSIEGFVRIEESDMYLYPDLDTWVIFPWTAEKGKVARLICDIYNADGTPFEGDPRNNLKRVLKEMEALGFSDFNLGPEPEFFLFKVDEKGNPTLELNDNGGYFDLAPMDLGENCRRDIVLELEEMGFEIEASHHEVAPGQHEIDFKYANAIRSCDDIQTFKLVVKTIARKHGLHATFMPKPLYGVNGSGMHCNLSLFKNGENVFYDQNGDLQLSDDARHFIAGILKHAPAFTAVANPTVNSYKRLVPGYEAPCYVAWSAQNRSPLVRIPASRGISTRVEVRSVDPAANPYLVMATLLAAGLDGIKNKLTPPAAVDRNIYVMTKEEREEAGIVDLPATLAQALVTLQSNEVISNALGDHLLEHFIEAKEFEWDIFRTQVHQWERDQYMSLY

SEQ ID NO: 21053 - DNA, 1122 bp, Gallus gallus (chicken)
  CDS (1)..(1122)
atggccacctcggcgagctcccacctgagcaaagccatcaagcacatgtacatgaagctgccgcagggtgagaaggtccaagccatgtacatctggatcgacgggactggggagcacctccgctgcaaaacccgcactctggaccacgaacccaagagcctggaagatctccccgagtggaactttgatggctccagcaccttccaagccgaaggctccaacagcgacatgtacctgcgacctgctgccatgttccgggacccttttcgcaaggatcccaacaaattagttctctgtgaggtcttcaaatacaaccgccagtctgcagacacaaatcttcggcacacctgtaggcggattatggatatggtgtccaaccagcacccctggtttgggatggagcaggagtacacccttctgggaacagatggtcatccgtttggctggccttccaattgcttccctggaccccaaggtccgtactactgcggtgtaggagctgacaaagcctatggcagagacattgtggaggcccactaccgagcgtgcctgtatgctggtgtgaaaattggaggaaccaacgcagaagtgatgccagcccagtgggagttccaggtgggaccgtgcgaagggattgagatgggggatcacctctggatagcacgtttcatcctccaccgggtgtgcgaagactttggtgtcattgtgtccttcgatcccaaacccatccctgggaactggaacggtgctggctgtcacaccaacttcagcaccaagaacatgagggaagatggaggtctcaagcacatcgaggaggccatcgagaagctgagcaagcgccaccagtaccacatccgtgcctacgaccccaaaggagggctggacaacgcccggcgcctgacgggcttccacgagacgtccagcatccacgagttctccgccggcgtggccaaccgcggcgccagcatccgcatcccacgcaacgtgggccatgagaagaaaggctacttcgaggaccgcgggccttcagccaactgcgatccctacgccgtgacggaggccctggtccgtacgtgtctcctcaacgaaaccggggacgagccttttgagtacaagaactaa

SEQ ID NO: 21054 - protein, 373 aa, Gallus gallus (chicken)
MATSASSHLSKAIKHMYMKLPQGEKVQAMYIWIDGTGEHLRCKTRTLDHEPKSLEDLPEWNFDGSSTFQAEGSNSDMYLRPAAMFRDPFRKDPNKLVLCEVFKYNRQSADTNLRHTCRRIMDMVSNQHPWFGMEQEYTLLGTDGHPFGWPSNCFPGPQGPYYCGVGADKAYGRDIVEAHYRACLYAGVKIGGTNAEVMPAQWEFQVGPCEGIEMGDHLWIARFILHRVCEDFGVIVSFDPKPIPGNWNGAGCHTNFSTKNMREDGGLKHIEEAIEKLSKRHQYHIRAYDPKGGLDNARRLTGFHETSSIHEFSAGVANRGASIRIPRNVGHEKKGYFEDRGPSANCDPYAVTEALVRTCLLNETGDEPFEYKN

SEQ ID NO: 21055 - DNA, 2192 bp, Clostridium acetobutylicum
  misc_feature (2171)..(2171): n is a, c, g, or t
  CDS (396)..(1727)
cgtctcgtgacttcgttttttttgtaaatttatgcattatttataaaattttttcattacaatattatatacaaaattacagaatggagcatagtataatgttaaataaaatttatataataaaggatatatattgtaataaaaaatgagactataaatttttaaaatggaaaaataatcctgataactttagaatctaaagaaaaacgtatcaaattatttatattgtaaagtttttagtacgaaaatatttatttactaaaaaaatcacttgatttcttaaaaaaaagggaagtataatttagttattatatgaattgagcaaaggcgttcgatagaagtttatacttgtctattgtgcgctttttttaaaaatgtaaagggggagttgtaaaatggcaaaatacacaaaggaagatatcattaatttagtaaaagaaaacggcgtaaaatttataagacttcaatttactgatatctttggaacattaaagaatgtggcgattacagacaaacaattggaaaaagcattagataatgaatgtatgtttgatggatcatctattgatggttttgttagaattgaagaatcagacatgaatttaagacctaatttagatagttttgttatttttccatggagaccacaacaaggcaaagttgcaagattaatttgtgatgtatataagccagatggtacaccatttgaaggagatccaagacatgtcctaaagagagcaaatgcagatgcaaaagaattaggatatacaatgaatgttggaccagaatgtgaattcttcttatttgaaacagatgaaaatggcagagcaacaactaatactcaagataaagctggatattttgatttagcacctacagatttaggagaaaatgctagaagagacatgactttagctttagaagaaatgggattcgaaattgaagcatctcatcatgaagttgctgagggtcaaaatgaaattgactttaagtatggagatgcattaactacagctgataatattatgacatttaaactagttgttaaatctattgcacaaagacatggattacatgcatcgtttatgccaaaaccaatattcggaattaatggttctggaatgcatgtaaatatgtcattattcaaagatggaaaaaatgcttttgttgatgaaaatgataaaaatggattaagtaaagttgcttatcaatttatcgctggattattaaagaacattaaaggaatggctgctgtaactaatccattagttaactcatataagagattagtaccaggatatgaagcaccagtatatctagcttggtcttgcaaaaacagaacagcattaataagagtaccagcagctagaggtgcagggactagagtagaattaagatgtccagatccaagttctaatccatatttagtattagcatgtttattacaagcaggattagatggaattaaaaataatttacaaccacctgctgaagttgaagcaaacatttttgcaatgactgagcaagaaagaaaagaaaatggaattgataatctgccaaacaatttatatgaagcagtaaattacatgaaagaaaatgaattagctaaaaaagctttaggagatcatgtatatggaaattatgttgcaggaaaagcagcagaatgggatgattacagaacaaaagtacatgattgggaattagagaattatctaaataaatactaaggcacaatcaaaaaaataatggaccagtatgcttgtctgttttgcttcatactgcgtcggaactttcagttaattgcttgctatgagctaaaagttcctacttccatgacacaaaatatacgtcgcatctttggtctattattttctttcatgtgcctaatctagtaatgtaattacttttagttaaggcggggattgcaatggtccaaagtgaaaaaggaaaacttattatagcattaagcaatgttgagatagcaaaaaaattaaaaacttcgtaacgcaagaagggtttgatatcatagccctatgtacttcaggaaatgaattaattagattagttatgcaatattccccagacctggttttagtaggatataagtttaaggacatgagtttactggatgtgtatgaaaacttagtagatttaactagctttttggctantgtaaatgagccatatagatc

SEQ ID NO: 21056 - protein, 443 aa, Clostridium acetobutylicum
MAKYTKEDIINLVKENGVKFIRLQFTDIFGTLKNVAITDKQLEKALDNECMFDGSSIDGFVRIEESDMNLRPNLDSFVIFPWRPQQGKVARLICDVYKPDGTPFEGDPRHVLKRANADAKELGYTMNVGPECEFFLFETDENGRATTNTQDKAGYFDLAPTDLGENARRDMTLALEEMGFEIEASHHEVAEGQNEIDFKYGDALTTADNIMTFKLVVKSIAQRHGLHASFMPKPIFGINGSGMHVNMSLFKDGKNAFVDENDKNGLSKVAYQFIAGLLKNIKGMAAVTNPLVNSYKRLVPGYEAPVYLAWSCKNRTALIRVPAARGAGTRVELRCPDPSSNPYLVLACLLQAGLDGIKNNLQPPAEVEANIFAMTEQERKENGIDNLPNNLYEAVNYMKENELAKKALGDHVYGNYVAGKAAEWDDYRTKVHDWELENYLNKY

SEQ ID NO: 21057 - DNA, 1410 bp, Escherichia coli
  CDS (1)..(1410)
atgtccgctgaacacgtactgacgatgctgaacgagcacgaagtgaagtttgttgatttgcgcttcaccgataccaaaggtaaagaacagcacgtcactatccctgctcatcaggtgaatgctgaattcttcgaagaaggcaaaatgtttgacggctcctcgattggcggctggaaaggcattaacgaatccgacatggtgctgatgccagacgcatccaccgcagtgattgacccgttcttcgccgactccaccctgattatccgttgcgacatccttgaacctggcaccctgcaaggctatgaccgtgacccgcgctctattgcgaagcgcgccgaagattacctgcgttccactggcattgccgacaccgtactgttcgggccagaacctgaattcttcctgttcgatgacatccgtttcggatcatctatctccggttcccacgttgctatcgacgatatcgaaggcgcatggaactcctccacccaatacgaaggtggtaacaaaggtcaccgtccggcagtgaaaggcggttacttcccggttccgccggtagactctgctcaggatattcgttctgaaatgtgtctggtgatggaacagatgggtctggtggttgaagcccatcaccacgaagtagcgactgctggtcagaacgaagtggctacccgcttcaataccatgaccaaaaaagctgacgaaattcagatctacaaatatgttgtgcacaacgtagcgcaccgcttcggtaaaaccgcgacctttatgccaaaaccgatgttcggtgataacggctccggtatgcactgccacatgtcgctgtctaaaaacggcgttaacctgttcgcaggcgacaaatacgcaggtctgtctgagcaggcgctgtactacattggcggcgtaatcaaacacgctaaagcgattaacgccctggcaaacccgaccaccaactcttataagcgtctggtcccgggctacgaagctccggtaatgctggcttactctgcacgcaaccgttctgcgtctatccgtattccggtggtttcttctccgaaagcacgtcgtatcgaagtacgtttcccggatccggcggctaacccgtacctgtgctttgctgccctgctgatggccggtcttgatggcatcaagaacaagatccatccgggcgaagccatggacaaaaacctgtatgacctgccgccggaagaagcgaaagagatcccacaggttgcaggctctctggaagaagcactgaacgagctggatctggaccgcgagttcctgaaagccggtggcgtgttcacggatgaagcgatcgatgcgtacatcgctctgcgtcgcgaagaagatgaccgcgtgcgtatgactccgcatccggtagagtttgagctgtactacagcgtctaa

SEQ ID NO: 21058 - protein, 469 aa, Escherichia coli
MSAEHVLTMLNEHEVKFVDLRFTDTKGKEQHVTIPAHQVNAEFFEEGKMFDGSSIGGWKGINESDMVLMPDASTAVIDPFFADSTLIIRCDILEPGTLQGYDRDPRSIAKRAEDYLRSTGIADTVLFGPEPEFFLFDDIRFGSSISGSHVAIDDIEGAWNSSTQYEGGNKGHRPAVKGGYFPVPPVDSAQDIRSEMCLVMEQMGLVVEAHHHEVATAGQNEVATRFNTMTKKADEIQIYKYVVHNVAHRFGKTATFMPKPMFGDNGSGMHCHMSLSKNGVNLFAGDKYAGLSEQALYYIGGVIKHAKAINALANPTTNSYKRLVPGYEAPVMLAYSARNRSASIRIPVVSSPKARRIEVRFPDPAANPYLCFAALLMAGLDGIKNKIHPGEAMDKNLYDLPPEEAKEIPQVAGSLEEALNELDLDREFLKAGGVFTDEAIDAYIALRREEDDRVRMTPHPVEFELYYSV

SEQ ID NO: 21059 - DNA, 1448 bp, Phaseolus vulgaris (kidney bean)
  CDS (69)..(1139)
attgaaaggaagagaaagagaaaatttctctgtgaagagtctctgctgaaagttttggtttcttgaagatgtcatcaatctccgatcttgttaaccttaacctctctgactccaccgagagggtgatcgccgagtatatatgggttggtggatctggcatggacatgaggagcaaagcaagaactctctccggaccggttaaagacccttcaaaacttccaaagtggaactacgatggttccagcacaggtcaagctcctggacaagatagtgaagttatcttatacccacaaacaattttcagggatccattcaggaggggtaacaatatcctggttatgtgtgatgcttacactcctgctggggaacccatccctaccaataagagacataatgcggcaaagatatttagcaatcctgaagttgttgctgaagaaccctggtatggcattgagcaggaatataccttgttgcagaaagatgttcagtggcctgttggatggcctcttggtggttttcctgggccccagggaccatactattgtggtattggtgctaacaaggctttcgggcgtgatattgttgattcacattacaaagcatgtctttatgcgggcattaacataagtggaattaatggagaagtgatgcctggtcaatgggaattccaagttggtccatcagtaggcatctctgctgctgacgagttatgggttgcccgttacattttggagagaatcactgagattgctggagtggtgctttcgtttgaccctaaaccaattcagggtgattggaatggtgctggtgctcacacgaattacagtaccaagtccatgagaaacgatggtggctacgaagtcataaaaaaagcaatcactaagttggaaaagaggcacaaggagcacattgctgcttacggagaaggcaacgaacgtcgtttgacagggaaacacgagacagcagacatgaacaccttcatatggggtgttgcaaaccgtggtgcttctataagggtagggagagacacagagaaggcagggaagggatactttgaggataggaggcctgcatctaacatggacccttatgtcgtcacttccatgattgctgagacaacccttctttggaaaccatgagcaacctcaaaaacacaaccacagatggcttctacaatgcgtagttgcttgtaccttaggattgtcaatttgttcttctctctgttttgtgacctgcttgcctgttgttaggcattgtttgttagtggtactcactgccaagcgaggaattgttgcttcattccctcaatgaacgttttaagttgtagaataatgcaatggctttcaagtattagtgttgttgtttggttcgaatttcaagtattagtgtggttgtttggttcgaatttcaggtttttatttgactaaacaaaggcatgcgcatctctc

SEQ ID NO: 21060 - protein, 356 aa, Phaseolus vulgaris (kidney bean)
MSSISDLVNLNLSDSTERVIAEYIWVGGSGMDMRSKARTLSGPVKDPSKLPKWNYDGSSTGQAPGQDSEVILYPQTIFRDPFRRGNNILVMCDAYTPAGEPIPTNKRHNAAKIFSNPEVVAEEPWYGIEQEYTLLQKDVQWPVGWPLGGFPGPQGPYYCGIGANKAFGRDIVDSHYKACLYAGINISGINGEVMPGQWEFQVGPSVGISAADELWVARYILERITEIAGVVLSFDPKPIQGDWNGAGAHTNYSTKSMRNDGGYEVIKKAITKLEKRHKEHIAAYGEGNERRLTGKHETADMNTFIWGVANRGASIRVGRDTEKAGKGYFEDRRPASNMDPYVVTSMIAETTLLWKP

SEQ ID NO: 21061 - DNA, 1353 bp, Phaseolus vulgaris (kidney bean)
  CDS (116)..(1186)
agaatgtaactgtcatcaggggcttcagattcattcacttcaccctatcaagctttttcaccttttggtatcttctacaatatcctctcatactatctttttcctctttatcaccatgtctttgctttcagatctcatcaacctcaacctctcagaatccacagaaaagatcattgctgagtacatatgggttggtggatctggtatggacctcagaagcaaagccaggactcttcctggaccagtggatgaccctgcaaaacttccaaaatggaactatgatgggtctagcacagatcaagctcctggggatgacagtgaagtcatcctatacccacaagctattttcaaggacccctttaggagaggcaataatattcttgtgatttgtgatgtttacaccccagctggtgagccacttccaaccaacaagaggtatgatgctgccaaaattttcagtcaccctgatgttgttgcagaggtaccatggtatggaattgagcaagagtacaccttgttgcagaaagatgtgaattggccacttgggtggccacttggtgggtatcctgggccacagggaccctactactgtggagttggtgctgataaagcctatggtcgtgatattgtagatgcacattacaaagcttgtgtttatgcaggaattaacatcagtggcatcaatggagaggttatgcctggccagtgggaattccaagttggtccttctgttggcatctctgctggagatgaagtgtgggctgctcgctacattttggagaggattacagagttagcaggagcagttgtttcatttgatcccaagcctattccgggagattggaatggagctggagcacactcaaactatagcactaagtccatgagagaagagggtggttatgaggtgattaagaaagccattgaaaagcttggattgagacacaaagagcacattgcagcatatggaaaaggtaatgagagacgtctcacaggaagacatgaaactgcagacatcaacaccttttcttggggtgtggcaaaccgtggaagttcagttagagttggaagagacacagagaaacaagggaaaggttactttgaggacagaaggcctgcttctaacatggatccttatgtagtcacctccatgattgcagagaccaccattctctggaaaccatgaacatgtggttagaccactcaaaattgtgttttcaataccatttgattccacaatttggttatatctccaaggagttgttgtttttttaggtcttctaagccttctgtgttctctgatggttgaaaataacttctttaataacaagaattgattcttgagttcactct

SEQ ID NO: 21062 - protein, 356 aa, Phaseolus vulgaris (kidney bean)
MSLLSDLINLNLSESTEKIIAEYIWVGGSGMDLRSKARTLPGPVDDPAKLPKWNYDGSSTDQAPGDDSEVILYPQAIFKDPFRRGNNILVICDVYTPAGEPLPTNKRYDAAKIFSHPDVVAEVPWYGIEQEYTLLQKDVNWPLGWPLGGYPGPQGPYYCGVGADKAYGRDIVDAHYKACVYAGINISGINGEVMPGQWEFQVGPSVGISAGDEVWAARYILERITELAGAVVSFDPKPIPGDWNGAGAHSNYSTKSMREEGGYEVIKKAIEKLGLRHKEHIAAYGKGNERRLTGRHETADINTFSWGVANRGSSVRVGRDTEKQGKGYFEDRRPASNMDPYVVTSMIAETTILWKP

SEQ ID NO: 21063 - DNA, 1454 bp, Phaseolus vulgaris (kidney bean)
  CDS (123)..(1193)
ggctcacgtacgagttgaatctcaggattcagagagaaaaggagagagagagagagaaagagagattttttttttctgtgaagaagggtctttccttgtttcttcgtctcttcatttctaccatgtcgctgctctcagatctcatcaaccttaacctctccgacaccaccgagaaggtcatcgcagagtacatatggatcggtggatcaggattggatctaaggagcaaagcaaggactctcccaggaccagttaagaacccttcagagctgcctaagtggaactatgatggttccagcacaggtcaagcccctggacaagacagtgaagtgattatatacccacaagccattttcaaggatccattcagaaggggtaacaatatcttggttatttgtgatgcttacactccagctggagaacccattcccactaacaagaggcacaatgctgccaagatattcagcaatcctgatgttgttgctgaagaaccctggtacggtattgagcaggaatacaccttgttgcagaaagaagtgaactggcctgttgggtggcctgttggtggtttccctggacctcagggaccttactattgtggtgttggtgctgacaaggcttttgggcgtgacattgttgacgcacattacaaagcctgtgtctatgctggcatcaacatcagtggaattaatggagaggtgatgcctggtcagtgggaattccaagttggacctgcagttgggatctcagctggtgacgagttgtgggtagctcgttacatcttggagaggatcactgaggttgctggtgtggtgctttcctttgaccccaagccaatcaagggtgattggaatggtgctggtgctcacaccaactacagcaccaagaccatgagaaacgatggtggctatgaagaaatcaaatcagctatacagaaattggggaagaggcacaaggagcatatcgctgcttatggagaaggcaatgaacgccgtctgacaggacgacacgaaactgccgacatcaacaccttcctatggggagttgcaaaccgtggagcttctattagagttgggagggacacagagaaagcagggaagggttactttgaggacaggagacctgcttctaacatggacccctatgttgtcacttccatgattgcagacacaaccattctgtggaagccatgagcaacacctgcactttgtctcttctttcggatgaaacaaggaacactactacttgtgcttttctaagtaggatttggtcctttatttttcacctcttactttttaggatttggatttgtggtaattgctgtggttcgctctctgcttggagccttgttggttggtacaactaactaccaaggattcttcattgctttccatttctttcccatgttttcctattgttataataataataatatcattaataatcataataat

SEQ ID NO: 21064 - protein, 356 aa, Phaseolus vulgaris (kidney bean)
MSLLSDLINLNLSDTTEKVIAEYIWIGGSGLDLRSKARTLPGPVKNPSELPKWNYDGSSTGQAPGQDSEVIIYPQAIFKDPFRRGNNILVICDAYTPAGEPIPTNKRHNAAKIFSNPDVVAEEPWYGIEQEYTLLQKEVNWPVGWPVGGFPGPQGPYYCGVGADKAFGRDIVDAHYKACVYAGINISGINGEVMPGQWEFQVGPAVGISAGDELWVARYILERITEVAGVVLSFDPKPIKGDWNGAGAHTNYSTKTMRNDGGYEEIKSAIQKLGKRHKEHIAAYGEGNERRLTGRHETADINTFLWGVANRGASIRVGRDTEKAGKGYFEDRRPASNMDPYVVTSMIADTTILWKP

SEQ ID NO: 21065 - DNA, 1510 bp, Phaseolus vulgaris (kidney bean)
  CDS (64)..(1353)
ccactttccaagttccaacctttccccattttttctactctgtattgagcagaactgcagaacatggcacagattttggctccctctacacaatggcagatgagattcacaaaatcctctcgccatgcaagtcccattacatcaaacacgtggagttctttattgatgaaacaaaataagaaaaccagttctgctaaatttagagtgctggcagttaagtctgatggtagcaccatcaacaggctggagggtctacttaatttggatatcactccattcacggacaagataattgctgagtacatttggattggggggacaggaattgatgtgcgcagtaaatcaagaacaatatcaaagcctgttgaacatccctctgagcttcctaaatggaactatgatggatctagtactggacaggcacccggtgaagatagtgaagtaatcctatatcctcaggcaattttcaaagatcctttccgtggtggtaacaatattttggtcatttgtgatgcttacacacctgctggtgaacctatccctacaaataagcgacacagagctgctgaagttttcagtaacccaagggtcattgctgaagttccatggtttggaatagaacaagagtacaccttacttcaaacaaatgtgaactggcctttaggttggcctgttggtggctatcctggtcctcagggtccttattattgcagtgctggggcagataagtcatttggacgtgatatatctgatgctcactacaaggcttgcttatttgctggaattaacattagtggcaccaacggggaggttatgcctgggcagtgggagtatcaagttggtcctagtgtaggtattgaggctggtgatcatatctgggcatcaaggtacatcctcgagagaattactgaacaagctggtgttgtgctctctcttgatccaaaaccaatagagggtgactggaatggtgcaggatgccacaccaattacagtacaaagagcatgagggaagatggaggctttgaggtaataaagaaggcaattttgaatctatcacttcgccacaaagagcacattagtgcatatggagaaggaaatgaaagaaggttgacaggaaagcatgagacagcaagcattaacacattttcttggggagttgccaatcgtggttgctcaatccgtgtgggaagagacaccgagaagaatggcaaaggttacttggaggacaggcgccctgcttcaaacatggatccatatgtcgtgacatctttacttgcagagagtacactattgtgggagccaactctggaggctgaagctcttgcagctcagaagttagcattgaaggtctaaatttattgattgatggcattctggacggagcctgtagtttgtaaggagcttgaaagctctcgcactttccttttacatcattacttgtttggaccaaagaggttaccatgcccagttatattggttgtcatatgaaatgcacatcgtaatatcagaa

SEQ ID NO: 21066 - protein, 429 aa, Phaseolus vulgaris (kidney bean)
MAQILAPSTQWQMRFTKSSRHASPITSNTWSSLLMKQNKKTSSAKFRVLAVKSDGSTINRLEGLLNLDITPFTDKIIAEYIWIGGTGIDVRSKSRTISKPVEHPSELPKWNYDGSSTGQAPGEDSEVILYPQAIFKDPFRGGNNILVICDAYTPAGEPIPTNKRHRAAEVFSNPRVIAEVPWFGIEQEYTLLQTNVNWPLGWPVGGYPGPQGPYYCSAGADKSFGRDISDAHYKACLFAGINISGTNGEVMPGQWEYQVGPSVGIEAGDHIWASRYILERITEQAGVVLSLDPKPIEGDWNGAGCHTNYSTKSMREDGGFEVIKKAILNLSLRHKEHISAYGEGNERRLTGKHETASINTFSWGVANRGCSIRVGRDTEKNGKGYLEDRRPASNMDPYVVTSLLAESTLLWEPTLEAEALAAQKLALKV

SEQ ID NO: 21067 - DNA, 1421 bp, Cricetulus griseus (Chinese hamster)
  misc_feature (1)..(2): n is a, c, g, or t
  CDS (147)..(1268)
nnccgagccgagaatgggagtagagccgactgcttgattcccacaccaatctcctcgccgctctcacttcgcctcgttctcgtggctcgtggccctgtccaccccgtccatcatcccgccggccaccgctcagagcaccttccaccatggccacctcagcaagttcccacttgaacaaaaacatcaagcaaatgtacttgtgcctgccccagggtgagaaagtccaagccatgtatatctgggttgatggtactggagaaggactgcgctgcaaaacccgcaccctggactgtgagcccaagtgtgtagaagagttacctgagtggaattttgatggctctagtacctttcagtctgagggctccaacagtgacatgtatctcagccctgttgccatgtttcgggaccccttccgcagagatcccaacaagctggtgttctgtgaagttttcaagtacaaccggaagcctgcagagaccaatttaaggcactcgtgtaaacggataatggacatggtgagcaaccagcacccctggtttggaatggaacaggagtatactctgatgggaacagatgggcacccttttggttggccttccaatggctttcctgggccccaaggtccgtattactgtggtgtgggcgcagacaaagcctatggcagggatatcgtggaggctcactaccgcgcctgcttgtatgctggggtcaagattacaggaacaaatgctgaggtcatgcctgcccagtgggaattccaaataggaccctgtgaaggaatccgcatgggagatcatctctgggtggcccgtttcatcttgcatcgagtatgtgaagactttggggtaatagcaacctttgaccccaagcccattcctgggaactggaatggtgcaggctgccataccaactttagcaccaaggccatgcgggaggagaatggtctgaagcacatcgaggaggccatcgagaaactaagcaagcggcaccggtaccacattcgagcctacgatcccaaggggggcctggacaatgcccgtggtctgactgggttccacgaaacgtccaacatcaacgacttttctgctggtgtcgccaatcgcagtgccagcatccgcattccccggactgtcggccaggagaagaaaggttactttgaagaccgccgcccctctgccaattgtgacccctttgcagtgacagaagccatcgtccgcacatgccttctcaatgagactggcgacgagcccttccaatacaaaaactaattagactttgagtgatcttgagcctttcctagttcatcccaccccgccccagctgtctcattgtaactcaaaggatggaatatcaaggtctttttattcctcgtgcccagttaatcttgcttttattggtcagaatagaggagtcaagttctt

SEQ ID NO: 21068 - protein, 373 aa, Cricetulus griseus (Chinese hamster)
MATSASSHLNKNIKQMYLCLPQGEKVQAMYIWVDGTGEGLRCKTRTLDCEPKCVEELPEWNFDGSSTFQSEGSNSDMYLSPVAMFRDPFRRDPNKLVFCEVFKYNRKPAETNLRHSCKRIMDMVSNQHPWFGMEQEYTLMGTDGHPFGWPSNGFPGPQGPYYCGVGADKAYGRDIVEAHYRACLYAGVKITGTNAEVMPAQWEFQIGPCEGIRMGDHLWVARFILHRVCEDFGVIATFDPKPIPGNWNGAGCHTNFSTKAMREENGLKHIEEAIEKLSKRHRYHIRAYDPKGGLDNARGLTGFHETSNINDFSAGVANRSASIRIPRTVGQEKKGYFEDRRPSANCDPFAVTEAIVRTCLLNETGDEPFQYKN

SEQ ID NO: 21069 - DNA, 1910 bp, Azospirillum brasilense
  CDS (351)..(1757)
ggacggcaagatcttcgtcacccccgtggaagaagttgtccgcatccggaccggcgagaagggaggcgacgcgatctgatcgcgtcccgagaacccgaccaccggccaccatgaaccagccccgcccacaaccgacgcagagccggccgactccgatcgggccgacgcagaccgtcgcaacgcgagcggaacgatccgtgcgtggatgcccatccgggcgcgactttttgtgctgtcacgttgtgtgcttgggaaaggcatgacataacgtccgccgcgagcgccgtcacccgccccttggtcggtttgacgcagcgggacccaaacctcttaagcgtggaaaaagagatatgtccgacatcagcaaggtcttcgacctgatcaaggaacacgacgtcaagtacgtggacctccgcttcaccgacccgcgcggcaagctgcaccacaccgctcagcacgtctcgaccatcgacgaggacgtgtttgaagacggcatcatgttcgacggctcctcgatcgccggttggaaggcgatcaacgagtcggacatgatcctccagctcgacccgaccaccgccgtcatggacccgttctcggcccagccgacgctgaacatcctctgcgacgtgtacgagccgtcgaccggccagccctacgcccgctgcccgcgcggtatcgcgaaggccgccgagaagtacatggcgtcggccggcatcgcggacaccgcctacttcggcccggaagccgagttcttcgtcttcgacgacgtcaagttcaaggtcgagatgaacaaggtgtcctacgagttcgactcggaggaaggcccgtacacctcggacaaggactatgaggacggcaacctgggccaccgcccgggcgtcaagggcggctacttcccggtcgctccggtcgacagcggctcggacctgcgcgccgagatgctgagcgtgctcgccgagatgggcgtgccggtcgagaagcaccaccacgaggtggccgcttcgcagcatgagctgggcatcaagttcgacacgctggtccgcaccggcgacaacatgcagtactacaagtacgtcgtgcacaatgtcgcccacgcctacggcaagaccgcgaccttcatgccgaagcccgtcttcggcgacaacggctcgggcatgcacatgcaccagtcgatctggaaggaaggccagccgctgttcgccggcaaccagtacgccgacctgtcggaactggcgctgtactacatcggcggcatcatcaagcacgccaaggcgctgaacgccttcaccaacccgacgaccaactcgtacaagcgtctggtcccgggctacgaggctccggttctgctggcctactcggcccgcaaccgttcggcctcctgccgcatcccgtacgtcgcctcgccgaagggcaagcgcgtcgaggtccgcttcccggacccgtcggccaacccgtacctggccttcgccgccctgctgatggccggtctggacggcatccagaacaagatccatccgggcgaggcgatggacaagaacctgtacgacctgccggccgaagagctggccaaggttccgacggtttgcggctcgcgcgaggccctggacagcctgaaggccgacagcgccttcctgcagaagggcgacgtgttcaccaaggacatgatcgagtcctacatcgacctgcgcaccgaggagctgctggccttcgagaccatgccgcacccgatcgagtacaagatgtactactcggtctgatccatcggacttcggtccaccggattccggtgtccgccccgccctcgcgcgcggcgggcaccaccggagggccggaccgcggagcagagcacaaaaaaagcccacggcgacacgtcggtgggcttttttgtgtccaggagtgaagagatgcta

SEQ ID NO: 21070 - protein, 468 aa, Azospirillum brasilense
MSDISKVFDLIKEHDVKYVDLRFTDPRGKLHHTAQHVSTIDEDVFEDGIMFDGSSIAGWKAINESDMILQLDPTTAVMDPFSAQPTLNILCDVYEPSTGQPYARCPRGIAKAAEKYMASAGIADTAYFGPEAEFFVFDDVKFKVEMNKVSYEFDSEEGPYTSDKDYEDGNLGHRPGVKGGYFPVAPVDSGSDLRAEMLSVLAEMGVPVEKHHHEVAASQHELGIKFDTLVRTGDNMQYYKYVVHNVAHAYGKTATFMPKPVFGDNGSGMHMHQSIWKEGQPLFAGNQYADLSELALYYIGGIIKHAKALNAFTNPTTNSYKRLVPGYEAPVLLAYSARNRSASCRIPYVASPKGKRVEVRFPDPSANPYLAFAALLMAGLDGIQNKIHPGEAMDKNLYDLPAEELAKVPTVCGSREALDSLKADSAFLQKGDVFTKDMIESYIDLRTEELLAFETMPHPIEYKMYYSV

SEQ ID NO: 21071 - DNA, 1205 bp, Frankia sp
  CDS (59)..(1117)
cccaggccgatcacgaagtcgcaccgtttcgtgcaggaccaaccacggggagtattgaatgagttatcaggccgagtacatctggatcgacggcaccgagcccgagcctttgatgcgtagcaagacgcgcatcatcaaggacggcaaggagccggagatctggggcttcgacggctcgagcaccaaccaggcgccgggatcgaactcggactgcgtgctgcgtcccgtcttcgagacgcccgacccgatccggggaggcgacaaccgcctggtgctgtgcgaggtccagctgaccgacttcacgccaccgacgaacacccgggcggccgccctcggtgtcgccgagcggtacgccgacatgtcgcccatgttcggcatcgagcaggagtacaccttcttcaaggacggccgcccgtacggctggccggaggtcggctaccccgcgccgcagggtccgtactactgcggcgtcggcggctcgaagatgcccggtcgccagatcgtcgagcggcacacccaggcatgcctcgacgccggcctcgccatcgagggcaccaacgccgaggtcatgatgggccagtgggagttccagatcggcgtcctgcccgcgcccgccatcggcgaccagatctggttgggccgctggctgctccaccggatcgccgaggactacggcgtcgaggtgtccttcgccgcgaagccgatccccggtgactggaacggtgccggcgcgcacaccaacttctccaccaagcagacgatggagggctgggacgccatcgtcacgtgctgcgaggcgctcggcacgcgcgtcaccgagcacgtcacccactacgggaagggcatcgaggaccggctgaccggcaagcacgagaccgccccctggaacaagtactcctggggcgcctcggaccgcggcgcctcggtccgcatcccctgggccgtcgagaaggccaagaagggctggctggaggaccgtcgtccgaacgcgaacatggacccgtacctggtcaccgcgctcatgatcgacacctgctgcagcgccctggccggcgacaagccgaccctgttcgtgccgtcacagaccactccggcgcccgccgaggcgagcgtctgagcctgaccgacacgtctgcccggaccggtcggccgagcagtccgccgggccggaaacacgccggcgcggcggaggcaggcaggtcgac

SEQ ID NO: 21072 - protein, 352 aa, Frankia sp
MSYQAEYIWIDGTEPEPLMRSKTRIIKDGKEPEIWGFDGSSTNQAPGSNSDCVLRPVFETPDPIRGGDNRLVLCEVQLTDFTPPTNTRAAALGVAERYADMSPMFGIEQEYTFFKDGRPYGWPEVGYPAPQGPYYCGVGGSKMPGRQIVERHTQACLDAGLAIEGTNAEVMMGQWEFQIGVLPAPAIGDQIWLGRWLLHRIAEDYGVEVSFAAKPIPGDWNGAGAHTNFSTKQTMEGWDAIVTCCEALGTRVTEHVTHYGKGIEDRLTGKHETAPWNKYSWGASDRGASVRIPWAVEKAKKGWLEDRRPNANMDPYLVTALMIDTCCSALAGDKPTLFVPSQTTPAPAEASV

SEQ ID NO: 21073 - DNA, 1429 bp, Lactuca sativa (garden lettuce)
  CDS (16)..(1092)
catcaattcgatctcatggctcttctttcggatctcgtcaacctcgacctctctagtatcaacgataagattatcgccgagtatatatggatcggcggatcgggtatggatcttagaagcaaagcaagaacaatttcaaggcctgtgtcggatcccagtgagcttccgaagtggaactacgatggctctagcacagggcaagctcccggagaagacagtgaagtcatcatataccctcaagcaatcttcaaagatccattcaagagaggcaaccatatcttggtgatgtgtgatgcttacactcccgccggcgaaccaatccccaccaacaagagggccgccgccgccaaaatcttcagcaacccagaagtcgaaaaggaggttacatggtacggaattgagcaagaatacaccttgttgcagaaggacaccaactggccattgggttggcctctaggtggtttccctggtccacagggcccatactactgtggaattggcgctgataaagcttttggacgtgatattgttcatgcacactacaaagcttgcctttacgctggcgtcaacattagcggcatcaatggcgaagttatgcctggacaatgggaatttcaagtaggaccttccgtaggcatagctgcagctgatcaaatctgggtcgctcgttacattcttgagaggatcactgagatttatggggtggtggtttcatttgaccccaagcctattccgggtgactggaatggagctggtgctcacacaaattacagtacaaaaaccatgagggaagagggaggatatgaggtgatcaagaaagctatcgagaagttgggattgaggcacaaggaacacattgctgcatatggtgaaggcaatgaacgtaggctcactggtcgacatgaaacagctgatatcaacacctttttatggggtgttgcaaaccgtggagcttctattcgtgttggaagagacacagagaaagaagggaaaggttactttgaggacagaaggccagcttcaaacatggatccatatgtcgtgacttccatgattgctgagactaccattctgtgggacaacaaatcttgaaaagagtatcgaaaattgatgaagcactgattgggagggagatttgaaaaaattgaaattagaatggggaacaaacaaaacacccttcttgtttattttcttgaaaattagatattgttcttgtttgtttgtgttgcatgttgacgttatggttattatggtatggtagtttgtgtttcatgtttcttgtagcaaagcattttgagtccaaaatgcatgtaaagctactacttgatttgagatttctcccatggtgattcatgggaatattgtcgatattgtctatgataataacaaatatgaagggttgatttttatccaaaaaaaaaaaaaaaaa

SEQ ID NO: 21074 - protein, 358 aa, Lactuca sativa (garden lettuce)
MALLSDLVNLDLSSINDKIIAEYIWIGGSGMDLRSKARTISRPVSDPSELPKWNYDGSSTGQAPGEDSEVIIYPQAIFKDPFKRGNHILVMCDAYTPAGEPIPTNKRAAAAKIFSNPEVEKEVTWYGIEQEYTLLQKDTNWPLGWPLGGFPGPQGPYYCGIGADKAFGRDIVHAHYKACLYAGVNISGINGEVMPGQWEFQVGPSVGIAAADQIWVARYILERITEIYGVVVSFDPKPIPGDWNGAGAHTNYSTKTMREEGGYEVIKKAIEKLGLRHKEHIAAYGEGNERRLTGRHETADINTFLWGVANRGASIRVGRDTEKEGKGYFEDRRPASNMDPYVVTSMIAETTILWDNKS

SEQ ID NO: 21075 - DNA, 1434 bp, Pisum sativum (garden pea)
  CDS (83)..(1150)
cgcatagaatctgaggattcatcatccaacgatccacagtgattcaatttcaagtttcttttttcttcactttttcaaaaccatgtctctttcagatctcatcaaccttgatctctcaggaaccaccgagaaaatcatagcagaatacatatggattggtggttctggtttggacttgaggtgcaaagcaaggactcttcccggaccagttactgacccttcagagctccccaagtggaattatgatggttccagcacaggacaagctcctggacaagatagtgaagttatcttatacccacaagccatttttaaggatccattcagaaggggtaaccatatcttggttatgtgtgatgcatacagtcctgctggagaaccaattcccactaacaaaagacacgcagctgctaaggtttttagccatcctgatgttgttgctgaagaaacatggtatggtatagagcaggaatacaccttgttgcagaaagacatcaattggcctcttggttggccagctggtggttatcctggacctcagggaccatattattgcagtgttggtgctgacaaggcttttggccgtgacgttgttgaggcacattacaaagcctgtctttttgccggcatcaacatcagtggaatcaatggagaagtcatgcctggtcaatgggaatttcaagttggtccctcagtcggtatctctgctggtgatgagatatgggttgctcgctacattttggagaggatcactgaggttgctggtgtggttcttacctttgaccctaaaccaattaagggtgactggaatggtgctggtgctcacacaaactacagcaccaagtctatgagagaagacggtggatatgaaatcatcaagaaagcaattgagaagctcgggaagaggctgcccgagcacatctccgcttatggagaaggcaacgagcgcagattgacagggaaacacgaaacagctgacattaataccttctcatggggtgttgcaaaccgaggcgcttcggttcgggttggaagggacacagagaaagaagggaagggttattttgaggacaggaggccagcatctaacatggacccatacgttgttacttccatgattgcagagactaccatcctcttgaaaccataagctaccacttgtaccacaaaaaacttatactacattgtattgcaacctttgagagtcattgttggttcctcgttagagattggttcttggtttttctaggacatggctttgtgttcttgttatggttcacacgttgtttgtttctttctcttgttttacttatgtgtcacaataataatgtaatggttatcagtataataattattgttgattgtgattattaataaaaatgtatgaattgaaaatgcccatgataatgaatatgaatgagggtgtctttgtag

SEQ ID NO: 21076 - protein, 355 aa, Pisum sativum (garden pea)
MSLSDLINLDLSGTTEKIIAEYIWIGGSGLDLRCKARTLPGPVTDPSELPKWNYDGSSTGQAPGQDSEVILYPQAIFKDPFRRGNHILVMCDAYSPAGEPIPTNKRHAAAKVFSHPDVVAEETWYGIEQEYTLLQKDINWPLGWPAGGYPGPQGPYYCSVGADKAFGRDVVEAHYKACLFAGINISGINGEVMPGQWEFQVGPSVGISAGDEIWVARYILERITEVAGVVLTFDPKPIKGDWNGAGAHTNYSTKSMREDGGYEIIKKAIEKLGKRLPEHISAYGEGNERRLTGKHETADINTFSWGVANRGASVRVGRDTEKEGKGYFEDRRPASNMDPYVVTSMIAETTILLKP

SEQ ID NO: 21077 - DNA, 1540 bp, Pisum sativum (garden pea)
  CDS (68)..(1360)
gctcattctcacttgaacccattttcaacctttgctgtttttgccatttttcaactctgtattgaaaatggcgcagattttggcaccttcgacgcaatggcagatgagaatcacaaaaacctctccttgtgcaactccaatcacatcaaagatgtggagttctttggttatgaaacaaactaagaaagttgcgcattctgctaaatttagagttatggcagtcaactctgaaaatggcaccatcaatagggtagaggatttgcttaatttggacatcactccgttcaccgacagcattattgctgagtacatatggattggtgggacaggaattgatgtgcgcagcaaatcaaggaccatatcaaagcctgtttcgcatccctctgaggttcctaagtggaactatgatggatctagcactggacaagcccctggtgaagatagtgaagtgatcctatatcctcaagcaattttcaaagatcctttccgtggcggaaacaatattttggtcgtttgtgatgcgtatacaccagcaggtgagcctatccctacaaataagagacacagagctgctgaaatcttcagtaacccaaaggttgaggctgagattccatggtatggaatagaacaagagtacactttacttcaaacaaatgtgaaatggccattaggttggcctgtaggtggctatcccggtcctcagggtccttattactgtgctgccggagcagataagtcatttggacgtgatatatctgatgctcattacaaggcttgcatatatgctggaattaacattagtggcaccaatggagaagttatgcctggacagtgggagtatcaagttggtcctagtgtaggtattgaagctggtgatcatatctgggcttcacggtacatccttgagagaattactgaacaagctggtgttgtgctcactcttgatccaaaaccaatagagggtgattggaatggtgcaggatgtcacaccaattacagtacaaagagcatgagggaagatggagggtttgaggtgataaagaaggccattttgaacctttcccttcgccacaagatccacattgaagcatacggagaaggaaacgaaagaaggttgacaggaaagcatgagacagccagcattaacgacttttcttggggagtggctaaccggggatgctcaatccgtgtgggaagagacaccgagaagaatggcaaaggttacttggaagacaggcgtccggcttcgaacatggatccatatgtggtaacagcattactggcagaaagtacattattgtgggaaccaactctagaggctgaagctcttgcagctcagaagattgcattaaaggtctaaatctattgacttccagatggaggctgtgaggaactgagaagctgttttagatgatttatattatattatgaagatcttgttttctggactcgccatgcctagttactggttatgagatgagtgcacattgtatttgcatatatggtatggacagaattgcattgatgatttgctttggtt

SEQ ID NO: 21078 - protein, 430 aa, Pisum sativum (garden pea)
MAQILAPSTQWQMRITKTSPCATPITSKMWSSLVMKQTKKVAHSAKFRVMAVNSENGTINRVEDLLNLDITPFTDSIIAEYIWIGGTGIDVRSKSRTISKPVSHPSEVPKWNYDGSSTGQAPGEDSEVILYPQAIFKDPFRGGNNILVVCDAYTPAGEPIPTNKRHRAAEIFSNPKVEAEIPWYGIEQEYTLLQTNVKWPLGWPVGGYPGPQGPYYCAAGADKSFGRDISDAHYKACIYAGINISGTNGEVMPGQWEYQVGPSVGIEAGDHIWASRYILERITEQAGVVLTLDPKPIEGDWNGAGCHTNYSTKSMREDGGFEVIKKAILNLSLRHKIHIEAYGEGNERRLTGKHETASINDFSWGVANRGCSIRVGRDTEKNGKGYLEDRRPASNMDPYVVTALLAESTLLWEPTLEAEALAAQKIALKV

SEQ ID NO: 21079 - DNA, 1169 bp, Oryza sativa (rice)
  CDS (59)..(1132)
ttctacacctcattttccgcttgcatcttgctcattcagatctcttctgctttgagcaatggccaacctcaccgacctcgttaacctcaacctcagcgactgcagcgacaagatcatcgccgagtacatctgggttggaggatcgggcatagacctcaggagcaaagcgaggactgtgaaaggccccatcaccgatgtgagccagctgccgaagtggaactacgacggctccagcaccgggcaggctcccggcgaggacagcgaagtgatcctctaccctcaagccattttcaaggacccgttcaggaggggcgacaacatccttgtgatgtgcgactgctacacgccacaaggtgagccaatccccactaacaagaggcacagtgccgccaagatcttcagccaccctgatgttgttgctgaggtgccatggtacggtattgagcaggagtacacactccttcaaaaggatgtgaactggccccttggctggccagttggtggcttccctggcccacagggaccatactactgcgctgccggtgccgaaaaggcgttcggccgcgacatcgtggacgcccactacaaggcctgcatctacgccgggatcaacatcagtggcatcaacggggaagtcatgcccggccagtgggagttccaagttggcccgtcagttggcatcgccgctgctgaccaagtgtgggttgcccgctacatcctcgagagggtcacagaggtggccggagtcgtgctctcccttgacccgaagccgatcccgggtgactggaatggcgctggtgcccacaccaacttcagcaccaagtcgatgagggagccgggaggctacgaggtgatcaagaaggcgatcgacaagctcgcgctgaggcacaaggagcacatcgccgcctacggcgagggcaacgagcgccgcctcaccggccgccacgagaccgccgacatcaacaccttcaaatggggcgtggcgaaccgcggcgcgtccatccgcgtggggcgcgacacggagaaggagggcaaggggtacttcgaggacaggaggccggcgtccaacatggacccatacgtcgtcaccggcatgatcgccgagaccacgctgctgtggaagcagaactaagccgtccggcgggcctctcccgtgcatttctgcgccc

SEQ ID NO: 21080 - protein, 357 aa, Oryza sativa (rice)
MANLTDLVNLNLSDCSDKIIAEYIWVGGSGIDLRSKARTVKGPITDVSQLPKWNYDGSSTGQAPGEDSEVILYPQAIFKDPFRRGDNILVMCDCYTPQGEPIPTNKRHSAAKIFSHPDVVAEVPWYGIEQEYTLLQKDVNWPLGWPVGGFPGPQGPYYCAAGAEKAFGRDIVDAHYKACIYAGINISGINGEVMPGQWEFQVGPSVGIAAADQVWVARYILERVTEVAGVVLSLDPKPIPGDWNGAGAHTNFSTKSMREPGGYEVIKKAIDKLALRHKEHIAAYGEGNERRLTGRHETADINTFKWGVANRGASIRVGRDTEKEGKGYFEDRRPASNMDPYVVTGMIAETTLLWKQN

SEQ ID NO: 21081 - DNA, 1287 bp, Oryza sativa (rice)
  CDS (1)..(1287)
atggcgcaggcggtggtgccggcgatgcagtgccaggtcggggccgtgcgggcgaggccggcggcggctgcggcggcggcgggggggagggtgtggggagtcaggaggaccgggcgcggcacgtcggggttcagggtgatggccgtgagcacggagaccaccggggtggtgacgcggatggagcagctgctcaacatggacaccacccccttcaccgacaagatcatcgccgagtacatctgggttggaggaactggaattgacctcagaagcaaatcaaggacaatatcaaaaccagtggaggacccctcggagctaccaaaatggaactacgatggatcaagcacagggcaagctccaggagaagatagtgaagtcatcttatacccacaggctatattcaaggacccatttcgaggtggcaacaacatattggttatgtgtgatacctacacaccagctggggaacccatccctactaacaaacgtaacagggctgcacaagtattcagtgatccaaaggttgtcagccaagtgccatggtttggaatagaacaggagtacactttgctccagagagacgtaaactggcctcttggctggcccgttggaggctaccctgggccccagggtccatactactgcgctgtaggatcggacaaatcgtttggccgtgacatatcagatgctcactacaaggcatgtctttatgctggaattaacattagtggaacaaatggagaggtcatgcctggtcagtgggagtaccaggttggacctagtgtcggtattgaagctggagaccacatatggatttcaagatatattcttgagagaataacggagcaggctggtgtagtgcttacccttgaccccaaaccaattcagggagactggaatggagctgggtgccacacaaactacagcaccaagagtatgcgtgaagatggaggatttgaggtgatcaagaaggcaatcctaaacctatcacttcgccatgacttgcatataagtgcatatggtgaaggaaatgaaaggaggttgacaggtttacacgagacagctagcattgacaatttctcatggggtgtggcaaaccgtggatgctctattcgggtggggcgagacaccgaggcgaagggaaaaggctacttggaagaccgtcgcccggcatcaaacatggacccgtacgtcgtgacagcgctattggctgaaaccacaattctttgggagccaaccctcgaagcggaggttcttgctgctaagaagttggccctgaaggtatga

SEQ ID NO: 21082 - protein, 428 aa, Oryza sativa (rice)
MAQAVVPAMQCQVGAVRARPAAAAAAAGGRVWGVRRTGRGTSGFRVMAVSTETTGVVTRMEQLLNMDTTPFTDKIIAEYIWVGGTGIDLRSKSRTISKPVEDPSELPKWNYDGSSTGQAPGEDSEVILYPQAIFKDPFRGGNNILVMCDTYTPAGEPIPTNKRNRAAQVFSDPKVVSQVPWFGIEQEYTLLQRDVNWPLGWPVGGYPGPQGPYYCAVGSDKSFGRDISDAHYKACLYAGINISGTNGEVMPGQWEYQVGPSVGIEAGDHIWISRYILERITEQAGVVLTLDPKPIQGDWNGAGCHTNYSTKSMREDGGFEVIKKAILNLSLRHDLHISAYGEGNERRLTGLHETASIDNFSWGVANRGCSIRVGRDTEAKGKGYLEDRRPASNMDPYVVTALLAETTILWEPTLEAEVLAAKKLALKV

SEQ ID NO: 21083 - DNA, 1553 bp, Oryza sativa (rice)
  CDS (55)..(1125)
accctccttgttacagctgtgccgcctcttgcttcctcctcctcatcgtccgccatggcttctctcaccgatctcgtcaacctcaacctctccgacaccacggagaagatcatcgccgagtacatatggatcggtggatctggcatggatctcaggagcaaggctaggactctctccggccctgtgactgatcccagcaagctgcccaagtggaactacgatggctccagcaccggccaggcccccggcgaggacagtgaggtcatcctgtacccacaggctatcttcaaggacccattcaggaagggaaacaacatccttgtcatgtgcgattgctacacgccagccggagaaccgatccccaccaacaagaggcacaatgctgccaagatcttcagctcccctgaggttgcttctgaggagccctggtacggtattgagcaagagtacaccctcctccagaaggacatcaactggccccttggctggcctgttggtggcttccctggtcctcagggtccttactactgtggtatcggtgctgacaagtcttttgggcgtgatattgttgactcccactacaaggcttgcctctatgccggcatcaacatcagtggaatcaacggcgaggtcatgccaggacagtgggagttccaagttggcccgtctgtcggcatttctgccggtgatcaggtgtgggttgctcgctacattcttgagaggatcaccgagatcgccggagtcgtcgtctcatttgaccccaagcccatcccgggagactggaacggtgctggtgctcacaccaactacagcaccaagtcgatgaggaacgatggtggctacgagatcatcaagtccgccattgagaagctcaagctcaggcacaaggagcacatctccgcctacggcgagggcaacgagcgccggctcaccggcaggcacgagaccgccgacatcaacaccttcagctggggagttgccaaccgcggcgcctcggtccgcgtcggccgggagacggagcagaacggcaagggctacttcgaggatcgccggccggcgtccaacatggacccttacatcgtcacctccatgatcgccgagaccaccatcatctggaagccctgaagcggcttcttgacgccacgacatcctcgtcatcgtcctccccagctcgccgtgtcgctccggttgctccattgatcggacgatctggtgaattgcatttgtgctgggagaagtaaaaaaaaaaggaaagagaaaaaaaagaaaatcacgccaaaaaaaattctcattccatttcgatttggttgcatgctaccactactactacattgctcatctgccatttagattagctcctttttcttcgtcttttgggtgagtgcgtttgggtgctcttgtgtaatcctccaataatggccgtacctacggtacttgtcccatcctgtggatcatcgtcctcctttccacatgtggttttatcatcattgttattagtgatcacctttatataaagttcttgctgggcttccaatagccgtggcttttgcgtt

SEQ ID NO: 21084 - protein, 356 aa, Oryza sativa (rice)
MASLTDLVNLNLSDTTEKIIAEYIWIGGSGMDLRSKARTLSGPVTDPSKLPKWNYDGSSTGQAPGEDSEVILYPQAIFKDPFRKGNNILVMCDCYTPAGEPIPTNKRHNAAKIFSSPEVASEEPWYGIEQEYTLLQKDINWPLGWPVGGFPGPQGPYYCGIGADKSFGRDIVDSHYKACLYAGINISGINGEVMPGQWEFQVGPSVGISAGDQVWVARYILERITEIAGVVVSFDPKPIPGDWNGAGAHTNYSTKSMRNDGGYEIIKSAIEKLKLRHKEHISAYGEGNERRLTGRHETADINTFSWGVANRGASVRVGRETEQNGKGYFEDRRPASNMDPYIVTSMIAETTIIWKP

SEQ ID NO: 21085 - DNA, 1208 bp, Streptomyces hygroscopicus
  CDS (136)..(1158)
gaattccttggaaacggctggatgtccggctcggtaacctgtggttcacaaacgggcaacggacgagaaatggcgcgttgcgagagtgcggaggtacgcccgcaccgtacccgcaccgaccgtgaagaggaccccatgagcatcaaggccgagtacatctggatcgacggcacgcagccgaccgccaagctccgctccaagaccaagatcctgtccgacggcagccggcttccgcggtggggcttcgacggttccagcaccaaccaggccgaaggccacgcctcggacctcgtactggagccggtgttcagctgcccggacccgatccgcggcggcgaccacctgctggtgctgtgcgaggtgctgcacaccgacctcaccccgcacccctccaacacccgggcgctgctgcgcccggtcgcggagcggttcgccggccaggagccgatcttcggcatcgagcaggagtacaccttcctcaagggcgaccgcccgctcggcttccccgagggcggcggctacccggccccgcaggccgactactactgcggcgtgggcgccgacgcgatcttcggccgggagatcgtcgagaagcacctcgacctgtgcctggcggccggtctgggcctgtccggcatcaacgccgaggtcatgcccggccagtgggagttccaggtcggcgcgctgccgccgctggaggtctcggaccacatgtgggtggcgcgctggctgctgcaccgggtggcggaggagttcggcgtcaccgcgtcgctggacgccaagccggccaagggcgactggaacggcgcgggcgcgcacaccaacttctccacccgcgcgatgcgcgagggctacgacccgatcatcaccgcctgcgaggcgctgggccaggacgacaagccgctggagcacgtccgccagtacggcaccggcatcgaggaccggctgaccggcgcgcacgagaccgccccctgggacgcgtactcctacggcgcctccgaccgcggcgcctcggtgcgcatcccctggcaggtcgaggtcgagaagaagggctacatcgaggaccggcgcccgaacgccaacgtcgacccgtacgtggtcacccggctgatggtggacacctgctgcacggagctggcgcggcgcgagcagatctgacgcctgcggtcacgtggccgtgcggtcacgtgaccgcacggtcgcgcgag

SEQ ID NO: 21086 - protein, 340 aa, Streptomyces hygroscopicus
MSIKAEYIWIDGTQPTAKLRSKTKILSDGSRLPRWGFDGSSTNQAEGHASDLVLEPVFSCPDPIRGGDHLLVLCEVLHTDLTPHPSNTRALLRPVAERFAGQEPIFGIEQEYTFLKGDRPLGFPEGGGYPAPQADYYCGVGADAIFGREIVEKHLDLCLAAGLGLSGINAEVMPGQWEFQVGALPPLEVSDHMWVARWLLHRVAEEFGVTASLDAKPAKGDWNGAGAHTNFSTRAMREGYDPIITACEALGQDDKPLEHVRQYGTGIEDRLTGAHETAPWDAYSYGASDRGASVRIPWQVEVEKKGYIEDRRPNANVDPYVVTRLMVDTCCTELARREQI

SEQ ID NO: 21087 - DNA, 1032 bp, Streptomyces viridochromogenes
  CDS (1)..(1032)
atgaccttcaaggctgagtacatctggatcgacggcaccgagccgacggccaagctccgttccaagaccaagatcatcacgggtcagcccgccggtctcgacgcgctgccgatctggggcttcgacgggtcctccaccaaccaggccgaggggcactcctcggactgtgtcctgaagccggtcttcacctgcccggacccgatccgtggcggcgacgacatcctggtgctgtgcgaggtcctgaacatcgacctcaccccgcacgccagcaacacccgtgccgcgctggccgaggtcgccgagaggttcgccgctcaggagccgatcttcggcatcgagcaggagtacaccttcttccaggacggctacccgctcggcttccccaagggcggcttcccggccccgcagggcggctactactgcggtgtcggcgccgacgagatcttcggccgtgacgtcgtcgaggcgcacctcgacaactgcctgaaggccggtctcgccatctccggcatcaacgccgaggtcatgcccggccagtgggagttccaggtcggcccggtctccccgctggaggtctccgaccacctgtgggtggcccgctggctgctctaccgaaccgccgaggacttcgacgtcgccgccaccctggacccgaagccggtcaagggcgactggaacggcgccggcgcgcacaccaacttctccaccaaggcgatgcgcgagtcctacgacgcgatcatcaccgcggccgagtcgctcggtgagggctccaagccgctcgaccacgtcaagaactacggcgccggcatcgacgaccgcctgaccggtctgcacgagaccgccccgtggaacgagtactcctacggcgtctccgaccgcggtgcctcggtccgtatcccgtggcaggtcgagaaggacggcaagggctacatcgaggaccgccgtccgaacgccaacgtggacccgtacgtggtgacgcgtctgctcgtcgacacctgctgctcggcgctggagaaggccggccaggtctga

SEQ ID NO: 21088 - protein, 343 aa, Streptomyces viridochromogenes
MTFKAEYIWIDGTEPTAKLRSKTKIITGQPAGLDALPIWGFDGSSTNQAEGHSSDCVLKPVFTCPDPIRGGDDILVLCEVLNIDLTPHASNTRAALAEVAERFAAQEPIFGIEQEYTFFQDGYPLGFPKGGFPAPQGGYYCGVGADEIFGRDVVEAHLDNCLKAGLAISGINAEVMPGQWEFQVGPVSPLEVSDHLWVARWLLYRTAEDFDVAATLDPKPVKGDWNGAGAHTNFSTKAMRESYDAIITAAESLGEGSKPLDHVKNYGAGIDDRLTGLHETAPWNEYSYGVSDRGASVRIPWQVEKDGKGYIEDRRPNANVDPYVVTRLLVDTCCSALEKAGQV

SEQ ID NO: 21089 - DNA, 1270 bp, Bradyrhizobium japonicum
  CDS (281)..(1270)
catcggcaacctccggcaccggccggcctgctccagaatcaggcgttttccgcgggatttttgcagtgcagcttcacgcaaaggtgcgccgctatgacgcacgccgccggggacgaccggccgctcgcggggggggggggggcggccgcggtggaaaacctcccgcaatgcggccttttggcacgctaaatgcttgtaaacggtcggccgatggtggccgggtacaaacgtggggggcccccgggcccccaacctttcgcatcatctacagagaggctcaatgaccaagtataagctcgagtacatctggctcgacggatatacgccgactccgaacttgcgcggcaaaactcagatcaaggaattcgcgtcgttcccgacgctcgagcacgttccgctctggggcttcgatggctcctccacccagcaggccgaaggccacagctctgattgcgtgctgaagccagtcgccgtcttcccggacgccgcgcgcaccaacggcgtgctcgtgatgtgcgaagtcatgatgcccgatggcaagaccccgcacgcctccaacaagcgcgccaccattctcgacgacgccggcgcctggttcggcttcgagcaggaatacttcttctacaaggacggccgtccgctcggcttcccgacctccggttatccggcgccgcagggcccgtactacaccggcgtcggcttctcgaacgtcggcgacgtggcccgcaagatcgtcgaagagcatctcgacctctgcctcgcggccggcatcaaccatgaaggcatcaacgcggaagtcgcgaagggccagtgggaattccagatcttcggcaagggctccaagaaggccgctgacgaaatgtggatggcccgctacctgatgctgcgcctgaccgagaagtacggcatcgacatcgagttccactgcaagccgcttggcgacacggactggaacggctccggcatgcacgccaacttctcgaccgagtacatgcgcacggtcggcggcaaggagtacttcgaggcgctgatggctgccttcgacaagaacctgatggaccacatcgccgtctacggcccggacaacgacaagcgtctgaccggcaagcacgagaccgcgccgtggaacaagttcagctacggcgtggccgaccgcggcgcttcgatccgcgtgccgcactccttcgtcaacaacggctacaagggctatctggaagaccgtcgcccgaactcgcagggcgacccataccagatcgttcgcagatcctga

SEQ ID NO: 21090 - protein, 329 aa, Bradyrhizobium japonicum
MTKYKLEYIWLDGYTPTPNLRGKTQIKEFASFPTLEHVPLWGFDGSSTQQAEGHSSDCVLKPVAVFPDAARTNGVLVMCEVMMPDGKTPHASNKRATILDDAGAWFGFEQEYFFYKDGRPLGFPTSGYPAPQGPYYTGVGFSNVGDVARKIVEEHLDLCLAAGINHEGINAEVAKGQWEFQIFGKGSKKAADEMWMARYLMLRLTEKYGIDIEFHCKPLGDTDWNGSGMHANFSTEYMRTVGGKEYFEALMAAFDKNLMDHIAVYGPDNDKRLTGKHETAPWNKFSYGVADRGASIRVPHSFVNNGYKGYLEDRRPNSQGDPYQIVRRS

SEQ ID NO: 21091 - DNA, 1446 bp, Helicobacter pylori
  CDS (1)..(1446)
atggtagtaagaactcaaaatagcgaaagcaagatcaaagagttttttgaattttgcaaagaaaatgaagtagaatttgtggattttagattcagcgatattaaaggcacttggaaccatatcgcttattcttttggggctttaacgcatgatatgtttaaagaagggattccttttgatgcgagctcttttaaaggctggcaaggcattgaacactccgatatgattttaacccccgatttggtgcgttatttcattgacccttttagtgcggatgtgagcgcggtcgtgttttgcgatgtgtatgatgtgtataaaaaccagccttatgaaaaatgccctagaagtatcgctaaaaaagccctaaaacatttaagagatttaggcttgggcgatgtggcttattttggcgcggagaatgaattttttatctttgattctattaagattaaagacgcttccaattcccaatactacgaagtggatagcgaagagggcgaatggaatagggataaaagctttgaaaacggcgtgaattttgggcatagaccgggaaagcaaggaggctatatgcctgtgcctccaacggatacgatgatggatattcgcacagaaatcgtgaaagtcttaaaccaagtggggttagaaacttttgtcgttcatcatgaagtcgcgcaagcgcaaggcgaagtgggcgtaaaatttggggatttagtggaagccgctgataatgtccaaaaactcaaatatgtggttaaaatggtcgctcatttaaatgggaaaacggctactttcatgccaaaacccctatatggggataatgggagtgggatgcacacccatgtgagtatttggaagaataacgaaaacctttttggtggcgaaacttacaagggcttgagcgagtttgcgttgtattttttagggggcgtgttgcgccacgctagagggttagccgctttcactaacgcttccaccaattcttacaaacgcctgattccgggatatgaagccccatccattttaacttattcagccagcaataggagcgctagcgtgcgtatcccttatgggatttctaaaaatagtgctaggtttgaattcaggtttcctgacagctcatcaaacccctacctggcttttggggctattttaatggcgggcattgatggcattaaaaataaaatggatcccggcgaagcgatggacattaaccttttcaagctaactttggacgaaatcagagaaaaaggcatcaaacaaatgccccacactttaaggagatcgttagaagaaatgctagccgataagcagtatttaaaagagggtcaggtctttagcgaagaatttatccaggcctatcagtctcttaaattccattctgaagtgttcccatgggagagtaaaccccatccttttgaatttatcaccacttattcatgctaa

SEQ ID NO: 21092 - protein, 481 aa, Helicobacter pylori
MVVRTQNSESKIKEFFEFCKENEVEFVDFRFSDIKGTWNHIAYSFGALTHDMFKEGIPFDASSFKGWQGIEHSDMILTPDLVRYFIDPFSADVSAVVFCDVYDVYKNQPYEKCPRSIAKKALKHLRDLGLGDVAYFGAENEFFIFDSIKIKDASNSQYYEVDSEEGEWNRDKSFENGVNFGHRPGKQGGYMPVPPTDTMMDIRTEIVKVLNQVGLETFVVHHEVAQAQGEVGVKFGDLVEAADNVQKLKYVVKMVAHLNGKTATFMPKPLYGDNGSGMHTHVSIWKNNENLFGGETYKGLSEFALYFLGGVLRHARGLAAFTNASTNSYKRLIPGYEAPSILTYSASNRSASVRIPYGISKNSARFEFRFPDSSSNPYLAFGAILMAGIDGIKNKMDPGEAMDINLFKLTLDEIREKGIKQMPHTLRRSLEEMLADKQYLKEGQVFSEEFIQAYQSLKFHSEVFPWESKPHPFEFITTYSC

SEQ ID NO: 21093 - DNA, 1368 bp, Bacillus halodurans
  CDS (1)..(1368)
atgaagatgacgaccgtttcagtgccgacgcgtgagagtttgatcgaggaaattaaagagacaatcaaaacgaaaaacgttgaacttctacacctacagttcgtagatattgaaggaattttaaagcatgtaactgttactgcggaacaaatcgatagcgtggttgatggaaaaattatgttcgatggttcatccattactggtttcacaccgatcaaccagtcagatttatacttgcagcctgacctaacaacatttgctgtattgccttggacggaagaagagggctattcagaagggcgttttctctgtagcgtaaaaaagccagatgggtctgactttgaaggagatccgcgtaacatcttaaagaaaacggtagaacgtgcaaaagaaaaagggtattccatcagtgtcggacccgaattagaattcttcctttttgaaacagatgagtatggacttcctacaaagcaaacacaagacatcggtggatacttcgaaccatctccaaaagataacggagaaaaagttcgccttgaaatttatcgtacgttaaaggccatgggctttaccattgaggcgtctcaccacgaggtagctgagggccagcatgagatcaactttaaatatgctgatgctttaggatctgctgatgcagcgacaacgtataaatgggtcgttaaaaccgttgcgaagcaattcgggcttcacgcaacatttatgccgaagccacttggtggtgcaaacggtagcggaatgcatacaaacatctcattgtttgatgatgagaagcaagaaaatgcattctatgatgaaagtgacaaactaggactctcaaaaacagcttatcaatttattgctggtttaattgaaaatgtaaaagatttcgttgcggtaacgaacccgcttgtaaactcttataagcgccttgtgccaggatatgaagcaccttgctacatcgcatggtctgcttccaaccgttcggccctaatccgtattccagcaacacgcggagctggaacacgtgtggaaatccgttgcccagacccagctgctaacccttatttagcattcgctgttgtcgcttctgctggtttggacggagtggaacaagagcttacagcaccagcttctgttgatgctgatatcttccacatgagcgcagaggaaattgctgagcgcggaattgaaaacttacctacaagccttgaagaagcaattaatcgctttgaagaaggggaaattggtaagaaaacattcggtgagcacgctttcggcgagtatgtagcgttgaaacgtggagagtgggatgaattccgtacaacggttcacgattgggaagtagcagcttaccaaggtaaattctaa

SEQ ID NO: 21094 - protein, 455 aa, Bacillus halodurans
MKMTTVSVPTRESLIEEIKETIKTKNVELLHLQFVDIEGILKHVTVTAEQIDSVVDGKIMFDGSSITGFTPINQSDLYLQPDLTTFAVLPWTEEEGYSEGRFLCSVKKPDGSDFEGDPRNILKKTVERAKEKGYSISVGPELEFFLFETDEYGLPTKQTQDIGGYFEPSPKDNGEKVRLEIYRTLKAMGFTIEASHHEVAEGQHEINFKYADALGSADAATTYKWVVKTVAKQFGLHATFMPKPLGGANGSGMHTNISLFDDEKQENAFYDESDKLGLSKTAYQFIAGLIENVKDFVAVTNPLVNSYKRLVPGYEAPCYIAWSASNRSALIRIPATRGAGTRVEIRCPDPAANPYLAFAVVASAGLDGVEQELTAPASVDADIFHMSAEEIAERGIENLPTSLEEAINRFEEGEIGKKTFGEHAFGEYVALKRGEWDEFRTTVHDWEVAAYQGKF

SEQ ID NO: 21095 - DNA, 1410 bp, Caulobacter crescentus
  CDS (1)..(1410)
atgagcaccgccaaggacatcctgaacctgatcaaggaaaaggacgtgaagtacgtcgacgtccgtttcacggacgtgcgcggcaagatgcagcacgtgaccttcgacatcgacctcgtcgacgacgacttcctgaacgacggcaccatgttcgacggttcgtcgatcgccggctggaaggccatcaacgagtcggacatgaagctgcgccccgacctgtcgagcgcgatcatcgacccgttctaccagcagaccacgctggcgctgttctgcgacgtcgtgaaccccgacaccggcacgccctacaaccgcgacccgcgttcgatcgccaaggccgcgctgaactacctgaagtcggccggcgtgggcgacaccgtctacttcggccctgaagccgagttcttcatcttcgacgacgtgcgctggtcgaccgccccgcacgacaccagctactcgttcgattcgaccgaactgccggtcaactcgaacaagcagtacgccgaaggcaacatgggccaccgcccgggcccgaagggcggctacttcccggtgaacccggtcgacagctgccaagacctgcgcggcgaaatgctggccgtcatgggcgagctgggcatgaagccggaaaagcaccaccacgaagtggcgccggcccagcacgagcttggcctgaagttcgacaccatggtcaccatggccgaccggatgcagctctataagtacgtcatccacaacgtcgcggccgcctacggcaagaccgccaccttcatggccaagccgatgttcgccgacaacggttcgggcatgcacgtgcaccagtcgatctggcaggacggcaagccgctgttcgccggcgacaagtatgctggcctgtcgcaggaatgcctgtggtacatcggcggcatcatcaagcacgccaaggccatcaacgcgttctcgaactcgacgacgaactcgtacaagcgcctggtgcccggctacgaagccccggtgaagctggcctacagctcgcgcaaccgctcggcctcgatccgcatcccgcacgtcgactcgccgaaggctaagcgtctggaagcccgcttccccgacccgatgggcaacccctacctgacgttcgtcgctctgctgatggccggcctggacggcatcatcaacaagatcgatccgggcgctccggccgacaagaacctgtacgatctgccgccccgcgagcagaagaagatcccggaagtctgcggctcgctgcgcgaagccctggaaaacctcgacaaggaccgcgccttcctgaaggccggcggtgtcatggatgacgacttcatcgacagctacatcgagctgaagatggaagaggtgatgcgcctgcaactgcacccgcacccggtcgaattcgagatgtactacaagtgctaa

SEQ ID NO: 21096 - protein, 469 aa, Caulobacter crescentus
MSTAKDILNLIKEKDVKYVDVRFTDVRGKMQHVTFDIDLVDDDFLNDGTMFDGSSIAGWKAINESDMKLRPDLSSAIIDPFYQQTTLALFCDVVNPDTGTPYNRDPRSIAKAALNYLKSAGVGDTVYFGPEAEFFIFDDVRWSTAPHDTSYSFDSTELPVNSNKQYAEGNMGHRPGPKGGYFPVNPVDSCQDLRGEMLAVMGELGMKPEKHHHEVAPAQHELGLKFDTMVTMADRMQLYKYVIHNVAAAYGKTATFMAKPMFADNGSGMHVHQSIWQDGKPLFAGDKYAGLSQECLWYIGGIIKHAKAINAFSNSTTNSYKRLVPGYEAPVKLAYSSRNRSASIRIPHVDSPKAKRLEARFPDPMGNPYLTFVALLMAGLDGIINKIDPGAPADKNLYDLPPREQKKIPEVCGSLREALENLDKDRAFLKAGGVMDDDFIDSYIELKMEEVMRLQLHPHPVEFEMYYKC

SEQ ID NO: 21097 - DNA, 1035 bp, Sinorhizobium meliloti
  CDS (1)..(1035)
atgaccaagtataagctcgagtacatctggctcgatggctacacgcccgtcccaaatctccgcgggaagacgcagatcaaggaattcgacgcgtttccgacgctcgagcagcttccgctctggggcttcgacggcagctcgacgcagcaggccgaagggcgcagctccgattgcgtcctgaagccggttgccgtctatcccgatccggtccgcacgaatggcgcattggtcatgtgcgaggtcatgatgcctgacggcaagacgccgcatccgtcgaatacccgtgcaacggttctcgacgatgaaagcgcctggttcggcttcgagcaggaatatttcttctacaagaacggccgcccgctgggcttcccggagcagggctatccggcgccgcagggcccgtactacaccggcgtgggctacaagaatgtcggcgacatcgcgcgccagatcgtcgaagagcatctcgacatctgcctggccgcgggcatcaaccacgaaggcatcaacgccgaagtggccaagggccaatgggaattccaggtcttcggcaagggctccaagaaggctgccgatgaagtctggctggcgcgctaccttctgctgcgcctaacagagaaatacggcatcgacgtcgagttccactgcaagccgctcggcgacacggactggaacggctccggcatgcacgccaacttctcgactgcctatctgcgcgaagtcggcggcaaggactatttcgaagcgctgatggcagccttcgagaagaacctgcacgaccacatcaacgtctatggcccggacaaccacttgcgcctgaccggcaagcacgagacggcgccgtgggacaagttcagctacggcgtggccgaccgcggcgcctccattcgcgttccgcacagcttcgtcaacaacggctatcgcggctatctcgaagatcgccgcccgaactcccagggcgacccctaccagatcgcttcggtcatcctgaagacgatctcgagcgtgccgacggcggttgccaaggtcgcttga

SEQ ID NO: 21098 - protein, 344 aa, Sinorhizobium meliloti
MTKYKLEYIWLDGYTPVPNLRGKTQIKEFDAFPTLEQLPLWGFDGSSTQQAEGRSSDCVLKPVAVYPDPVRTNGALVMCEVMMPDGKTPHPSNTRATVLDDESAWFGFEQEYFFYKNGRPLGFPEQGYPAPQGPYYTGVGYKNVGDIARQIVEEHLDICLAAGINHEGINAEVAKGQWEFQVFGKGSKKAADEVWLARYLLLRLTEKYGIDVEFHCKPLGDTDWNGSGMHANFSTAYLREVGGKDYFEALMAAFEKNLHDHINVYGPDNHLRLTGKHETAPWDKFSYGVADRGASIRVPHSFVNNGYRGYLEDRRPNSQGDPYQIASVILKTISSVPTAVAKVA

SEQ ID NO: 21099 - DNA, 1212 bp, Squalus acanthias (spiny dogfish)
  CDS (1)..(1212)
atgcggatctgtcgcagtttcctgtttctggtaaaaaaatgcggcaatatcacgccgacgatttggcggaatcaacatacttacaagatggccacgtcagccagcgccaatctcagcaaaatcgtcaagaagaattacatggagctgccccaagatggcaaggtgcaagcgatgtacatctggatagacggcacaggggaggccgtccgctgcaagaccagaaccttggacaatgagcccaagagcattgccgaactcccagaatggaacttcgatggctcaagtacgtatcagtcagaggggtccaacagcgacatgtacctggttccatctgccatgttccgggatcctttccgtagggatccaaacaagctcgtcctctgtgaggtcctcaagtataacaggaagccagcagaatctaatcttagacactcatgccagaaaatcatgtccatgatcgcaaatgaatatccatggtttggaatggaacaagagtacactttgctgggaacggacggtcatccctttggatggccttccaattgctttcctggaccacaagggccctattactgtggagttggtgcagacaaagcttacggcagagatattgtcgaggctcactaccgggcgtgtctgtatgctggaattgaactcagtggaaccaatgctgaagttatggctgctcagtgggaataccaagttggaccttgtgaaggtatccagatgggtgaccacttgtggatttccaggtttattctgcacagggtgtgcgaggacttcggtatcattgctagctttgaccctaagcccattcctggcaactggaatggtgctgggtgccacactaactttagcaccaaagccatgcgggatgatggagggttgaagtacattgaagactcaattgaaaaactgggcaagaggcatcagtaccacattcgtgcctatgatcctaaaggagggttggacaatgctagagctttgacaggccaccatgaaacctcaaatatcaatgagttctcagctggtgttgccaatagaggagccagcatccgaatccctcgatccgttggccaggacaagaaaggctactttgaagaccgccgtccatctgctaattgtgacccttatgcagtcacagaagcattggtccgcacatgcctattggatgagtctggggacaagcctattgagtacaacaaaaattaa

SEQ ID NO: 21100 - protein, 403 aa, Squalus acanthias (spiny dogfish)
MRICRSFLFLVKKCGNITPTIWRNQHTYKMATSASANLSKIVKKNYMELPQDGKVQAMYIWIDGTGEAVRCKTRTLDNEPKSIAELPEWNFDGSSTYQSEGSNSDMYLVPSAMFRDPFRRDPNKLVLCEVLKYNRKPAESNLRHSCQKIMSMIANEYPWFGMEQEYTLLGTDGHPFGWPSNCFPGPQGPYYCGVGADKAYGRDIVEAHYRACLYAGIELSGTNAEVMAAQWEYQVGPCEGIQMGDHLWISRFILHRVCEDFGIIASFDPKPIPGNWNGAGCHTNFSTKAMRDDGGLKYIEDSIEKLGKRHQYHIRAYDPKGGLDNARALTGHHETSNINEFSAGVANRGASIRIPRSVGQDKKGYFEDRRPSANCDPYAVTEALVRTCLLDESGDKPIEYNKN

SEQ ID NO: 21101 - DNA, 1617 bp, Xenopus laevis (African clawed frog)
  CDS (65)..(1243)
aacaaacttgctgaggaaacgaagatcggggcttcttcccttgctcataagatcagctgccgccatgtcagtctcccacagttcgagactcaacaagggggtgagggaacagtacatgaaactgccccaaggagaaaaggtccaggtcacctacgtgtggatcgacggcaccggggaaggagtgaggtgcaaaaccaggactctggatcaggaacccaaaaccatagatgaaatccctgaatggaacttcgatggatccagtactcaccaagcagaaggctcaaacagtgacatgtatctcatcccagtccagatgttcagagacccattctgcctggaccccaataaactggttatgtgtgaagtcttgaaatacaaccgcaagtctgcagagaccaacctgagacacacatgcaagaagatcatggagatggtgaatgaccaccgcccgtggtttggaatggagcaggaatacaccttgctgggcattaatgggcacccgtatggctggccagaaaatggtttcccagggccacaaggtccctattactgcggcgttggagcggacaaggtgtatggccgggatgtggtagagtcgcattataaggcctgtctgtacgctggcattaaaatctgtggcaccaacgcagaagtcatgccctcgcagtgggagttccaagtgggtccgtgcgaaggtatcgacatgggggaccacctgtggatggccaggttcatccttcatcgggtctgtgaagactttggggtggtggcgactctggaccccaaacccatgaccggaaactggaacggagccgggtgccacaccaactacagcacggagagcatgagggtggaaggaggactcaaacacattgaagatgccatagagaagctggggaagagacacgactaccacatctgcgtctacgacccgcggggagggaaagacaactcccggagactcaccggccaacacgagacgtcgagtattcacgagttctcggccggcgtggccaaccggggcgccagtatccgcatcccgcgtcaggtgggccaggaaggctacggctactttgaagaccgacggccggcagccaactgcgacccctacgcagtaaccgaggcgctggtcaggaccaccatcctgaacgaaaccggcagcgagaccaaagactataagaacggagctggattctcccgggcaatcggtatggcatctccccgagacgccgctgtgttttaacccgttagtctcccgacactacttgaattcttgtgaagtaaaaattcctttggaaaggaggggcattcctagaaccagagaccgtaacatggtttctcccgtgttatctgccgagatggagggccaatttgggcatgggggggggggggttgcacagattttataggaataagaaacaaagcaagtgacctgctgaaatgtggccagtgccaagtgattccttcagttgatcccttttggggagggcagaattgttaattggctcctcttggagctcgggctttatataaaacgactgatagggtcttgtacccgccatatgactgtattccattgtattgtttttactgtctaataaaaattttaaactttaa

SEQ ID NO: 21102 - protein, 392 aa, Xenopus laevis (African clawed frog)
MSVSHSSRLNKGVREQYMKLPQGEKVQVTYVWIDGTGEGVRCKTRTLDQEPKTIDEIPEWNFDGSSTHQAEGSNSDMYLIPVQMFRDPFCLDPNKLVMCEVLKYNRKSAETNLRHTCKKIMEMVNDHRPWFGMEQEYTLLGINGHPYGWPENGFPGPQGPYYCGVGADKVYGRDVVESHYKACLYAGIKICGTNAEVMPSQWEFQVGPCEGIDMGDHLWMARFILHRVCEDFGVVATLDPKPMTGNWNGAGCHTNYSTESMRVEGGLKHIEDAIEKLGKRHDYHICVYDPRGGKDNSRRLTGQHETSSIHEFSAGVANRGASIRIPRQVGQEGYGYFEDRRPAANCDPYAVTEALVRTTILNETGSETKDYKNGAGFSRAIGMASPRDAAVF

SEQ ID NO: 21103 - DNA, 1942 bp, Calothrix sp
  CDS (375)..(1790)
tgttactgcatcgcgcattccgatttctcccaatcattactatctatggtttgatattaatttggctgcttcatgcaccagtcattttttgtgccaattacaatatatgaatcggcacaaaacaagtacccgctatttaaggattctatgccaaagttgacccctctgagatggtatgttcgatttttgtacaggtatgaggcaaaggttaatagaaactgtaaaccggagaatctgtaacaaagactacaaaaattcttaatgtcatatccttaggatattccaggtgtgtcacaattggttcatctcagcagggtcagcgtggtttaaagattctagtttgagtttatttaattggcagagaaggagtaacaatgacaaccccacaagaagtcttgaaattgattcaagaccaaaaaattcagatgattgatctgaaattcatcgatacaccagggacatggcagcacctaaccgtgtactacaaccaaatcgatgaaagttcattcactgatggcgtacctttcgacggttccagtattaggggttggaaaggcatcgaagaatcagacatgacaatggttttagatccaaacactgcctggatcgacccattcatgaaagagccaactctaagtataatttgtagcattaaagaacctcgcacaggcgaatggtataaccgttgtccccgcgtgattgcccaaaaagccatagactatttagtttctactggccttggtgacacagctttctttggcccagaagctgagttctttatctttgatgatgcccgttttgaccaaactgccaactcaggttattactacgtagactccgtagaaggtcgttggaattctggtaaagatgaaggccctaacctcgcttacaaaccacgcttcaaagaaggttacttcccagttgcgcccactgatactttccaggatatgcgtacagaaatgctgttgacgatggcagcttgcggcgtacccattgaaaaacaacaccatgaagttgctactggtggtcagtgcgaattgggtttccgctttggtaagctcatcgaagctgctgactggttgatgacttacaagtatgtcatcaagaacgttgccaagaaatatggtagaaccgtgacctttatgccaaaaccaatttttggtgataatggttcggggatgcactgtcaccagtctatttggaaggatggtaaacctctatttggaggtgataagtatgctggtttgagtgacatggcactgtattacatcggtggtatcctcaaacacgcaccagcattgttgggcatcacaaaccccaccaccaactcttacaagcgcttagtacctggttatgaagcacctgttaacttggcttactcccaaggtaaccgttctgcttctgtgcggattcctctgtctggtactaaccccaaagctaaacgtttagagttccgttgcccagatgctacctctaacccttacttggcatttgctgctatgctttgtgctggtattgatggtatcaagaataaaatccatcctggtgaacccttagacagaaatatctatgaactttctccagaagaactagcaaaagttccttctactcctggttctttggaactggcattagaagcactggaaaacgatcacgccttcttgactgaaagcggtgtattcacagaagactttatccaaaactggatcgagtacaagctagttaacgaagttaagcagctacaattacgtcctcatccctacgaattttacctatactacgattgctaattgcgatcgctagtattcttgtacgtagtaagcactttgctgcttactacacaacttcaagctgtactgataattttttccgaccactggggcggcctttttttgacaaaaattagcttaagcactccgaaatcttgagctttatgcctgca

SEQ ID NO: 21104 - protein, 471 aa, Calothrix sp
MTTPQEVLKLIQDQKIQMIDLKFIDTPGTWQHLTVYYNQIDESSFTDGVPFDGSSIRGWKGIEESDMTMVLDPNTAWIDPFMKEPTLSIICSIKEPRTGEWYNRCPRVIAQKAIDYLVSTGLGDTAFFGPEAEFFIFDDARFDQTANSGYYYVDSVEGRWNSGKDEGPNLAYKPRFKEGYFPVAPTDTFQDMRTEMLLTMAACGVPIEKQHHEVATGGQCELGFRFGKLIEAADWLMTYKYVIKNVAKKYGRTVTFMPKPIFGDNGSGMHCHQSIWKDGKPLFGGDKYAGLSDMALYYIGGILKHAPALLGITNPTTNSYKRLVPGYEAPVNLAYSQGNRSASVRIPLSGTNPKAKRLEFRCPDATSNPYLAFAAMLCAGIDGIKNKIHPGEPLDRNIYELSPEELAKVPSTPGSLELALEALENDHAFLTESGVFTEDFIQNWIEYKLVNEVKQLQLRPHPYEFYLYYDC

SEQ ID NO: 21105 - DNA, 1098 bp, Paracentrotus lividus (common urchin)
  CDS (1)..(1098)
atgggtgaatactcagcagctaccgacaagacggtgtcggaccgatatctgacccttgacacagatggccactgccaggtcatgtattgctgggtcgacggctccggagaaaacttgagggccaagacgaaaaccatggatttcgtaccagaaaaagcttcagactgccctgtatggaactttgatggttcgagtacggatcaatcggagggatccaacagcgatatgttccttaaaccttgcgccctcttccgggatccattcaggcgcggagacaacaagctccttatgtgtgaagtctacaagtacgactggagacccgccgaaactaactacagaaagacttgtgatgagatcatgactagggccgcagacacagaaccctggtttggaattgaacaggaatatactcttcttggtagcgacaaatggcccttcggctggccaaagggtggattcccaggaccacagggaccatactactgtggtgttggagccaacaaggtttatggtcgtgacattgtagaatctcactatcgggcctgcctgtacgcaggagtaaagatcgcaggctcaaacgctgaagtcatgccagcccagtgggaataccaggttggaccctgtttaggcattgaaatgggcgatcatctttggatgtctcgcttcatcctccaccgtgtttgtgaagactttggcgtcatcgcgacccttgaccccaaacccatggagggagactggaacggcgctggagctcactgtaatttcagcaccttagccatgcgtgaggatggaggcatcgatgtcatgaatgaagccatcaagaaactaggcaagagacacaaggagcacatccgtgcctacgaccctaagaatggagaggacaacgcccgcagattgaccggccgacatgaaacctccagcatcgacgacttctcctctggagtagccaatcgcggcgccagcatcaggataccacgtcaatgcggcatcgacgggaagggatacatggaggaccgaagaccgtcctcaaattgtgatccgtaccgcgtgaccgaagctctggttaggagtacagttctggacgattgggaaacatag

SEQ ID NO: 21106 - protein, 365 aa, Paracentrotus lividus (common urchin)
MGEYSAATDKTVSDRYLTLDTDGHCQVMYCWVDGSGENLRAKTKTMDFVPEKASDCPVWNFDGSSTDQSEGSNSDMFLKPCALFRDPFRRGDNKLLMCEVYKYDWRPAETNYRKTCDEIMTRAADTEPWFGIEQEYTLLGSDKWPFGWPKGGFPGPQGPYYCGVGANKVYGRDIVESHYRACLYAGVKIAGSNAEVMPAQWEYQVGPCLGIEMGDHLWMSRFILHRVCEDFGVIATLDPKPMEGDWNGAGAHCNFSTLAMREDGGIDVMNEAIKKLGKRHKEHIRAYDPKNGEDNARRLTGRHETSSIDDFSSGVANRGASIRIPRQCGIDGKGYMEDRRPSSNCDPYRVTEALVRSTVLDDWET

SEQ ID NO: 21107 - DNA, 1340 bp, Nicotiana plumbaginifolia (curled-leaved tobacco)
  CDS (16)..(1086)
gtcttctattttattatgtctcttctttcagatcttatcaacctcaatctctctgattctaccgagaaaatcatcgctgaatacatatggattggtggatcaggcatggacttaaggagcaaggccaggactctttctggtcctgttactgatcctgcaaaactacccaaatggaactatgatggatctagcacaggtcaagctcctggagaagatagtgaagtgatcttatacccacaagctatctttaaggatccattcagaagaggcaacaatatcttggtcatgtgtgatgcttatactcctgctggcgagcctatcccgacaaacaagaggcatgctgctgccaagatcttcagcaaccccgatgttgttgctgaggaaccctggtatggtattgagcaagaatacaccttgttgcaaagggatattaactggcctctgggctggcctattggaggcttccctggacctcagggaccatactactgtggaaccggagctgataaggcctttggacgtgatattgtggactcccattacaaggcttatctttatgctgggattaacatcagtggtatcaacggagaagtcatgcccggacagtgggaattccaagtcggaccttctgttggcatctcagccggtgatgaagtgtgggtagctcgttacattcttgagaggattgcggagatagctggagtggttgtgtcatttgaccccaagcctattccgggtgattggaacggtgcaggtgctcacacaaactacagcaccaagtcgatgagggaagatggaggctacgaagtcattttgaaggctattgagaagcttggcctgaagcacaaagagcacattgctgcatatggtgaaggcaatgagcgtcgtctcactggaaagcacgaaacagccaacatcagcaccttcaaatggggggttgccaaccgcggtgcatctgtccgtgtaggaagggacacagagaaggcgggcaagggatactttgaggacagaaggccggcttcaaatatggacccatacgtcgttactgccatgatcgcggacaccaccatcatcgggaaatcttgaagcttttagtatgaattgcttgtttctggtttgcacaatttgggatagaaaaggattgatttatgaaacagccctttcgcttcgccagtgtctttagttaggatagtctggtcttttcttatttcttcttttattccggttgaagttgtattttcatacagcaatgctgatttcattcgcctatgatttggtaatggtgttacaaacaaaacaatgttattcttattaataacaaattatgaaagggttggttc

SEQ ID NO: 21108 - protein, 356 aa, Nicotiana plumbaginifolia (curled-leaved tobacco)
MSLLSDLINLNLSDSTEKIIAEYIWIGGSGMDLRSKARTLSGPVTDPAKLPKWNYDGSSTGQAPGEDSEVILYPQAIFKDPFRRGNNILVMCDAYTPAGEPIPTNKRHAAAKIFSNPDVVAEEPWYGIEQEYTLLQRDINWPLGWPIGGFPGPQGPYYCGTGADKAFGRDIVDSHYKAYLYAGINISGINGEVMPGQWEFQVGPSVGISAGDEVWVARYILERIAEIAGVVVSFDPKPIPGDWNGAGAHTNYSTKSMREDGGYEVILKAIEKLGLKHKEHIAAYGEGNERRLTGKHETANISTFKWGVANRGASVRVGRDTEKAGKGYFEDRRPASNMDPYVVTAMIADTTIIGKS

SEQ ID NO: 21109 - DNA, 2045 bp, Panulirus argus (spiny lobster)
  CDS (56)..(1141)
gatcttgtgaacaacataaccctgtgactgagagaaaggtatcaagattaccacgatgaatcagggtgcaaacaagacggtattagaccgatatttacggttagatatcccggaccagaaatgtcaagctatgtacatctgggtcgatggaaccggcgaaaacctccgctctaagaccaggacactcaactttactcctaaatctcccagtgagctgccaatatggaatttcgatgggtcatcaacgggccaggccgaacggagcaacagtgacgtgtacctgtatccagtcgctgtttatcgagatccattcaggctgggtaacaataagctggtcctctgtgaaacctacaaatacaacaagaagcctgctgatactaaccagcgttggaagtgtatggaagtaatgacaagggcagcagaccagcacccatggttcggcatggaacaagaatatactcttttggacattgacaaacatcccttgggttggcccaagaatggctatccaggccctcagggtccctattactgtggtgtgggtgctaatagggtgtatgggcgcgatgtggtcgaggctcactacagggcgtgtctttgcgctggcatcaacatctctggggagaacgcgaaagtcatgccggcccaatgggagttccaggttggtccgtgtgaaggcataaccatgggcgacgacctctggatggctcgctaccttcttcacagggtcgctgaggactttgatgttgtagtaacactcgaccccaagccaatccctggtgactggaacggcgctggaatgcacactaatttctctactgaagccatgcgtggtcccaatggcattctggaaattgagagtgccatcgacaaattgtcgaaggttcatgagaaacacatcaaggcatacgacccacacgcaggcaaggataacgaaaggcgcttgactggtcattatgaaacttcctccatccatgacttttctgcaggtgtggccaaccgtggtgcctccatccgcatccccagaggagtggctgaggagaaaaccggctacctggaggaccgtcgcccttcctccaacgctgacccttatgtggtgtctgagaggcttgtgcgtaccatctgcctgaacgagcagtgaagagcagtacgtactaacagctcacccattatatcatgtgcaatcccttcagcccccaacaacacagggcttcctaaaaacttatggcaattatgcactgacgcgtgatcactgccaagtgggcgagacttatttttaggtgtgaacaacgccagccaaacaagcgttatcaatgctaattaagcgagccgacgaaacctgggaacagtgataatagagacaaatgaagtatctattaaagcaaataccttatacagtcggcaaagtggcaatatttagtatatgctgataatttaaactgctgaaggaaaatttattatgaatctttctataatcaaatgcttatctttagattttgtgacgaaacacaatttttagattatcagcaatctgcagttttcattcacgaaattatttttataccaaaatactaaaacttagtttttagttttgtgagctttagtctcattttcaagttgaggaaggtgcgcatgattaaaatcaaaggtcttccatgtcatagatttcctaattgttatgttgtcttaagttttattaggatgtaaacatttaaggaagtatacactccaataaggtaacggcacttacaacctcctacttcaaacatagggcctttgtttttggcatttgatattgtctgcggtaactataaggtgtccctttccatgtttcagtaaagagacaagtattatagttactggcactgatagtggtagccatagtatgttcattgtatttatagttatgcataaaattaaagtcaaatgagtacatgtatgataatcgacatattttcttcattttggatctttctgtgtaatttttaatgtatataaaatgtttataataaacatatggttgtacaaaaaaaaaaaaaaaaaaa

SEQ ID NO: 21110 - protein, 361 aa, Panulirus argus (spiny lobster)
MNQGANKTVLDRYLRLDIPDQKCQAMYIWVDGTGENLRSKTRTLNFTPKSPSELPIWNFDGSSTGQAERSNSDVYLYPVAVYRDPFRLGNNKLVLCETYKYNKKPADTNQRWKCMEVMTRAADQHPWFGMEQEYTLLDIDKHPLGWPKNGYPGPQGPYYCGVGANRVYGRDVVEAHYRACLCAGINISGENAKVMPAQWEFQVGPCEGITMGDDLWMARYLLHRVAEDFDVVVTLDPKPIPGDWNGAGMHTNFSTEAMRGPNGILEIESAIDKLSKVHEKHIKAYDPHAGKDNERRLTGHYETSSIHDFSAGVANRGASIRIPRGVAEEKTGYLEDRRPSSNADPYVVSERLVRTICLNEQ

SEQ ID NO: 21111 - DNA, 1450 bp, Glycine max (soybean)
  CDS (78)..(1145)
ccgtgaatctcagaattctctaaaagagatccttttctgctctttgaagaaagaagggtctttgcttgattttggagatgtctctgctctcagatctcatcaaccttaacctctccgataccaccgagaaggtgatcgcagagtacatatggatcggtggatcaggaatggacctgaggagcaaagcaaggactctcccaggaccagttagcgacccttcagagcttcccaagtggaactatgatggttccagcacaggtcaagctcctggtgaagacagtgaagcgatttatacccacaagccatttcaggatccattcagaaggggtaacaatatcttggttatctgtgatgcctacactcctgctggagaacctattcccactaacaagaggcacgctgctgccaaggttttcagccatcctgatgttgttgctgaagtgccatggtacggtattgaacaagaatacaccttgttgcagaaagatatccaatggcctcttgggtggcctgttggtggtttccctggacctcagggtccatactactgtggtgttggcgctgacaaggcttttggccgtgacattgttgacgcacactacaaagcctgtatttatgctggcatcaacatcagtggaattaatggagaagtgatgcccggtcagtgggaattccaagttggaccttcagttggaatctcagctggtgatgagatttgggcagctcgttacatcttggagaggatcactgagattgctggtgtggtggtttcctttgaccccaagccaattccgggtgattggaatggtgctggtgctcacacaaactacagcaccaagtccatgagagaagatggaggctatgaagtgatcaaagcagcaattgacaagttggggaagaagcacaaggagcacattgctgcttatggagaaggcaacgaacgtcgtttgacaggacgccacgaaaccgctgacatcaacaccttcttatggggagttgcaaaccgtggagcttctgttagggttgggagagacacagagaaagcagggaagggatattttgaggacagaaggcctgcttccaacatggacccatacgtggttacttccatgattgcagacacaaccattctgtggaagccatgagcaaaacctgcatgttttctccctttggatggaaaggaacagttatgcttttcttagtaggatttggtctctctctctttttaccttttgattggtactatggttggtgccttgttggttggtgcaactaactggcaagggttgttcattgttttcttctattcctttccctcgttttccgattgttacaatgacaataatttaatggttattatcagtcttgaaggttattatcagtcttgcaagaaatgctgattggaagtataataatatatatgaaattgtcatgttcattgagtaggaaa

SEQ ID NO: 21112 - protein, 355 aa, Glycine max (soybean)
MSLLSDLINLNLSDTTEKVIAEYIWIGGSGMDLRSKARTLPGPVSDPSELPKWNYDGSSTGQAPGEDSEAIYTHKPFQDPFRRGNNILVICDAYTPAGEPIPTNKRHAAAKVFSHPDVVAEVPWYGIEQEYTLLQKDIQWPLGWPVGGFPGPQGPYYCGVGADKAFGRDIVDAHYKACIYAGINISGINGEVMPGQWEFQVGPSVGISAGDEIWAARYILERITEIAGVVVSFDPKPIPGDWNGAGAHTNYSTKSMREDGGYEVIKAAIDKLGKKHKEHIAAYGEGNERRLTGRHETADINTFLWGVANRGASVRVGRDTEKAGKGYFEDRRPASNMDPYVVTSMIADTTILWKP

SEQ ID NO: 21113 - DNA, 1642 bp, Arabidopsis thaliana (mouse-ear cress)
  CDS (138)..(1430)
atattaaaaataaagattcttaaggctcttcatattttgctttttgtcaactctttctttgccatctgttacaaacaccaaactctcctgattcatcagttttaagtcttcttcaagtcccagggatcatcaatccaatggctcagatcttagcagcttctccaacatgtcagatgagagtgcctaaacactcatcagtcattgcatcatcatccaagttatggagctctgttgtgttgaaacagaagaagcagagcaacaacaaagtcagaggctttagagttcttgctctccaatctgataacagtactgtcaatagagttgagactcttctcaatttagacaccaaaccttactctgacaggatcattgctgaatacatttggatcggaggatctggaattgaccttagaagcaagtcaaggactatcgaaaagccggtggaggatccttctgagctacctaagtggaactatgatggttcgagtaccggtcaagcacctggtgaagatagtgaagtgattctatacccgcaagctatcttcagagatcctttccgtggaggcaataacatcttggttatctgtgatacttggacaccagctggtgagccaattccaacaaacaaacgtgctaaagctgctgagatcttcagtaacaagaaggtctctggcgaggttccatggttcggcattgaacaagagtacactttacttcagcaaaacgtcaaatggcctttaggttggcctgttggagcgttccctggtcctcagggtccttactactgtggagttggagctgacaagatttgggggcgtgacatttcagatgctcattacaaagcttgtttatatgctggaattaacattagtggtactaatggtgaagttatgcctggacagtgggagttccaagttggcccgagcgtaggaattgatgcaggtgatcatgtttggtgtgctagataccttcttgagagaatcacagaacaagctggtgttgtcctaacacttgatcccaaaccgatagagggtgactggaacggtgctggttgccacaccaattacagtaccaagagcatgagagaggaaggaggatttgaagtgatcaagaaggctatcttgaacctctcgcttcgccacaaggagcacatcagtgcctacggtgaaggaaacgagagaaggttgaccggaaagcacgagacagctagtattgaccagttctcatggggcgtggctaaccgtggatgctctattcgtgtgggacgtgacaccgaggcgaaaggaaaaggttacttagaagatcgccgtccagcatctaacatggacccatacattgtgacctcacttttggcagagaccacactcctgtgggagccaactcttgaggctgaagcccttgcagctcaaaagctttctttgaatgtttaaaattagtcgaaactttcatgaatctgatgaacacacgtgtctatgtggtctctcaagttgtttaaacattcggattaagacattgtttgttgtcttttcatttgcatttttaaaactcagaattgtatggacaatgttcatccttttatattggttcttttgactgttagagcatgtccaatggttgaatttaagctggttcttaactgttg

SEQ ID NO: 21114 - protein, 430 aa, Arabidopsis thaliana (mouse-ear cress)
MAQILAASPTCQMRVPKHSSVIASSSKLWSSVVLKQKKQSNNKVRGFRVLALQSDNSTVNRVETLLNLDTKPYSDRIIAEYIWIGGSGIDLRSKSRTIEKPVEDPSELPKWNYDGSSTGQAPGEDSEVILYPQAIFRDPFRGGNNILVICDTWTPAGEPIPTNKRAKAAEIFSNKKVSGEVPWFGIEQEYTLLQQNVKWPLGWPVGAFPGPQGPYYCGVGADKIWGRDISDAHYKACLYAGINISGTNGEVMPGQWEFQVGPSVGIDAGDHVWCARYLLERITEQAGVVLTLDPKPIEGDWNGAGCHTNYSTKSMREEGGFEVIKKAILNLSLRHKEHISAYGEGNERRLTGKHETASIDQFSWGVANRGCSIRVGRDTEAKGKGYLEDRRPASNMDPYIVTSLLAETTLLWEPTLEAEALAAQKLSLNV

SEQ ID NO: 21115 - DNA, 1617 bp, Rhizobium leguminosarum
  CDS (569)..(1549)
cagctgtcgagcgcggcatcgcagacttcggctgcctcgcgctccatcaggcgggcgcgttcgaaccggttggcgttgcgtatcgccttgacgggaaactggtagatcgttgcggattcacggtggaaaccggtgggcatgagatcgcctccattcagctcggcgtatcaacatttcaggaccgctaccatagcataatgcacatagtttatgcaaattgcacaaaataagagcaatgttgcaattgtagccggtcggcatgctgtctcgaccaaaagcttccgccaatttgtttaacgcttcatcatttcagcttaacgccgcaattttcatccggttccagacgggaaaagtgccgttttgatcgggcgataccgctgcgagcgttaaaaacagcccgattttccaaaaggggaaaaatcggtcggtatgctgattcgcgatttttctttcgcgtgggcccaaaactggcacgctacgtgcttttaaagcatcatccctggcgatcggatgcgcttgcccgagattgcctccggatttgctcacctttgtagcactgagagagtcgatgacaaaatttaagctcgagtacatttggctcgatgggtacacaccggtaccgaacctgcgtggcaagacgcagatcaaggaattcgatgaattcccgacgctggaacagcttccgctgtggggcttcgacggttcgtcgaccatgcaggccgagggcagctctgactgcgtgctgaagcccgtcgccatttatcccgatccggcccgcaccaacggcgctctcgtcatgtgcgaagtcatgatgccggatggtcacgcgcacgcatcgaatgcccgcgccaccatcctcgacgacgaagatgcctggttcggctttgagcaggagtatttcttctatcagaacggccgtccgctcggcttccctgagcagggctacccggctccgcagccttattacaccggcgtcggctactcgaacgttggcgatgtcgcccgcgaaatcgtcgaagagcacctcgacctctgcctcgctgccggcatcaaccacgaaggcatcaatgccgaagtggccaagggtcagtgggaatttcagattttcggcaagggctccaagaaggccgccgaccagatctggatggcacgctacctcctgcagcgcctgaccgaaaagtacggcatcgacatcgagtatcattgcaagccgctcggcgataccgactggaacggctcgggcatgcattgcaacttctcgaccaagtacctgcgcgaagtcggcggcaaggaatatttcgaagcgctgatggcgagttccgacaagaacctgatggaccacatcgcggtctacggccccgataacgacaagcgcctgaccggcaagcacgagactgctccgtggaacaagttctcctacggcgttgccgaccgtggtgcttcgatccgcgtgccgcactccttcatcaagaacgactacaagggctatctggaagatcgccgcccgaactcgcaaggcgacccctaccagatcgttcgcaggttctgaagacgatctcggaagttccgactgcaagctcggcttctctggccgcctgacctcccaacggcgctaga

SEQ ID NO: 21116 - protein, 326 aa, Rhizobium leguminosarum
MTKFKLEYIWLDGYTPVPNLRGKTQIKEFDEFPTLEQLPLWGFDGSSTMQAEGSSDCVLKPVAIYPDPARTNGALVMCEVMMPDGHAHASNARATILDDEDAWFGFEQEYFFYQNGRPLGFPEQGYPAPQPYYTGVGYSNVGDVAREIVEEHLDLCLAAGINHEGINAEVAKGQWEFQIFGKGSKKAADQIWMARYLLQRLTEKYGIDIEYHCKPLGDTDWNGSGMHCNFSTKYLREVGGKEYFEALMASSDKNLMDHIAVYGPDNDKRLTGKHETAPWNKFSYGVADRGASIRVPHSFIKNDYKGYLEDRRPNSQGDPYQIVRRF

SEQ ID NO: 21117 - DNA, 1575 bp, Brassica napus (rape)
  CDS (95)..(1381)
ttcatatttgtcaactcttcctttgccatttgttgcaaacactcaagtctcctgatatcagagttagagtcttcttcaagttccagggataaaaatggcgcagatcttggcagcttctccaacatgtcaaatgagattgactaaacccagctccattgcatcgtcaaagttatggaactcggttgtgttgaaacagaagaaacagagcagcagcaaagtcagaagcttcaaagtgatggctctccaatctgataacagcacaatcaacagagttgagagtcttctcaatctagacaccaaacctttcactgaccggatcatcgctgagtacatctggattggcggatctggaattgaccttaggagcaagtcaaggacgcttgaaaagcccgtggaagatccttctgaacttcccaagtggaactatgatggttcaagtaccggtcaagcacctggtgaagatagtgaagtgattctctatccgcaagctatcttcagggatcctttccgtggaggcaataacatattggttatctgtgatacctacacaccagctggtgagccaattccaacaaacaaacgtgcaagagctgctgagattttcagcaacaagaaggtcaatgaagagattccatggtttggcattgaacaagagtacactttacttcagccaaacgtgaactggcctttgggttggcccgttggagcgtatcctggtccccagggtccttactactgtggagttggagctgaaaagtcttggggccgtgacatttcagatgctcattacaaagcttgtttgtatgctggaattaacatcagtggtactaatggtgaagttatgccaggacagtgggaattccaagttggcccgagcgtaggaatcgaagcaggtgatcacgtttggtgtgctagataccttcttgagagaatcacagaacaagctggtgttgtcctaacacttgatcccaaaccgattgagggtgactggaacggtgctggttgccataccaattacagcacaaagagcatgagagaggacggaggatttgaggtgattaaaaaggcaatcttgaacctctcgcttcgtcacatggagcacatcagtgcctacggtgaaggcaatgagagaaggttgactggaaagcacgagacagccagtatcgaccaattctcatggggagtggctaaccgtggatgctcaattcgtgtgggacgtgataccgagaagaaaggaaaaggttacttggaagatcggcgtccagcgtctaacatggacccatacattgtgacttcactgttggcagagaccacacttctctgggagccaacccttgaggctgaagcacttgctgctcagaagctttctttaaaagtttaatttattaatgaacacacatgtctgtttatgtggtcttcccgggatcatcagtcttgtttagaacacgtgttcggattacgacattcttgtctcttttttttcatttgcattgtttaaaaaacccagaatttcgtggacaatgttcatccttttctattggttgtttatggtcttaaaaaaaaaaaaaaaaaaaa

SEQ ID NO: 21118 - protein, 428 aa, Brassica napus (rape)
MAQILAASPTCQMRLTKPSSIASSKLWNSVVLKQKKQSSSKVRSFKVMALQSDNSTINRVESLLNLDTKPFTDRIIAEYIWIGGSGIDLRSKSRTLEKPVEDPSELPKWNYDGSSTGQAPGEDSEVILYPQAIFRDPFRGGNNILVICDTYTPAGEPIPTNKRARAAEIFSNKKVNEEIPWFGIEQEYTLLQPNVNWPLGWPVGAYPGPQGPYYCGVGAEKSWGRDISDAHYKACLYAGINISGTNGEVMPGQWEFQVGPSVGIEAGDHVWCARYLLERITEQAGVVLTLDPKPIEGDWNGAGCHTNYSTKSMREDGGFEVIKKAILNLSLRHMEHISAYGEGNERRLTGKHETASIDQFSWGVANRGCSIRVGRDTEKKGKGYLEDRRPASNMDPYIVTSLLAETTLLWEPTLEAEALAAQKLSLKV

SEQ ID NO: 21119 - DNA, 1423 bp, Pinus sylvestris (Scotch pine)
  CDS (34)..(1107)
ttcccttcctctggtttgttttggagagtggccatgtcgagcgtattaacagaccttctcaaccttgacctgagcgacgtgacagagaaggtcattgcagagtatatatggattggaggatcaggaatggatatgcgcagtaaagccagatctctgtcaggacctgtgagtagcgttaaagagcttcccaaatggaactatgacggctccagcactggacaggctcaaggacatgacagcgaagtcattctatatccacaagctatcttccgtgatccatttcgcagaggaaagcacattttggtaatctgtgatgcctactctcctaatgggactgctattccttccaacaagagggctgcagcagcgaaaatttttaacgaaaaggcggttagtgatgaagagacatggtacgggcttgaacaagaatatacactgttgcaaaaggacgtcaaatggcctcttggctggccaattggtggctaccccggtcctcagggcccatattactgtggagttggagctgacaaagcctggggacgagacattgttgatgcccattataaggcttgtctctattcaggaatcaatatcagtggcatcaatggagaagtcatgccagggcagtgggaatttcaagtaggtccgtcagtgggtatctcagcagcagatgagctgtggtgtgctcgttttattatggagaggattacagaaaaggcgggtgtcgttctgtcctttgatcccaagccaattgagggggactggaatggtgctggatgccacacaaattacagcaccaagtccatgcgcaaggagggaggcttcgaagtaattaagaaagcaatagaaaaactgaagttgaggcataaggagcatatttctgcctatggggagggaaatgagagacgcctcactggtcggcacgagacagcagacatgaataccttttcctggggtgttgcaaatcgaggagcttcagttagagtgggccgggacacagaaaaagaaggaaaaggttattttgaggaccgtcgacctgcttcaaacatggatccatacatagtgacttctatgattgctgagacgaccattctatggaaaccttaaattacaaagtggaggccagttacacgcgtggtcgtggtgctttgctttggaggccagcgtcactgataagctaatatgtatgtaaatgtgatgccaatgtttaagtaggttggtaactttgctttggttgtgggtagacctgaactttggtcaaacaatttcctcttgctatatggatatatatatatttttgtatttgttctacttgtaatatggcgagggctttaaaagactctcttttacctttatttattccgttgtggaagatgtattcgacaaattgtttagaatgtttgaatatgatatattctttgtg

SEQ ID NO: 21120 - protein, 357 aa, Pinus sylvestris (Scotch pine)
MSSVLTDLLNLDLSDVTEKVIAEYIWIGGSGMDMRSKARSLSGPVSSVKELPKWNYDGSSTGQAQGHDSEVILYPQAIFRDPFRRGKHILVICDAYSPNGTAIPSNKRAAAAKIFNEKAVSDEETWYGLEQEYTLLQKDVKWPLGWPIGGYPGPQGPYYCGVGADKAWGRDIVDAHYKACLYSGINISGINGEVMPGQWEFQVGPSVGISAADELWCARFIMERITEKAGVVLSFDPKPIEGDWNGAGCHTNYSTKSMRKEGGFEVIKKAIEKLKLRHKEHISAYGEGNERRLTGRHETADMNTFSWGVANRGASVRVGRDTEKEGKGYFEDRRPASNMDPYIVTSMIAETTILWKP

SEQ ID NO: 21121 - DNA, 1359 bp, Zea mays (maize)
  CDS (10)..(1083)
gcccgagtgatggccagcctcaccgacctcgtcaacctcgacctgagtgactgcaccgacaggatcatcgccgagtacatctggattggaggaaccgggatagacctcaggagcaaagcgaggacggtgaaaggccccatcaccgacccgatccagctgccgaaatggaactacgacggctccagcaccgggcaggctcccggagaggacagcgaagtcatcctctaccctcaagccattttcaaggacccgttcaggaagggtaaccacatccttgtgatgtgtgactgctacacgccacaaggcgagccaatccccaccaacaagaggtacagcgccgccaaggttttcagccaccccgacgtcgcagctgaggtgccgtggtacggtattgagcaggagtacaccctccttcagaaggacgtgagctggcccctcggctggcccgttggtggataccctggtccccagggaccatactactgcgccgccggtgccgacaaggcctttgggcgcgacgtggttgacgcccactacaaggcctgcctctacgccggcatcaacatcagcggcatcaacggcgaagtcatgcctggacagtgggagttccaagtggggccgtccgttgggatctctgccggcgacgagatatgggtcgcccgctacattctcgagaggatcaccgagatggccggaatcgtcctctccctcgacccgaagccgatcaagggcgactggaacggcgccggcgcccacaccaactacagcaccaagtcgatgagggaggccgggggatacgaggtcatcaaggcggcgatcgacaagctggggaagaggcacaaggagcacatcgccgcgtacggcgagggcaacgagcgccgcctcacgggccgccacgagaccgccgacatcaacaccttcaaatggggcgtggcgaaccgcggcgcgtccatccgcgtcggccgcgacaccgagagggagggcaagggctacttcgaggaccgcaggccggcgtccaacatggacccctacgtcgtcaccggcatgatcgccgagaccaccatcctgtggaatggaaactgatcaagcatgtgcattctcgagggagcccactgtttttcttctgcacaacgcatccgccgtggtgtcgctttggttttgaaatttagattccgttgtcctaaaatttatcactacggtctccagtgtattgctcgggaacgaatgaataacgactgcgatgtttgtttttttttttgctggcgtagtagatgtacgtttggctgtgcttccagtttattgggtaaatgaaaaaatgtaatggtctaccggtcttaaaatagtagtcattttagctct

SEQ ID NO: 21122 - protein, 357 aa, Zea mays (maize)
MASLTDLVNLDLSDCTDRIIAEYIWIGGTGIDLRSKARTVKGPITDPIQLPKWNYDGSSTGQAPGEDSEVILYPQAIFKDPFRKGNHILVMCDCYTPQGEPIPTNKRYSAAKVFSHPDVAAEVPWYGIEQEYTLLQKDVSWPLGWPVGGYPGPQGPYYCAAGADKAFGRDVVDAHYKACLYAGINISGINGEVMPGQWEFQVGPSVGISAGDEIWVARYILERITEMAGIVLSLDPKPIKGDWNGAGAHTNYSTKSMREAGGYEVIKAAIDKLGKRHKEHIAAYGEGNERRLTGRHETADINTFKWGVANRGASIRVGRDTEREGKGYFEDRRPASNMDPYVVTGMIAETTILWNGN

SEQ ID NO: 21123 - DNA, 1369 bp, Zea mays (maize)
  CDS (103)..(1209)
cgaaagcacacacggatcaatcacactcactcgcggccattgtcctgcccgtgcgtgctctgccttttcaggcgatcgaccaaccaacttctcgtcactgccatggctctgctctccgacctcatcaacctcgacctctcgggccgcaccgggaagatcatcgccgagtacatctgggttggcggttccgggatggacgtcaggagcaaagccaggacgctgtccggacctgttgatgaccccagcaagcttccgaagtggaacttcgacggctccagcaccggccaagctccgggcgacgacagcgaagtcatcctttgccctcgggccatcttcagggacccgttcaggaaggggcagaacatactggtcatgtgcgactgctacgagccgaacggggagccgatcccgagcaacaagcggcatggggccgcgaagatctttagccaccctgacgtcaaggctgaggaaccatggttcgggattgagcaggagtacacccttctccagaaggacaccaagtggcctctcggttggccgctggcgtaccctggccctcagggaccttactactgcgccgccggagcggacaagtcctacgggcgggacatcgtggactgcgcatacaaggcctgcctctacgccggcatcgacatcagtggcatcaacggggaggtcatgccggggcagtgggagttccaggtggcccctgccgtcggcgtctcggccggcgaccagctctgggtggctcgctacattcttgagaggatcaccgagatcgccggcgtggttgtctccttcgaccccaagccaattccgggggactggaatggcgctggtgcacacaccaactacagcaccaagtcgatgaggagcgacggcgggtacgaggtgatcaagaaggcgatcggcaagctgggcctccggcaccgggagcacatcgccgcgtacggggacggcaacgagcgcccgctcaccggccgccacgagaccgccgacatcaacaccttcgtctggggcgtgccgaaccgcggggcgtcggtgcgggtgggccgagacaccgagaaggaaggcaaaggctacttcgaggaccggaggccggcgtccaacatggacccgtacgtggtgacctgcctgatcgcggagacaaccatgctgtgggagcccagccactccaacggcgacggcaagggcgccgcggctccttgatttgattctgcggagactgagctctgtgtgtgagccggcctgcgtagatggcaaatgggactgaccctgtcagaaacttgagatgaccataataatagctgcagtgtgctcgttctggggttggataagacccaagaactttttttagctttcttcgaac

SEQ ID NO: 21124 - protein, 368 aa, Zea mays (maize)
MALLSDLINLDLSGRTGKIIAEYIWVGGSGMDVRSKARTLSGPVDDPSKLPKWNFDGSSTGQAPGDDSEVILCPRAIFRDPFRKGQNILVMCDCYEPNGEPIPSNKRHGAAKIFSHPDVKAEEPWFGIEQEYTLLQKDTKWPLGWPLAYPGPQGPYYCAAGADKSYGRDIVDCAYKACLYAGIDISGINGEVMPGQWEFQVAPAVGVSAGDQLWVARYILERITEIAGVVVSFDPKPIPGDWNGAGAHTNYSTKSMRSDGGYEVIKKAIGKLGLRHREHIAAYGDGNERPLTGRHETADINTFVWGVPNRGASVRVGRDTEKEGKGYFEDRRPASNMDPYVVTCLIAETTMLWEPSHSNGDGKGAAAP

SEQ ID NO: 21125 - DNA, 1317 bp, Zea mays (maize)
  CDS (63)..(1133)
caatcccacaccaccaccacctcctccggtccccaacccctgtcgcaccgcagccgccggccatggcctgcctcaccgacctcgtcaacctcaacctctcggacaccaccgagaagatcatcgcggaatacatatggatcggtggatctggcatggatctcaggagcaaagcaaggaccctctccggcccggtgaccgatcccagcaagctgcccaagtggaactacgacggctccagcacgggccaggcccccggcgaggacagcgaggtcatcctgtacccgcaggccatcttcaaggacccattcaggaggggcaacaacatccttgtgatgtgcgattgctacaccccagccggcgagccaatccccaccaacaagaggtacaacgccgccaagatcttcagcagccctgaggtcgccgccgaggagccgtggtatggtattgagcaggagtacaccctcctccagaaggacaccaactggccccttgggtggcccatcggtggcttccccggccctcagggtccttactactgtggaatcggcgccgaaaagtcgttcggccgcgacatcgtggacgcccactacaaggcctgcttgtatgcgggcatcaacatcagtggcatcaacggggaggtgatgccagggcagtgggagttccaagtcgggccttccgtgggtatttcttcaggcgaccaggtctgggtcgctcgctacattcttgagaggatcacggagatcgccggtgtggtggtgacgttcgacccgaagccgatcccgggcgactggaacggcgccggcgcgcacaccaactacagcacggagtcgatgaggaaggagggcgggtacgaggtgatcaaggcggccatcgagaagctgaagctgcggcacagggagcacatcgcggcctacggcgagggcaacgacggccggctcaccggcaggcacgagaccgccgacatcaacacgttcagctggggcgtggccaaccgcggcgcgtcggtgcgcgtgggccgggagacggagcagaacggcaagggctacttcgaggaccgccgcccggcgtccaacatggacccctacgtggtcacctccatgatcgccgagaccaccatcatctggaagccctgagcgccgcggccgttgcgttgcagggtccccgaagcgattgcaaagccactgttccttccgttctgtttgcttattattgttattatctagctagatcatccggggtcaggtcgtcgtggtgtgccaaaacagaacacagaaagaggaagaagaaaaaaaaaacaagacgtgtggcgtttatgtt

SEQ ID NO: 21126 - protein, 356 aa, Zea mays (maize)
MACLTDLVNLNLSDTTEKIIAEYIWIGGSGMDLRSKARTLSGPVTDPSKLPKWNYDGSSTGQAPGEDSEVILYPQAIFKDPFRRGNNILVMCDCYTPAGEPIPTNKRYNAAKIFSSPEVAAEEPWYGIEQEYTLLQKDTNWPLGWPIGGFPGPQGPYYCGIGAEKSFGRDIVDAHYKACLYAGINISGINGEVMPGQWEFQVGPSVGISSGDQVWVARYILERITEIAGVVVTFDPKPIPGDWNGAGAHTNYSTESMRKEGGYEVIKAAIEKLKLRHREHIAAYGEGNDGRLTGRHETADINTFSWGVANRGASVRVGRETEQNGKGYFEDRRPASNMDPYVVTSMIAETTIIWKP

SEQ ID NO: 21127 - DNA, 1490 bp, Zea mays (maize)
  CDS (85)..(1152)
ccacatcctcccctcattcctccttgggttcccagcccgtgcgccccgcctgtcgcagtgccagtcgcgccgcagccgccggccatggcctgcctcaccgacctcgtcaacctcaacctctcggacaccacagagaagatcatcgccgagtacatatggatcggtggatctggcatggatctcaggagcaaagccaggaccctcccgggcccggtgaccgatcccagcaagctgcccaagtggaactacgacggctccagcaccggccaggcccccggcgaggacagcgaggtcatcctgtacccgcaggccatcttcaaggacccattcaggaggggcaacaacatccttgtcatgtgcgattgctacaccccagctggcgagccaattcccaccaacaagaggtacagcgccgccaagatcttcagcagccctgaggtcgctgccgaggagccctggtatggtatcgagcaggagtacaccctccttcagaaggacaccaactggcccctcgggtggcctattggcggcttccctggccctcagggtccttactactgtggaatcggcgcggagaaatcgttcgggcgtgacatagtcgacgcccactacaaggcctgcctgtacgcaggcatcaacatcagtggcatcaacggggaggtcatgccggggcagtgggagttccaggtcggaccgtccgtcggcatctcttcgggcgatcaggtgtgggttgctcgctacattcttgagaggatcaccgagatcgccggcgtggtggtgacgttcgacccgaagccgatcccgggcgactggaacggcgcgggcgcccacaccaactacagcaccgagtccatgaggaaggagggcgggtacgaggtgatcaaggcggccatcgagaagctgaagctgcggcacaaggagcacatcgcggcctacggcgagggcaacgagcgccggctcaccggcaggcacgagaccgccgacatcaacaccttcagctggggagtcgccaaccgtggcgcgtcggtggccgtgggccagacggagcagaacggcaagggctacttcgaggaccgccggccggcgtccaacatggatccctacgtggtcacctccatgatcgccgagaccaccatcgtctggaagccctgaggcatcccgtggccgtgtcgtgtcggtttgctccgcgtacggcgctggccgttgcatcgcagggcccagcggttgcgcaactattttcccttccccgttccgtttgcttgtactactactctaccgctagtcctgcatagcattttagctagaacacaacaacagccaaaaaaaaacattgttgcttgcttcgacttcgacgcttcccaccactagttccattccatgccgtccgtccacttccttcctgtgtaatcctcctccaataatagacgtgtcatgctgcatcctctgcattgtataaaagaaagtggtgtaatccttttgctggcgcctcc

SEQ ID NO: 21128 - protein, 355 aa, Zea mays (maize)
MACLTDLVNLNLSDTTEKIIAEYIWIGGSGMDLRSKARTLPGPVTDPSKLPKWNYDGSSTGQAPGEDSEVILYPQAIFKDPFRRGNNILVMCDCYTPAGEPIPTNKRYSAAKIFSSPEVAAEEPWYGIEQEYTLLQKDTNWPLGWPIGGFPGPQGPYYCGIGAEKSFGRDIVDAHYKACLYAGINISGINGEVMPGQWEFQVGPSVGISSGDQVWVARYILERITEIAGVVVTFDPKPIPGDWNGAGAHTNYSTESMRKEGGYEVIKAAIEKLKLRHKEHIAAYGEGNERRLTGRHETADINTFSWGVANRGASVAVGQTEQNGKGYFEDRRPASNMDPYVVTSMIAETTIVWKP

SEQ ID NO: 21129 - DNA, 1483 bp, Zea mays (maize)
  CDS (48)..(1319)
gggcggcggccggtccgtgtccgtgtccgtcgacggttggttcgggaatggcgcaggcggtggtgccggcgatgcagtgccgggtcggagtgaaggcggcggcggggagggtgtggagcgccggcaggactaggaccggccgcggcggcgcctcgccggggttcaaggtcatggccgtcagcacgggcagcaccggggtggtgccgcgcctcgagcagctgctcaacatggacaccacgccctacaccgacaaggtcatcgccgagtacatctgggtcggaggatctggaatcgacatcagaagcaaatcaaggacgatttcgaaacccgtggaggatccctcagaactaccaaaatggaactacgatggatctagcacaggacaagccccgggagaagacagtgaagtcattctatacccccaggctatcttcaaggacccattccgaggtggcaacaacgttttggttatctgtgacacctacacgccacagggggaaccccttccaactaacaaacgccacagggctgcgcaaattttcagcgacccaaaggtcggtgaacaagtgccatggtttggcatagagcaagagtacactttgctccagaaagatgtaaattggcctcttggttggcctgttggaggcttccctggtccccagggtccatactactgtgccgtaggagccgacaaatcatttggccgtgacatatcagatgctcactacaaggcatgcctctacgctggaatcaacattagtggaacaaacggggaggtcatgcctggtcagtgggagtaccaagttggacctagtgttggtattgaagcaggagatcacatatggatttcgagatacattctcgagagaatcacagagcaagctggggttgtccttacccttgatccaaaaccaattcagggtgactggaacggagctggctgccacacaaattacagcacaaagaccatgcgcgaagacggcgggtttgaagagatcaagagagcaatcctgaacctttctctgcgccatgatctgcatattagtgcatacggagaaggaaatgaaagaagattgactgggaaacatgagactgcgagcatcggaaccttctcatggggtgtggcaaaccgcggctgctctatccgtgtggggcgggataccgaggcaaaagggaaaggttacctggaagaccgtcggccggcatcaaacatggacccgtacattgtgacggggctactggccgagaccacgatcctctggcagccatccctcgaggcggaggctcttgccgccaagaagctggcgctgaaggtgtgaagcagctgaaggatggttcaggcaccaatataaaccggtccgcgacaagattgatctttgtgtccatggccgttgggtcttgcgactctctgctcggcggtgccactctgtacaaaatcacggctgtctttgattcatcggatattcggatacgtttgtttgtt

SEQ ID NO: 21130 - protein, 423 aa, Zea mays (maize)
MAQAVVPAMQCRVGVKAAAGRVWSAGRTRTGRGGASPGFKVMAVSTGSTGVVPRLEQLLNMDTTPYTDKVIAEYIWVGGSGIDIRSKSRTISKPVEDPSELPKWNYDGSSTGQAPGEDSEVILYPQAIFKDPFRGGNNVLVICDTYTPQGEPLPTNKRHRAAQIFSDPKVGEQVPWFGIEQEYTLLQKDVNWPLGWPVGGFPGPQGPYYCAVGADKSFGRDISDAHYKACLYAGINISGTNGEVMPGQWEYQVGPSVGIEAGDHIWISRYILERITEQAGVVLTLDPKPIQGDWNGAGCHTNYSTKTMREDGGFEEIKRAILNLSLRHDLHISAYGEGNERRLTGKHETASIGTFSWGVANRGCSIRVGRDTEAKGKGYLEDRRPASNMDPYIVTGLLAETTILWQPSLEAEALAAKKLALKV

SEQ ID NO: 21131 - DNA, 1400 bp, Brassica napus (rape)
  CDS (68)..(1138)
caaaaaccacattatccgagatttgagtatatttcattgcaaccttcttgtcattttctctgtaaccatgagtcttctgaccgatctcgttaaccttgacctctcagacaacactgagaaaatcatcgctgaatacatatgggttggtggttcaggaatggatatgagaagcaaagccaggactctccctggacctgtgaccgatccatcaaagctcccaaaatggaattatgatggttcaagcactggccaagctcctggtgaagacagcgaagtgatcttataccctcaagcgattttcaaagatccgttccgtagaggcaacaacattcttgtcatgtgtgatacttacacccctgcgggtgaaccaatccctacgaacaagagacatgctgcagctcagatctttagcaaccctgatgttgttgctgaagtgccatggtatggaatcgaacaagaatacactctgttgcagaaagatgtgaattggcctgtcggatggcccattggtggattccccggccctcagggaccatactactgcagtgttggagctgacaaatcttttggaagagacattgttgatgctcactacaaggcttgtttgtatgctggaattaacatcagtggaatcaatggagaagtcatgcctggtcagtgggagttccaagtcggaccgtcggttggtatctcagctgctgatgaagtgtggattgctcgttttattttggagaggatcacagagattgctggtgtggttgtatcttttgacccaaaaccaattccgggtgactggaacggagctggtgctcacaccaattacagtactaaatcgatgagggaggaaggaggatacgagataatcaagaaggcaattgataagctcggactgagacacaaggagcacatttctgcttacggtgaaggcaacgagcgtcgtctcactggacaccatgaaactgctgatatcaacactttcaaatggggtgttgcaaaccgtggagcatcaatccgtgtaggacgtgacacggagaaggaagggaaaggatactttgaggataggaggccagcttccaacatggacccttacactgtaacttccatgattgcagagactacacttctttggaatccttgaagaaatatgacaataatataacttgaatctggtttcaagtttgtgtttctacagtttattaagcaattaccgggttgatactgccggagtttgtggtttgaggcctttcttttaatctctttgtgttttggggtttgtgattggagcaaaagccctgatttgctctgtttctttgaccttttatttgaaccctttgtatttgtattaataaggcgatctgaaaaggccttttcatgtttctatcaaaaaaaaaaaaaaaaaa

SEQ ID NO: 21132 - protein, 356 aa, Brassica napus (rape)
MSLLTDLVNLDLSDNTEKIIAEYIWVGGSGMDMRSKARTLPGPVTDPSKLPKWNYDGSSTGQAPGEDSEVILYPQAIFKDPFRRGNNILVMCDTYTPAGEPIPTNKRHAAAQIFSNPDVVAEVPWYGIEQEYTLLQKDVNWPVGWPIGGFPGPQGPYYCSVGADKSFGRDIVDAHYKACLYAGINISGINGEVMPGQWEFQVGPSVGISAADEVWIARFILERITEIAGVVVSFDPKPIPGDWNGAGAHTNYSTKSMREEGGYEIIKKAIDKLGLRHKEHISAYGEGNERRLTGHHETADINTFKWGVANRGASIRVGRDTEKEGKGYFEDRRPASNMDPYTVTSMIAETTLLWNP

SEQ ID NO: 21133 - DNA, 1370 bp, Sus scrofa domestica (domestic pig)
  CDS (118)..(1239)
aattccggagcggatggtttaaggagcaccctcggcctcctcgcctctccgctccgattctcgctctcgcggcctgcccgccctgcctcctgctcgccgcccagaacaccgtccaccatggccacctcagcgagctcccacttgaacaaaggcatcaagcaggtgtacatgtccctgccccagggcgagaaagtccaagctatgtacatctggattgacggtacgggagagggactgcgctgcaagacccggaccctggattctgagcccaagtgtatagaagagttgcccgagtggaatttcgatggctctagtacttttcagtctgaaggctccaacagtgacatgtatcttgtccctgctgccatgtttcgggaccctttccgcaaggaccccaacaagctggtgttctgtgaggtcttcaagtacaaccgaaagcctgcagagaccaacttaaggcacacctgtaaacggataatggacatggtgagcaaccagcacccctggtttggaatggagcaggaatatactctcatgggcacagatggacacccctttggttggccttccaatggcttccctgggccccaaggtccgtactattgtggtgttggagcagacaaagcctatggcagggacattgtggaggctcactaccgggcctgcttgtatgccggcatcaagattgggggcaccaatgccgaggtcatgcccgcccagtgggaattccagatcggaccctgtgaaggaatcgacatgggagatcacctctgggtggcccgattcatcttgcatcgtgtgtgcgaagacttcggagtgatcgccacctttgatcctaagcccattcctgggaactggaatggtgccggctgccacaccaactttagcaccaaggccatgcgagaggagaatggtctgaagtacatcgaggaggccatcgagaagctaagcaagcggcaccagtaccacatccgagcctacgatcccaaggggggcctggacaacacacggcgcctaactggattccatgaaacctccaacatcaacgacttttctgccggcgtggccaaccgtggcgctagcatccgcattccccggactgggggccaggagaagaagggttacttcgaagaccgtcgcccttctgccaactgtgacccctttgcggtgacagaagctctcatccgcacgtgtctcctcaacgaaactggcgacgagcccttccagtacaaaaactaagtggactagacgggcagccatcaaaacccctccaattctacaccgcccccccccccctcgccctctcaactgtcgtaatagctgtaactcaaagggcggaatagcaaggtcttttttattcctcaaaaaaa

SEQ ID NO: 21134 - protein, 373 aa, Sus scrofa domestica (domestic pig)
MATSASSHLNKGIKQVYMSLPQGEKVQAMYIWIDGTGEGLRCKTRTLDSEPKCIEELPEWNFDGSSTFQSEGSNSDMYLVPAAMFRDPFRKDPNKLVFCEVFKYNRKPAETNLRHTCKRIMDMVSNQHPWFGMEQEYTLMGTDGHPFGWPSNGFPGPQGPYYCGVGADKAYGRDIVEAHYRACLYAGIKIGGTNAEVMPAQWEFQIGPCEGIDMGDHLWVARFILHRVCEDFGVIATFDPKPIPGNWNGAGCHTNFSTKAMREENGLKYIEEAIEKLSKRHQYHIRAYDPKGGLDNTRRLTGFHETSNINDFSAGVANRGASIRIPRTGGQEKKGYFEDRRPSANCDPFAVTEALIRTCLLNETGDEPFQYKN

SEQ ID NO: 21135 - DNA, 1433 bp, Glycine max (soybean)
  CDS (70)..(1137)
tcgatccgggaagagaaagaaatttgttctctctaaagagtctccgctgaactttttggtttcttgaagatgtcgttactctccgatcttatcaaccttaacctctccgacatcaccgataaagtgatcgcagagtacatatgggttggtggatctggcatggatatgaggagcaaagcaaggacactctcaggactggttaatgacccttcagcacttcccaagtggaactatgatggttccagcacaggtcaagctcctggagaagatagtgaagtgatctatatccacaagcaatttcgggatccattcagaaggggtaacaatatcctggttatgtgtgatgcttacactcctgctggggaacccattcccaccaacaagagaaataaagctgcaaagatattcatacatccggatgttgctgctgaagaaccctggtatggtcttgagcaggaatatacattattgcagaaagatgtccaatggcctcttggatggcctcttggtggtttcctgggcccccagggaccatactattgtggaactggtgctaacaaggcttttgggcgtgatattgttgactcacattacaaagcatgtatttatgcgggatttaacataagtggaatcaatggagaagtgatgccaggtcagtggggattccaagttggtccatcggttggcatctcagctgctgacgagttgtgggttgctcgttacattttggagaggatcaccgagattgctggactggtgctttcctttgaccctaagccaattcagggtgattggaatggtcctggtgctcacacaaattacagtaccaagttgatgagagacgatggtggctatgaaatcatcaaaaaagcaattgctaagttggaaaagaggcacaaagagcacattgctgcttacggagaaggcaatgaacgtcgtttgaccggacccgacgagacggctgacatgaacacctttttatggggagttgcaaaccgtggtgcttctgttagggtagggagacagactctaaaggcagggaagggatactttgaggagaggaggcctgcctctaacatggacccttatgtggtcacttccatgattgctgacacaactattctttggaaaccataagcaacgtcaaagaatcacatggtgccttccgcatagcattgttgtttagatggtcaatttgtttttctatgtttttgtgtgcattctagttgtgactacctcgcctgttgttaggatattgtttgttggtggtactcatgattaccaagcgaggaattgttgtttcattttcttaatgtacgttttaagtgttccaataatgtgtaatggccctcaagtattgttatttgctgcgaatttatattgtgaagcatctcatgatttctctttgagcaatcaagttcttattaactgta

SEQ ID NO: 21136 - protein, 355 aa, Glycine max (soybean)
MSLLSDLINLNLSDITDKVIAEYIWVGGSGMDMRSKARTLSGLVNDPSALPKWNYDGSSTGQAPGEDSEVIYIHKQFRDPFRRGNNILVMCDAYTPAGEPIPTNKRNKAAKIFIHPDVAAEEPWYGLEQEYTLLQKDVQWPLGWPLGGFLGPQGPYYCGTGANKAFGRDIVDSHYKACIYAGFNISGINGEVMPGQWGFQVGPSVGISAADELWVARYILERITEIAGLVLSFDPKPIQGDWNGPGAHTNYSTKLMRDDGGYEIIKKAIAKLEKRHKEHIAAYGEGNERRLTGPDETADMNTFLWGVANRGASVRVGRQTLKAGKGYFEERRPASNMDPYVVTSMIADTTILWKP

SEQ ID NO: 21137 - DNA, 1354 bp, Brassica napus (rape)
  CDS (62)..(1132)
ttcgattttatctgtcatttgcttcaactgttactatcgaccaatctcggtgttcgtagccatgagtcttcttacagatctcgttaaccttaacctctcagagaccactgacaaaatcattgcggaatacatatgggttggaggttcaggaatggatatgagaagcaaagccaggactcttcctggaccagtgagtgacccttcggagctaccaaagtggaactatgatggctcaagcacaggccaagctcctggtgaagacagtgaagtcatcttataccctcaagccatcttcaaagatcctttccgtagaggcaataacattcttgtcatgtgcgatgcttacactccagcgggcgaaccaatcccaacaaacaaaagacacgctgcggctaaggtctttagccaccctgatgttgtagctgaagtgccatggtatggtattgagcaagagtatactttacttcagaaagatgtgaactggcctcttggttggcctattggcggcttccctggccctcagggaccatactattgtagtgttggagcagataaatcttttggtagagacatcgttgatgctcactacaaggcctgcttatacgctggcatcaatattagtggcatcaacggagaagtcatgcctggtcagtgggagttccaagttggtccagctgttggtatctcggccggtgatgaaatttgggtcgcacgtttcattttggagaggatcacagagattgctggtgtggtggtatcttttgacccaaaaccgattcccggtgactggaatggtgctggtgctcactgcaactatagtaccaagtcaatgagggaagatggtggttacgagattatcaagaaggcaattgataaactgggactgagacacaaggaacacattgctgcttatggtgaaggcaatgagcgtcgtctcacgggtcaccacgagactgctgacatcaacactttcctctggggtgttgcgaaccgtggagcatcaatccgtgtaggacgtgacacagagaaagaagggaaaggatactttgaggataggaggccagcttcgaacatggatccttacattgtgacttccatgattgcagagaccacaatcctctggaaaccttgatcagatcaaagaagcttgttgaagaatgttcactccgtttgggtttcttgcatggttcaacgtttgtgtgtttctctatcaagcattgtctcagagcaagtcaagagatttgctttgttcttatggcttttattgtttcacatccattgaaaacatctctttgtatcaatttatgaataaagtgtggtttggttaaaaaaaaaaaaaaaaaaaaaaaaaaaa

SEQ ID NO: 21138 - protein, 356 aa, Brassica napus (rape)
MSLLTDLVNLNLSETTDKIIAEYIWVGGSGMDMRSKARTLPGPVSDPSELPKWNYDGSSTGQAPGEDSEVILYPQAIFKDPFRRGNNILVMCDAYTPAGEPIPTNKRHAAAKVFSHPDVVAEVPWYGIEQEYTLLQKDVNWPLGWPIGGFPGPQGPYYCSVGADKSFGRDIVDAHYKACLYAGINISGINGEVMPGQWEFQVGPAVGISAGDEIWVARFILERITEIAGVVVSFDPKPIPGDWNGAGAHCNYSTKSMREDGGYEIIKKAIDKLGLRHKEHIAAYGEGNERRLTGHHETADINTFLWGVANRGASIRVGRDTEKEGKGYFEDRRPASNMDPYIVTSMIAETTILWKP

SEQ ID NO: 21139 - DNA, 1333 bp, Raphanus sativus (radish)
  CDS (37)..(1101)
ttcacctaaacaaacactgattctcgtaacgccgccatgtctctcctctcagatctcgtcaacctcaacctctctgactccaccgagaaaatcatcgctgaatacatatggatcggtggatctggaatggacatcagaagcaaagccagaacgctcccaggaccagtgagcgatccatcaaagcttcccaagtggaactacgacggatccagcaccggtcaggccgctggagatgatagtgaagtcattatataccctcaggcgatcttccgtgatccgttcaggagaggcaacaacattctggtgatgtgtgatgcttacacaccggccgggaatccaattcctaccaacaagagacacaacgctgctaagatctttagcacctccaaagttgcctccgaggagccttggtatgggattgagcaagagtacacattgatgcagaagggtgtgaactggcctattggttggcctgttggtggcttccctggcccacagggaccatactactgtggtgtgggagctgacaaagccattggtcgtgacattgtcgatgcacactacaaggcctgtctctacgcaggtatcagcatctctggtgtcaatggagaagtcatgcctggccagtgggagttccaagtcggtccagttgaaggtattagcgctggtgatcaagtctgggtcgctagattccttctcgagaggatcactgagatctctggtgtaaatgtcagcttcgacccaaaaccagtcccgggtgactggaacggggctggagctcactgcaactacagtacgaagtcgatgaggaacgacggaggattagcggtgatcaagaaagccatagagaagcttcaggtgaagcacaaggagcacattgctgcttacggtgaaggcaacgagcgtcgtctcacggggaagcacgagacggcagacatcaacacgttctcttggggagtggcgaaccgtggagcttcggttagagtgggacgtgacactgagaaagaaggcaaaggttacttcgaggacagaaggccggcttctaacatggatccttatgtcgttacgtccatgattgctgaaaccaccatcctcggttaaaagtcatcacattttagtaatgtttggttttctccggtttggttttatgatttgaagacttttctgcttgtgatgacattttgtgtttttttcttcttttagtttcgaataattaaaataaagtattcttgtggtgaaaatttgatcagcgacttttgtgttgtgttgctgttgttgaaatgataataataacaaggaagtacggcctggcatgttacaggttgaactaatt

SEQ ID NO: 21140 - protein, 354 aa, Raphanus sativus (radish)
MSLLSDLVNLNLSDSTEKIIAEYIWIGGSGMDIRSKARTLPGPVSDPSKLPKWNYDGSSTGQAAGDDSEVIIYPQAIFRDPFRRGNNILVMCDAYTPAGNPIPTNKRHNAAKIFSTSKVASEEPWYGIEQEYTLMQKGVNWPIGWPVGGFPGPQGPYYCGVGADKAIGRDIVDAHYKACLYAGISISGVNGEVMPGQWEFQVGPVEGISAGDQVWVARFLLERITEISGVNVSFDPKPVPGDWNGAGAHCNYSTKSMRNDGGLAVIKKAIEKLQVKHKEHIAAYGEGNERRLTGKHETADINTFSWGVANRGASVRVGRDTEKEGKGYFEDRRPASNMDPYVVTSMIAETTILG

SEQ ID NO: 21141 - DNA, 1484 bp, Raphanus sativus (radish)
  CDS (170)..(1240)
gaaaacagaggctctctctccctatctctgtagtatgtaccctcgttgctccctataagtactcccacaaccacgaacaccaaaacatcatctcataaacgaaaaaccacattgtccgagatttaattgtttctcactacaaccttcttgtcagtttttttctgtaaccatgagtcttctgaccgatctcattaaccttgacctctcagacaacactgagaaaatcatcgctgaatacatatgggttggtggttcaggaatggacatgagaagcaaagctaggactctctctggacctgtgaccgatccatcacaactcccaaagtggaactatgatggttcaagcactggccaagctcctggtgaagacagtgaagtgatcttataccctcaagcgattttcaaggatccgttccgtagaggcaaccacattcttgtcatgtgtgatacttacacccctgcgggtgaaccaattcctacgaacaagagacatgctgcagctcagatctttagccaccctgatgttgtagctgaagtgccatggtacggaattgaacaggagtacactctgttgcagaaggatgtgaagtggcctgttggatggcccattggtggcttccctggccctcagggaccatactattgcagtgttggagctgacaaatcttttggaagagacattgttgatgctcactacaaggcttgtttgtatgccggaattaacatcagtgggatcaatggagaagtcatgcctggtcagtgggagttccaagtcggaccatcggttggtatctcagccgctgatgaagtgtggatcgctcgttacattttggagaggatcacagagattgctggtgtggttgtatcttttgacccaaaaccaattcctggtgactggaacggagctggtgctcacacgaactacagtactaagtcgatgagggaggaaggaggatacgagataatcaagaaggcaatcgataagctaggactgagacacaaggagcacatttctgcttatggtgaaggcaacgagcgccgtctcaccgggcaccatgaaactgctgacatcaacactttcaaatggggtgttgcaaaccgtggagcatcaatccgagtaggacgtgacacggagaaggaagggaaaggatactttgaggataggaggccagcttccaacatggacccttacattgttacttccatggttgcagagactactatcctttggaatccttgaagaaatatgacaataatataacttgaatcttttggggtttcaagtttgtgttttctataattatttaagcaattaccgggttgatgttaccggggtttgtggtttggggcctttcttttaatctctttgtgttttgggatttgtgattggagcaaaacctgatttgctctgtttccttgaccttttatttgaccccttaaaatttgtattaataagacgatctgaaaaggccttttcatgtttc

SEQ ID NO: 21142 - protein, 356 aa, Raphanus sativus (radish)
MSLLTDLINLDLSDNTEKIIAEYIWVGGSGMDMRSKARTLSGPVTDPSQLPKWNYDGSSTGQAPGEDSEVILYPQAIFKDPFRRGNHILVMCDTYTPAGEPIPTNKRHAAAQIFSHPDVVAEVPWYGIEQEYTLLQKDVKWPVGWPIGGFPGPQGPYYCSVGADKSFGRDIVDAHYKACLYAGINISGINGEVMPGQWEFQVGPSVGISAADEVWIARYILERITEIAGVVVSFDPKPIPGDWNGAGAHTNYSTKSMREEGGYEIIKKAIDKLGLRHKEHISAYGEGNERRLTGHHETADINTFKWGVANRGASIRVGRDTEKEGKGYFEDRRPASNMDPYIVTSMVAETTILWNP

SEQ ID NO: 21143 - DNA, 1326 bp, Raphanus sativus (radish)
  CDS (65)..(1135)
attcgattttatctgtcatttgcgtcaactgttactatcgcgaccaatctcggtgttcgtagccatgagtcttcttacagatctcattaaccttaacctctcggagaccactgacaaaatcattgcggaatacatatgggttggaggttctggaatggatatgagaagcaaagccaggactcttcctggaccagtgagtgacccttcggagctaccaaagtggaactatgatggttcaagcacaggccaagctcctggtgaagatagtgaagtcatcttatacccacaagcgatattcaaagatcctttccgtagagccaataacattcttgtcatgtgcgacgcttacactccagcgggtgaaccaatcccaacaaacaaaagacacgctgcggctaaggtctttagccagcctgatgtggtagctgaagtgccatggtatggtattgagcaagagtatactttacttcagaaagatgtgaagtggcctgttggttggcctattggcggcttccccggtcctcagggaccatactattgtggtgttggagcagataaatcttttggcagagacgttgttgatgctcactacaaggcctgcttatacgctggtatcaacattagtggcatcaatggagaagtcatgccgggtcagtgggagttccaagttggttcagctgttggtatttcggccggtgatgaaatatgggtcgcacgttatattttggagaggatcacggagattgctggcgtggtggtatcttttgacccaaaaccgattccaggtgactggaatggtgctggtgctcactgcaactatagtaccaagtcaatgagggaagatggtggttacgagattatcaagaaggctatcgataaactgggactgagacacaaagaacacattgctgcttacggtgaaggcaatgagcgccgtctcacgggtcaccacgagactgctgacatcaacactttcctctggggtgttgcgaaccgtggagcatcaatccgtgtaggacgtgacacagagaaagaagggaaaggatactttgaggataggaggccggcttcgaacatggaaccttacatcgtgacttccatgattgcagagaccacaatcctctggaacccttgatcagatcgaagaagattgttgaattttcactccatttgggtttcttgcatgattcaacgtttgtatgttctctatcaagcattgtctcagaacaagtcgagagatttgctctgttcttatggcttttattgtttcacatccattgaaaacatctctctgtatcattttatgagtaaagtttggtttggttc

SEQ ID NO: 21144 - protein, 356 aa, Raphanus sativus (radish)
MSLLTDLINLNLSETTDKIIAEYIWVGGSGMDMRSKARTLPGPVSDPSELPKWNYDGSSTGQAPGEDSEVILYPQAIFKDPFRRANNILVMCDAYTPAGEPIPTNKRHAAAKVFSQPDVVAEVPWYGIEQEYTLLQKDVKWPVGWPIGGFPGPQGPYYCGVGADKSFGRDVVDAHYKACLYAGINISGINGEVMPGQWEFQVGSAVGISAGDEIWVARYILERITEIAGVVVSFDPKPIPGDWNGAGAHCNYSTKSMREDGGYEIIKKAIDKLGLRHKEHIAAYGEGNERRLTGHHETADINTFLWGVANRGASIRVGRDTEKEGKGYFEDRRPASNMEPYIVTSMIAETTILWNP

SEQ ID NO: 21145 - DNA, 1416 bp, Vitis vinifera (grape)
  CDS (88)..(1158)
gagaaagagaggaagaggccaagtcaagctttgaagttttttttttatatttatttttctcatttcatccgttttcctgtgttcgtcatggcactgctctccgatctcatcaacttgaacctctctgagaccactgagaaggtgattgtagagtacatatgggttggtggatctggtatggaccttagaagcaaagccaggaccctttctggaccagttagcgatcctgcaaagcttcccaaatggaactatgatggttctagcactggccaagctccgggggaagacagtgaagttattctatatcctcaagcaattttcaaggacccattcaggagaggcaacaacattcttgtgatgtgtgatacttatacccctgccggagagccaattccgaccaataagaggtgtaatgctgcaaagattttcagccaccctgatgttgcagctgaagtgccttggtatggtattgagcaggagtatactttgttgcagaaagaggtaaaatggccaattggctggcctgtgggcggttttcctggacctcagggaccatactattgtggtattggtgctgacaaagcttggggccgtgacattgttgatgcacattacaaagcgtgcctttatgctggcatcaacatcagtggaatcaatggagaagtgatgccaggccagtgggaataccaagttggcccttctgttggcatctctgcaggagatgaattatgggtgtctcgttatattcttgagaggatcacagagattgctggggtggtgctttcttttgacccgaaacccatccagggtgattggaatggagcgggtgcgcacacaaattacagcaccaagtcgatgagaaatgatggagggtttgaagtcatcaaaaaagccattgaaaagcttgggctgaggcacaaggaacacattgcagcttatggagaaggcaatgaacgccgtctcactggacgacatgaaactgctgacatcaacacattcttatggggagtggcaaaccgaggagcctccattagagttggaagagacacagagaaagctgggaaaggatattttgaggacagaaggcctgcttcaaacatggatccttatgtggtcacctccatgattgcagaaactaccatcctctggaagccataagacacccatctcctccgtcccaacaggcttgtgggattgtcttgttggaatttcctgtgaaaattgtctccttagaactgcttgtcctggtttaatagcttccatgtgtttggattacgataaagatcagtctcataaaataagaggctattggggttgctccaatttcgatcattttatgctgtcttatgtattatgctacggaaatatcatcatatgatttaatgtcgtattggttaggccacctctatttactat

SEQ ID NO: 21146 - protein, 356 aa, Vitis vinifera (grape)
MALLSDLINLNLSETTEKVIVEYIWVGGSGMDLRSKARTLSGPVSDPAKLPKWNYDGSSTGQAPGEDSEVILYPQAIFKDPFRRGNNILVMCDTYTPAGEPIPTNKRCNAAKIFSHPDVAAEVPWYGIEQEYTLLQKEVKWPIGWPVGGFPGPQGPYYCGIGADKAWGRDIVDAHYKACLYAGINISGINGEVMPGQWEYQVGPSVGISAGDELWVSRYILERITEIAGVVLSFDPKPIQGDWNGAGAHTNYSTKSMRNDGGFEVIKKAIEKLGLRHKEHIAAYGEGNERRLTGRHETADINTFLWGVANRGASIRVGRDTEKAGKGYFEDRRPASNMDPYVVTSMIAETTILWKP

SEQ ID NO: 21147 - DNA, 1305 bp, Vitis vinifera (grape)
  CDS (24)..(1094)
gtttttttttttttttcgccaccatggctctgctttcagatctcatcaacttgaacctctctgatgtcactgagaaaattattgccgagtacatatggatcggcggatccggaatggacctcagaagtaaagcgagaacgctatcagggcccgtcagcgacccccacaagctacccaaatggaattatgacggatccagcacaggccaagcccctggagaggacagtgaagtgatcctataccctcaagcaattttcaaggacccattcaggagaggcaacaatattcttgtcatgtgtgatacttacactcctgctggggagcccattccaaccaacaagaggcataacgcagctaaaatatttagccatcctgaagtccttgctgaagaaacttggtatggtattgagcaggagtacaccttgttgcaaaactcggttaaatggcccattggctggcctgtgggaggttatcccggcccccagggaccatactactgcggtattggtgctgacaaagcctttgggcgggacattgttgattctcattacaaggcatgcctttatgctggaatcaacattagtggcatcaatggtgaagttatgccaggacagtgggagtttcaagtaggccctgcagtcggcatctctgctggggatgaattgtgggttgctcggtacattctagagaggattacagagattgctggagtggtggtttcctttgatcccaaacccattcagggtgactggaatggtgccggcgctcacacaaattacagcactaagtccatgagaaatgatggaggttatgagatcatcaagaaagcaatcgaaaaacttgggctgaggcacaaagaacacattgccgcatacggagaaggcaatgagcgcagactcacaggacgacatgaaactgctgacattaacacattcttatggggcgtcgcaaaccgaggggcatccatccgagtaggcagagacacagagaaggaagggaaagggtattttgaggacagaaggcctgcttccaacatggatccatatgtggtgacttccatgatcgcggagagcaccatcctgtggaagccataagtgtttccagatgttgccgttgttccaggggataaaatttgagtcagtcagttgtgttattttggtgctgtgtctcattgtttgcccttgtatttgaggtagcaaggggggtgggtttatggcccccttgcctgatcatttcgcctcttgttaaaataaccattaccttagcattaataacaacatttgaaggcctggcttctattgttgc

SEQ ID NO: 21148 - protein, 356 aa, Vitis vinifera (grape)
MALLSDLINLNLSDVTEKIIAEYIWIGGSGMDLRSKARTLSGPVSDPHKLPKWNYDGSSTGQAPGEDSEVILYPQAIFKDPFRRGNNILVMCDTYTPAGEPIPTNKRHNAAKIFSHPEVLAEETWYGIEQEYTLLQNSVKWPIGWPVGGYPGPQGPYYCGIGADKAFGRDIVDSHYKACLYAGINISGINGEVMPGQWEFQVGPAVGISAGDELWVARYILERITEIAGVVVSFDPKPIQGDWNGAGAHTNYSTKSMRNDGGYEIIKKAIEKLGLRHKEHIAAYGEGNERRLTGRHETADINTFLWGVANRGASIRVGRDTEKEGKGYFEDRRPASNMDPYVVTSMIAESTILWKP

SEQ ID NO: 21149 - DNA, 1346 bp, Nicotiana tabacum (common tobacco)
  CDS (21)..(1091)
ttaagacttctattttcattatgtctccgctttcagatcttatcagcctcaatctctctgattctacccagaaaatcatcgctgaatacatatggataggtggatcaggcatggacttaaggagcaaggccaggactctttctggtcctgttactgatccttcagaactacccaaatggaactatgatggatctagcacaggtcaagctcctggagaagatagtgaagtgatcttataccctcaagtatactttaaggatccattcagaagaggcaacaatatcttggtcatgtgtgatgcctatactcctgctggcgagcctatcccgacaaacaagaggcatgctgctgccaagatcttcagcaaccctgatgttgttgctgaggaaccctggtatggtattgagcaagaatacaccttgttgcaaagggatattaactggcctctagcgtggcctattggaggcttccctggacctcagggaccatactactgtggaaccggagctgataaggcctttggacgtgatattgtggactcccattacaaggcttgtctttatgctgggtttaacatcagtggtatcaacggagaagtgatgcccggacagtgggaattccaagtcggaccttctgttggcatctcagccggtgatgaagtgtgggtagctcgttacattcttgagaggattgcggagattgctggagtggttgtgtcatttgaccccaagcctattccgggcgattggaacggtgcaggtgctcacacaaactacagcaccaagtcgatgagggaagatggaggctatgaagtcattttgaaggctattgagaagcttggcctgaagcacaaagtgcacattgctgcatatggtgaaggcaatgagcgtcgtctcactggaaagcacgaaacagccaacatcagcaccttcaaatggggggttgcgaaccgcggtgcatctgtccgtgtaggaagggacacatataaggctgggaagggatattttgaggacagaaggacggcttcaaatatggatccatacgccgttactgccatgatcgcggacaccaaccatatctgcaaatcttgaagcttttagtatgaattgcttgtttctggtttgctcaatttgggatagaaaaggattgatttatgaaacagccctttcgctttgcctgtgtctttagttaggatagtctggccttttcttatttattattttattccagttgaagttgtattttcatacagcaatgctgatttcattcgcctttgatttggcagtggtgttacaaacaaaacaatgttattcttattaataacaaattataaaagggctggttct

SEQ ID NO: 21150 - protein, 356 aa, Nicotiana tabacum (common tobacco)
MSPLSDLISLNLSDSTQKIIAEYIWIGGSGMDLRSKARTLSGPVTDPSELPKWNYDGSSTGQAPGEDSEVILYPQVYFKDPFRRGNNILVMCDAYTPAGEPIPTNKRHAAAKIFSNPDVVAEEPWYGIEQEYTLLQRDINWPLAWPIGGFPGPQGPYYCGTGADKAFGRDIVDSHYKACLYAGFNISGINGEVMPGQWEFQVGPSVGISAGDEVWVARYILERIAEIAGVVVSFDPKPIPGDWNGAGAHTNYSTKSMREDGGYEVILKAIEKLGLKHKVHIAAYGEGNERRLTGKHETANISTFKWGVANRGASVRVGRDTYKAGKGYFEDRRTASNMDPYAVTAMIADTNHICKS

SEQ ID NO: 21151 - DNA, 1381 bp, Nicotiana tabacum (common tobacco)
  CDS (54)..(1124)
ttttattctctcatatacgaactcagccaatttcacaactcttattttccaatatggctcatctttcagatctcgttaatctcaatctctctgactccactcagaaaattattgctgaatacatatggattggtggatcaggaatggacgtcaggagcaaagccagaacactttctggacctgttgatgatccttcaaagcttcccaaatggaattatgatggttctagcacaggacaagctcctggagaagacagtgaagagatcctatatcctcaagcaattttcaaggatccattcagaaggggcaacaatatcttggtcatttgtgattgttacaccccagctggtgaacccattccaacaaacaaaaggcacagtgctgccaagattttcagccaccctgatgttgttgttgaggaaccctggtatggtcttgagcaagaatacaccttgttgcaaaaagatatcaattggcctcttggatggcctcttggtggttttcctggaccacagggaccatactattgcggaattggagctggaaaggtctttggacgcgatatcgttgactctcattataaggcatgtctctatgctgggattaacatcagtggtatcaatggagaagtgatgcccggacagtgggaatttcaagttggaccttcagttggcatttcagcagctgatgaattgtgggcagctcgttacattcttgagaggattactgagattgctggagttgtggtctcatttgaccccaaacctattccgggtgactggaatggtgctggagctcacacaaactacagcacaaagtctatgaggaatgaaggaggctatgaagtcattaagaaggcaattgagaaccttggactgaggcacaaggagcatattgcagcatatggtgaaggcaacgagcgtcgtctcactggaagacacgaaacagctgacatcaacacattcaaatggggagttgcgaaccgtggtgcatctattcgtgtgggaagagacacggagagagaagggaagggatacttcgaggataggaggcctgcttcgaatatggatccattcgtcgtgacttccatgattgctgagaccactatcctatccgagccttgagtgtgtagtcgtcttttgaggattcaatgagtattaattcttgggtgtaatatttggagaaagaattgaatttcggaacaaccctttcctcacaatgtccttatacagttagctatcttgttatattctgctgttttcctggtttgtatttgtattgtactcacgcaaagctcaggtcattgcctgtgatttggcaatggtgtaaaataacagtgttaatcttattgattaataacaatagggaagggtttaactgt

SEQ ID NO: 21152 - protein, 356 aa, Nicotiana tabacum (common tobacco)
MAHLSDLVNLNLSDSTQKIIAEYIWIGGSGMDVRSKARTLSGPVDDPSKLPKWNYDGSSTGQAPGEDSEEILYPQAIFKDPFRRGNNILVICDCYTPAGEPIPTNKRHSAAKIFSHPDVVVEEPWYGLEQEYTLLQKDINWPLGWPLGGFPGPQGPYYCGIGAGKVFGRDIVDSHYKACLYAGINISGINGEVMPGQWEFQVGPSVGISAADELWAARYILERITEIAGVVVSFDPKPIPGDWNGAGAHTNYSTKSMRNEGGYEVIKKAIENLGLRHKEHIAAYGEGNERRLTGRHETADINTFKWGVANRGASIRVGRDTEREGKGYFEDRRPASNMDPFVVTSMIAETTILSEP

SEQ ID NO: 21153 - DNA, 1310 bp, Glycine max (soybean)
  CDS (62)..(1129)
gaaaggaaaagagaaaaaatttctcagaagagtctccgctgaaagttttggtttcttgaagatgtcgttgctctccgatcttatcaaccttaacctctccgacatcaccgataaagtgatcgcagagtacatatgggtaggtggatctggcatggatatgaggagcaaagcaaggacactcccaggaccagttagagacccttcaggacttcccaagtggaactatgatggttccagcacaggtcaagctcctggtgaagatagtgaagtgatttatatccataagccatttcaggatccattcagaaggggtagcaatatcctggttatgtgtgatgcttacactcctgctggggaacccattcccacaaacaagagaaataatgctgcaaagatattcggccatcctgatgttgctgctgaagaaccctggtatggcattaagcaagaatacaccttgttgcaaaaagatgtccaatggcctctagggtggcctcttggtggtttcctgggccacaagggaccatattattgtggtactggtgctaacaaggctttcgggcgtgatattgttgactcacattacaaagcatgtatttatgcgggattcaacatcagtggaatgaatccagaagtgatgccaggtcagtgggaattccaagttggtccttcaattggcatctcagctgctgatgaattgtgggaagctcgttatattttggagaggatctccgagattgcaggagtggtgctttcctttgaccctaagccaattccgggtgattggaatggtgctggtgctcacacaaattacagtaccaagtccatgagagacgatggtggctatgaagtcatcaaagcagcaattgctaagttggaaaagagacacaaggagcacattgcagcttacggagaaggcaacgaacgtcgtttgactggacacgacgagacagctgacatgaactccttgttatggggtgttgcaaaccgtggtgcttctgttagagtagggagggacactgagaaagcagggaaggggtattttgaggataggaggcctgcctctaatatggacccttatgtggtcacttccatgattgctgacacaaccattctttggaaaccataagcagcctcaaaaataatcacacatgccttgttttttcatgttttgtgtgcactcttgttgtgactacctcgccttttcttaggcattgtttgttggtagtactgaagtgaagaattgtcgtgtcattccattaatgtacgtttttcaaaggaattgtttgtgtgcacccttgttgtgatta

SEQ ID NO: 21154 - protein, 355 aa, Glycine max (soybean)
MSLLSDLINLNLSDITDKVIAEYIWVGGSGMDMRSKARTLPGPVRDPSGLPKWNYDGSSTGQAPGEDSEVIYIHKPFQDPFRRGSNILVMCDAYTPAGEPIPTNKRNNAAKIFGHPDVAAEEPWYGIKQEYTLLQKDVQWPLGWPLGGFLGHKGPYYCGTGANKAFGRDIVDSHYKACIYAGFNISGMNPEVMPGQWEFQVGPSIGISAADELWEARYILERISEIAGVVLSFDPKPIPGDWNGAGAHTNYSTKSMRDDGGYEVIKAAIAKLEKRHKEHIAAYGEGNERRLTGHDETADMNSLLWGVANRGASVRVGRDTEKAGKGYFEDRRPASNMDPYVVTSMIADTTILWKP

SEQ ID NO: 21155 - DNA, 2030 bp, Chlamydomonas reinhardtii
  CDS (84)..(1232)
aagccaattctttactctgctgcctgtccactcgcctgtccaactactaccagtcggggatttcttctcctgaaggtctaaccatggccgcgggatctgttggcgtcttcgccaccgatgagaagattggcagcctgctggaccagtccatcacgcgccactttctgtcgactgtgaccgaccagcagggcaagatctgtgccgagtatgtgtggatcggcggctccatgcacgacgtgcgctccaagtcgcgcaccctgtccaccatccccacgaagcccgaggacctgccccactggaactacgacggctcctccaccggccaggcccccggccacgactcagaggtctatctcattccccgctccatcttcaaggaccccttccgcggcggcgacaacatcctggtcatgtgcgactgctacgagccgcccaaggtcaaccccgacggcaccctggccgcgcccaagccgatccccacgaacacccgctttgcctgcgccgaggtgatggagaaggccaagaaggaggagccctggttcggcattgagcaggagtacacgctgctcaacgccatcaccaagtggccgctgggctggcccaagggcggctaccccgccccccagggcccctactactgctcggccggcgccggcgtggccatcggccgcgacgtggcggaggtgcactaccgcctgtgcctggccgcgggcgttaacatcagcggcgtgaacgccgaggtgctgcccagccagtgggagtaccaggtgggcccgtgcgagggcatcaccatgggcgaccacatgtggatgagccgctatatcatgtaccgcgtgtgcgagatgttcaacgtggaggtctcgttcgaccccaagcccatccccggcgactggaacggctccggcggccacaccaactactccactaaggccacccgcaccgcgcccgacggctggaaggtcatccaggagcactgcgccaagctggaggcgcgccacgccgtgcacatcgccgcctacggcgagggcaacgagcgccgcctgaccggcaagcacgagaccagcagcatgagcgacttcagctggggcgtggccaaccgcggctgctccatccgcgtgggccgcatggtgccggtggagaagtcgggctactatgaggaccgccggcctgcctccaacctggacgcctacgtcgtcacccgcctcatcgtggagaccaccatccttctgtaagcgcaggagcagcggcacgcaggagcagcagtgggcgatggtggtggtggcgtttgtgctggcctgagcgaggggggggccacggaagggcgatcgtggccaaggcggagggaagcggcggtcgagccgcgtggtgatcaaggtgaggcgtggtgcgcgtgtttgcattgacatgcgggctcgtttggcgccgtggcttgaagctggagcaattccaactgcatttggtttgccgggacgtgtagcggttcaggaaagatggggtgacggcagcgaggacccgctgtgtgttctggtccagtctgccaaagggacttcggacgcaggatgctgcatcatctgtggcgcagtcaactgatctctacgaagagccgcagtgccataccatttgtcgtgtgcgtttcgagcctggctgtgtggacgccggcgcagaggtcgcctggttgtgtgcaagtgtatgccgtcggcgacggaagggagcgtacacgtgcggccaagcgacacggcgctctgtacgtgcccgtcgtcaagtgcatgagcggaggaccccgcgcagcgcggggtgcgtggcatgacgtgagctcttattggctgtgcgcgacgcatgtgttccctcatgtaggggaggcgttgcatacaggaacggtcgcggccgtgtttggtgttcaaactgtgttttgtcttggtattgtgtcctggttccaacagtggttgggtgattgtgcacttgaaacattctttgtgtgggtcggacccactctgtcgttctgtaacacgggaaagcataaaaaaaaaaaa

SEQ ID NO: 21156 - protein, 382 aa, Chlamydomonas reinhardtii
MAAGSVGVFATDEKIGSLLDQSITRHFLSTVTDQQGKICAEYVWIGGSMHDVRSKSRTLSTIPTKPEDLPHWNYDGSSTGQAPGHDSEVYLIPRSIFKDPFRGGDNILVMCDCYEPPKVNPDGTLAAPKPIPTNTRFACAEVMEKAKKEEPWFGIEQEYTLLNAITKWPLGWPKGGYPAPQGPYYCSAGAGVAIGRDVAEVHYRLCLAAGVNISGVNAEVLPSQWEYQVGPCEGITMGDHMWMSRYIMYRVCEMFNVEVSFDPKPIPGDWNGSGGHTNYSTKATRTAPDGWKVIQEHCAKLEARHAVHIAAYGEGNERRLTGKHETSSMSDFSWGVANRGCSIRVGRMVPVEKSGYYEDRRPASNLDAYVVTRLIVETTILL

SEQ ID NO: 21157 - DNA, 1604 bp, Chlamydomonas reinhardtii
  CDS (12)..(1154)
aagctgcaaagatggcgttcgctctgcgtggtgttaccgctaaggcctcgggccgcactgctggcgcccgctcgtcgggccgcaccctgacggtgcgcgtccaggcctatggcatggcggctgagtacatctgggcggatggcaacgagggcaagcctgagaagggcatgatcttcaacgagatgcgctcgaagaccaagtgcttcgaggcccccctgggcctggacgcctcggagtaccccgactggtcgttcgatggctcgtccaccggccaggctgagggcaacaactcggactgcatcctgcgccccgtgcgcgtggtgaccgaccccatccgcggtgccccccacgtgctggtgatgtgcgaggtgttcgcccccgatggcaagccccactccaccaacacccgcgccaagctccgcgagatcattgacgacaaggtcactgccgaggactgctggtacggcttcgagcaggagtacaccatgctggccaagacctctggccacatctacggctggcccgctggcggcttccctgctccccagggccccttctactgcggtgtgggcgctgagtccgccttcggccgccccctggctgaggcccacatggaggcctgcatgaaggccggtctggtcatctccggcatcaacgccgaggtgatgcccggccagtgggagtaccagatcggccccgtcggccctctggccctgggcgacgaggtgatgctgtcccgctggctgctgcaccgcctgggcgaggacttcggcattgtgtcgaccttcaaccccaagcccgtgcgcaccggtgactggaacggcactggcgcccacactaacttctcgaccaagggcatgcgcgtgcccggcggcatgaaggtgatcgaggaggccgtggagaagctgtccaagacccacatcgagcacatcacccagtacggcattggcaacgaggcgcgcctgaccggcaagcacgagacctgcgacatcaacaccttcaagcacggtgtggctgaccgcggctcttccatccgcattcccctgcccgtcatgctcaagggctacggctacctggaggaccgccgccccgctgccaacgtcgacccctacaccgtggcgcgcctgctgatcaagaccgtgctcaagggctaaatgcccagcatgcgccagctaataagggcagcgatgaggcggaggggtgcgtgactcggatgtgagctgtgatgagggggttgcttctatcggctaagggtgtgtgtgtgtgtgtgtctgtctatgctgggccgggtatgtggaccggcgacctgacgtttggaatgcgtgcgtgtgcacactgcccggttgcagtgtctgcgcatgtatttcctggcaactccaaagcctacggttgagcaagtgacctgtctttggttggacgattgttctgacacgtcgattgctgctaggttaacgggaggttgcggcgtgagccctgcgacgagctgcgtaatactatttccttgtacttcttcctcgcgcgccctcctgggtgctgacgcattgtcaggtttgctcaggtcgccacatgtaatcgaacacgtcaaaaaaaaaaaaaaaaaaaaa

SEQ ID NO: 21158 - protein, 380 aa, Chlamydomonas reinhardtii
MAFALRGVTAKASGRTAGARSSGRTLTVRVQAYGMAAEYIWADGNEGKPEKGMIFNEMRSKTKCFEAPLGLDASEYPDWSFDGSSTGQAEGNNSDCILRPVRVVTDPIRGAPHVLVMCEVFAPDGKPHSTNTRAKLREIIDDKVTAEDCWYGFEQEYTMLAKTSGHIYGWPAGGFPAPQGPFYCGVGAESAFGRPLAEAHMEACMKAGLVISGINAEVMPGQWEYQIGPVGPLALGDEVMLSRWLLHRLGEDFGIVSTFNPKPVRTGDWNGTGAHTNFSTKGMRVPGGMKVIEEAVEKLSKTHIEHITQYGIGNEARLTGKHETCDINTFKHGVADRGSSIRIPLPVMLKGYGYLEDRRPAANVDPYTVARLLIKTVLKG

SEQ ID NO: 21159 - DNA, 1376 bp, Daucus carota (carrot)
  CDS (84)..(1142)
ggtctctgcattccacaccatctatcatcaaacatcactccatataatcttcttcactacccttctctgtttcaccaataaccatggcttcacttacagatctcatcaatcttgacctttctgacaccactgacaagttcattgctgagtacatctggattgatgctgttggtggcctcaggagcaaagctagaaccctttctggtccggttgatgatcccaccaagctcccaaaatggaattttgatggatcaagtactggtcaaggaccaggggatgatagtgaagtgatcatatatccccaagcaatatttaaggatccattcagaaggggtaaccacatattggtcatgtgtgatacctacacaccagctggtgagccaattcctacaaacaagagatgtaatgcggctaagattttcagccaccctgatgttgcagctgaagttccttggttcggtattgagcaagaatacaccctattgaagaaagaggtcaactgccctattgggtgtcccactggaggatatccaggaccacaggggccttactactgtggtattggtgctgataaagcctttggacgggacattgttgatgctcattacaaagcatgtctgtatgctggtattaacataagtggcataaatggggaggttatgcctggacaatgggaattccaagtgggaccagctgttggtatctcagcaggtgatgaactgtgggtggcccgttacattcttgagaggataactgaaattgctggggtggttgtttcattggatcctaagcctatccctggtgattggaatggtgcaggtgcccacacgaattacagcaccaagtccatgagaaatgagggaggatttgagatcatcaagaaggctattgccaaacttgagactaagcatgcacaacacattgctgcatatggtgaaggcaacgaacgtcgtctcactggaaagcacgagactgccagtattcacaagttctcatggggtgttgcaaaccgtggagcatcagtccgggtgggtagagacactgaaaaagaaggcaagggttactttgaggaccgtaggcctgcttccaacatggaaccatatgtcgtcacttccatgatcgcagaaacaacaattctgtgaagccttgagggagaatttgctgcagatactttgcggtgaaagagtaccatgattgtgttccataccaacccttctagatttctattagaattagctcgtctggtcatcatttgttgttactggatttgcctttatattcctggtatttacggcatgagcaatgctcagttactttattttcaaaaactagttgcaatatgaaagggtttggtatctattaagcatttctcatgt

SEQ ID NO: 21160 - protein, 352 aa, Daucus carota (carrot)
MASLTDLINLDLSDTTDKFIAEYIWIDAVGGLRSKARTLSGPVDDPTKLPKWNFDGSSTGQGPGDDSEVIIYPQAIFKDPFRRGNHILVMCDTYTPAGEPIPTNKRCNAAKIFSHPDVAAEVPWFGIEQEYTLLKKEVNCPIGCPTGGYPGPQGPYYCGIGADKAFGRDIVDAHYKACLYAGINISGINGEVMPGQWEFQVGPAVGISAGDELWVARYILERITEIAGVVVSLDPKPIPGDWNGAGAHTNYSTKSMRNEGGFEIIKKAIAKLETKHAQHIAAYGEGNERRLTGKHETASIHKFSWGVANRGASVRVGRDTEKEGKGYFEDRRPASNMEPYVVTSMIAETTIL

SEQ ID NO: 21161 - DNA, 1537 bp, Daucus carota (carrot)
  CDS (17)..(1315)
ccattctaaggtgaggatggctcagatcttagctccgtcagtgcaatggcaaatgagattcacaaaaaattctaccgaagtaagttcaatgacatcaaagatgtggggttctctattcctgaaacaaaacaagaaagcaccagctagaagttctaccaaatatagagcattagcagtgaagtctgaggatggcaccataaataggatggaagatctactaaatttggatgtaactccatacaccgataagatcatagccgagtatatatggataggaggaactggcattgatgtccgaagcaaatcaaggacaatctcaaagccagttgagcacccgtctgagctaccaaaatggaactatgatggatcaagtactgggcaagcacctggagatgatagtgaagtaattttataccctcaagcaattttcaaggaccctttccgtggtggtaacaacatcctcgtcatatgcgatacctacacgccacaaggagagcctattcctacaaataaacgccacaaggctgctcaaatatttagtgatgcgaaggttttaggtgaagttccatggtttggaatagagcaagagtacaccttgatgcaacaggatgtaaactggcctttgggatggaatgttggaggctatcctggtcctcagggtccatattactgtgctgctggagcggataagtcatttggcagagacatatctgacgctcattataaggcttgcttatatgccggaattaatattagtggcacaaatggagaagttatgcctggccagtgggaatttcaagtgggtcccagtgtcggtattgaagctggcgatcacatctggtgtgccagatacctcctggagagaattactgagcaagctggggtcgttctcacacttgacccgaaaccaattgatggtgactggaatggagcaggctgccacaccaactacagtacaaaaagtatgagagaggagggaggctttgaagtaattaagaaagcaatcttaaacctttcacttcgccacaaagagcacatcagtgcatatggagaaggaaatgaaagaagattgacaggaaagcatgaaactgcgagcattgacagcttttcttggggagttgctgaccgtggttgctcaatccgtgtggggcgtgatactgagaaggaaggcaaaggttacttggaggatcggcgccctgcttcaaacatggacccatatgttgtgactggtttacttgctgaaactacattactgtgggagccaacacttgaagctgaagctcttgctgcacagaaactatctttgaatgtctagattcagttcaagataaatttacattttccacaaaattcattgtcgtcagttgaaccgcctcctgctttctttggatcattagttgataatttctgtaaataaagggagccccagtggttaacctttccttctattatgaaagacattcttggaggtcattaggtgttcaaaagaataattatgatgattttgagaatactctacccggaagcaattgtcatc

SEQ ID NO: 21162 - protein, 432 aa, Daucus carota (carrot)
MAQILAPSVQWQMRFTKNSTEVSSMTSKMWGSLFLKQNKKAPARSSTKYRALAVKSEDGTINRMEDLLNLDVTPYTDKIIAEYIWIGGTGIDVRSKSRTISKPVEHPSELPKWNYDGSSTGQAPGDDSEVILYPQAIFKDPFRGGNNILVICDTYTPQGEPIPTNKRHKAAQIFSDAKVLGEVPWFGIEQEYTLMQQDVNWPLGWNVGGYPGPQGPYYCAAGADKSFGRDISDAHYKACLYAGINISGTNGEVMPGQWEFQVGPSVGIEAGDHIWCARYLLERITEQAGVVLTLDPKPIDGDWNGAGCHTNYSTKSMREEGGFEVIKKAILNLSLRHKEHISAYGEGNERRLTGKHETASIDSFSWGVADRGCSIRVGRDTEKEGKGYLEDRRPASNMDPYVVTGLLAETTLLWEPTLEAEALAAQKLSLNV

SEQ ID NO: 21163 - DNA, 1167 bp, Caenorhabditis elegans
  CDS (10)..(1167)
atgtcgcaaatggctcaatcactccgcagtcaattcgccaccgacaagcaggtcctgcaaaagttcctgaacttggaccaaaagggcatgtaccaggccctctacatttggattgacggatccggcgagaacattcgtgccaagaccagaaccttcgattttgagccaactgacccagagaagctcccaatttggaactttgacggatcatccaccggtcaagccgagggagccgactccgacgtctacctgaagccagtcgccatctacccagacccatttaggcagggaaagaacaagttggtgatgtgcgagacctatgacaacaagaagaagccaaccgccaccaactaccgccagcgatgcaaggaggtgatggagaaggccgccgaccagcacccatggttcggaatggagcaggagtacacccttctcgacattgacggacatccattcggatggccaaagaacggattcccaggaccacaaggaccatactactgtggcgtcggcgccaacaaggtctacggtcgcgacatcgtcgaggctcactaccgcgcatgcctctacgccggaatccagatctcgggaaccaacgccgaagtgatgcccggacaatgggagttccaggtcgggccatgcgaaggaatccagatgggagatcagttgtgggtggctcgctacttgctgcaacgtgtcgccgaggagtttggcgtgatcgcctcgttcgattgtaagccgatcaagggagactggaacggagccggatgtcacaccaacttctccactgataagatgagaaatccaggaggaattgacgagatcatgtccgccatcaacaagctctcccttgtccacccacaacacattgcctactacgatccacacggtggaaaagacaacgagcgtcgtttgaccggactccacgagaccgcatcgatcgacaagttctcctacggagtcgcatcccgtgcctcatccattcgtattccacgctccaccgacgatgatggatacggatacttcgaagatcgccgtccatcatccaactgtgacccgtacaccgtcaccggagccctcgtcagaactgtgtgtcttgagggagccgagcgtaaactgtcgatgatgtatgttccaagccaggcaccaaatattaccaagcattag

SEQ ID NO: 21164 - protein, 385 aa, Caenorhabditis elegans
MAQSLRSQFATDKQVLQKFLNLDQKGMYQALYIWIDGSGENIRAKTRTFDFEPTDPEKLPIWNFDGSSTGQAEGADSDVYLKPVAIYPDPFRQGKNKLVMCETYDNKKKPTATNYRQRCKEVMEKAADQHPWFGMEQEYTLLDIDGHPFGWPKNGFPGPQGPYYCGVGANKVYGRDIVEAHYRACLYAGIQISGTNAEVMPGQWEFQVGPCEGIQMGDQLWVARYLLQRVAEEFGVIASFDCKPIKGDWNGAGCHTNFSTDKMRNPGGIDEIMSAINKLSLVHPQHIAYYDPHGGKDNERRLTGLHETASIDKFSYGVASRASSIRIPRSTDDDGYGYFEDRRPSSNCDPYTVTGALVRTVCLEGAERKLSMMYVPSQAPNITKH

SEQ ID NO: 21165 - DNA, 1080 bp, Schizosaccharomyces pombe
  CDS (1)..(1080)
atgtctcaatacgacgttgaacctcttctctccaaggctgctattttaaacaagtatgccgatcttcctcaaaatggtaaggttatggctgagtacatctggatcgatggtttcaaccatcttcgtagcaagaccatgactctcgatgccaagccttcctctattgaccaattgcgcgtttggaactttgacggctcttccaccggtcaggcccccggcaacaattctgacactcttttgaagcctgttgccatgtacaatgatcccttccgtcgcggtgacaacattctcgttctcgctgcttgctacaccgctgatggctctcccaacggcttcaaccatcgtgacgcttgcgccaagttgttggagaagcacgctgacaaagaaacttggtttggtattgaacaagaatataccatgttggactactatgaccgtccctttggctggcctaagggtggtttccctggtcctcaaggtcctttctactgcggtgttggtactggccgcgtctttgctcgtgacatcgttgaggcccattacaaggcttgtctttacgctggtatcaacatttccggtatcaatgctgaggttatgccttcccaatgggaataccaagtcggcccttgcgctggtattgaaatgggtgaccaactctggatgtctcgtttccttcttcaccgcattgccgaagattttggtgtcaaaatctccttccaccccaagccaattttgggtgactggaatggtgctggttgccacactaacgtttctactaaggacactcgtgctgaaggtggtataaaagctattgagtcttatctcgagaagtttgccaaacgccataaggagcacattgctgtttatggtgacgacaacgacttgcgtcttaccggtcgtcatgaaactggttcaatcgataagttcacttatggtgttgccgatcgtggtgcatccgttcgtatcccccgttctgtcgccatgaatggttgcggctactttgaggatcgtcgtcctgcttcttccatcgatccttacctcgtcactggtatcatcactgagaccatgtttgagcattag

SEQ ID NO: 21166 - protein, 359 aa, Schizosaccharomyces pombe
MSQYDVEPLLSKAAILNKYADLPQNGKVMAEYIWIDGFNHLRSKTMTLDAKPSSIDQLRVWNFDGSSTGQAPGNNSDTLLKPVAMYNDPFRRGDNILVLAACYTADGSPNGFNHRDACAKLLEKHADKETWFGIEQEYTMLDYYDRPFGWPKGGFPGPQGPFYCGVGTGRVFARDIVEAHYKACLYAGINISGINAEVMPSQWEYQVGPCAGIEMGDQLWMSRFLLHRIAEDFGVKISFHPKPILGDWNGAGCHTNVSTKDTRAEGGIKAIESYLEKFAKRHKEHIAVYGDDNDLRLTGRHETGSIDKFTYGVADRGASVRIPRSVAMNGCGYFEDRRPASSIDPYLVTGIITETMFEH

SEQ ID NO: 21167 - DNA, 1597 bp, Brassica napus
  CDS (97)..(1383)
gtcaactctttctttgccatttgttgcaaacactcaagtctcttgaatcagagttaagtcttctttaagttcccagggatccaagctttaaacaaaatggcgcaaatcttggcagcttctccaacatgtcaaatgaaattgactaaaccgagccccattgcatcttcaaagttatggagctcggttatgttgaaacagaagaaacagaacagcagcaaactcagaagctttaaagcgatggctctccaatctgataacagtacaatcaatagagttgagagtcttctcaatttagacaccaaacctttcactgaccgcatcatcgctgagtacatttggattggaggatcaggaattgaccttaggagcaagtcaaggactcttgaaaagcctgtggaagatccttctgagcttcccaagtggaattatgatggttctagcaccggacaagcacctggtgaagatagtgaagtgattttatatccgcaagctatcttcagagatcctttccgtggaggcaataacatattggttatttgtgatacctacacaccagctggtgagccaattccaacaaacaaacgtgcccgagctgctgagattttcagcaacaagaaggtcaatgaagagattccatggtttggcattgaacaagagtacactttacttcagccaaacgtaaactggcctttgggttggcccgttggagcgtatcctggtcctcagggtccttactactgtggagttggagctgaaaagtcatggggacgtgacatttcagatgctcattacaaagcttgtttatatgcgggaattaacatcagtggtactaatggcgaagttatgccaggacagtgggaattccaagttggcccgagtgtaggaatcgaagcaggtgatcatgtttggtgtgcaagataccttcttgagagaatcacagaacaagctggtgttgtcttaacacttgatcccaaacccatagagggtgactggaacggtgctggttgccataccaattacagtactaaaagcatgagagaggaaggaggatttgatgtgattaaaaaggacatcttgaacctctcgcttcgtcacatggagcacatcagtgcatacggtgaaggcaatgagagaaggttgaccggaaagcacgagacagctagtatcgaccaattctcatggggcgtggctaaccgtggatgctcaattcgtgtgggacgtgataccgagaagaaaggaaaaggttacttggaagatcgacgtccagcatcaaacatggacccatacattgtgacttcactcttggcagagaccacacttctctgggagccgacccttgaggctgaagcacttgcagctcaaaagctttctttgaaggtttaagttaattaaaccaaagctatcataaatctttgaagttaatgtttatctaagtagtcttgccgggataataaatgttatttaaaatgttggttcggataagacattcttgttgtaaacttaaggattacaatccgtaacttcttatcattaattaaaacatatggtgtcttaggaactaattaaaaaaaaaaaaaaaaaaaaaaaaaaaaaaaaa

SEQ ID NO: 21168 - protein, 428 aa, Brassica napus
MAQILAASPTCQMKLTKPSPIASSKLWSSVMLKQKKQNSSKLRSFKAMALQSDNSTINRVESLLNLDTKPFTDRIIAEYIWIGGSGIDLRSKSRTLEKPVEDPSELPKWNYDGSSTGQAPGEDSEVILYPQAIFRDPFRGGNNILVICDTYTPAGEPIPTNKRARAAEIFSNKKVNEEIPWFGIEQEYTLLQPNVNWPLGWPVGAYPGPQGPYYCGVGAEKSWGRDISDAHYKACLYAGINISGTNGEVMPGQWEFQVGPSVGIEAGDHVWCARYLLERITEQAGVVLTLDPKPIEGDWNGAGCHTNYSTKSMREEGGFDVIKKDILNLSLRHMEHISAYGEGNERRLTGKHETASIDQFSWGVANRGCSIRVGRDTEKKGKGYLEDRRPASNMDPYIVTSLLAETTLLWEPTLEAEALAAQKLSLKV

SEQ ID NO: 21169 - DNA, 1425 bp, Medicago truncatula
  CDS (73)..(1143)
cctctatagctatttgtctattacttgcttttcacacactgtgttcttcttcttccttcactattcatcatcatgtctttgctttcagatctcatcaacctcaatctctcagaatcctctgaaaagattattgctgaatacatatgggttggtggatctggtatggaccttagaagcaaagccaggactctacctggtccagtgagtgacccttcaaaacttcctaaatggaactatgatggatcaagcacaaatcaagctccaggacaagatagtgaagttatcttatatccacaagctattttcaaggatccatttagacaaggcaacaatattcttgtgatttgtgatgtttacaccccagctggtgagccactcccaacaaacaagaggtacaatgctgccaaaattttcagccaccctgatgttgctgctgaggtaccatggtatggaattgagcaagaatatacattattgcagaaagatactaattggccactaggatggcctattggtggctatccaggaccacaaggcccatattattgtgggattggtgctgataaagcctatggtcgtgacattgttgatgcacattacaaagcttgtctttatgctggcattaacattagtggcatcaatggagaggttatgcctggtcagtgggagttccaagttggcccttctgttggtatttctgctggagatgagatatgggctgctcgttacattctagagaggatcacagagatagctggagtggttgtttcatttgaccctaagccaattccgggtgattggaatggagctggtgctcacacaaactatagcaccaagtcaatgagagagaatggaggctatgaaatcatcaagaaggccattgaaaagcttggattgaggcataaggaacacattgctgcctatggagaaggaaatgagagacgtctcactggaaaacatgaaacagcagacatcaacaccttttcttggggtgtggcaaaccgtggtgcatctgttagggttggaagagacacagaaaaagatggcaaaggttactttgaggatagaaggccttcttctaatatggatccctatgtggttacttccatgattgctgaaactacccttctatggaaaccatgaagtcacaaccacttgtctttggatttggaccacatcacattatgtgttcaataaatagactagtttatatctattatcattatcattatgcaaagtgttgcttcattagtagtaattgtccaagtggtctttaagcacaaagcatttagtccatgtatttggatgaaaataattttatcattaataacatggttgcttcttgattttactctaataatttcatggatcaataatgcaatgtttgttgctctttcttggattcaaaaaaaaaaaaaaaaaaaa

SEQ ID NO: 21170 - protein, 356 aa, Medicago truncatula
MSLLSDLINLNLSESSEKIIAEYIWVGGSGMDLRSKARTLPGPVSDPSKLPKWNYDGSSTNQAPGQDSEVILYPQAIFKDPFRQGNNILVICDVYTPAGEPLPTNKRYNAAKIFSHPDVAAEVPWYGIEQEYTLLQKDTNWPLGWPIGGYPGPQGPYYCGIGADKAYGRDIVDAHYKACLYAGINISGINGEVMPGQWEFQVGPSVGISAGDEIWAARYILERITEIAGVVVSFDPKPIPGDWNGAGAHTNYSTKSMRENGGYEIIKKAIEKLGLRHKEHIAAYGEGNERRLTGKHETADINTFSWGVANRGASVRVGRDTEKDGKGYFEDRRPSSNMDPYVVTSMIAETTLLWKP

SEQ ID NO: 21171 - DNA, 1488 bp, Medicago truncatula
  CDS (145)..(1215)
aaataaagacccaactctgcctcatttctctctctattcacaatatttccgttttgattttcatttgattcattcattgaatcaaatcgaatctttaggattcaatacagattccttcgattttactaagtttgaaaccaaaacatgtctctcctttcagatctcatcaaccttgacctctccgaaaccaccgagaaaatcatcgccgaatacatatggattggtggatctggtttggacttgaggagcaaagcaaggactctaccaggaccagttactgacccttcacagcttcccaagtggaactatgatggttccagcacaggtcaagctcctggagaagatagtgaagttattatatacccacaagccattttcaaggatccattcagaaggggtaacaatatctttgttatgtgtgatgcatacactccagctggagaacccattcccaccaacaagagacacgcagctgccaaggttttcagccatcctgatgttgttgctgaagtaccatggtatggtattgaacaagaatacaccttgttgcagaaagacatcaactggcctcttggttggccagttggtggttttcctggacctcagggaccatactattgtggtgctggtgctgacaaggcatttggccgtgacattgttgactcacattacaaagcctgtctttatgccggcatcaacatcagtggaatcaatggtgaagtgatgcctggtcaatgggaattccaagttggtccctcagttggcatctctgctggtgatgaaatttgggttgctcgttacattttggagaggatcactgagattgctgatgtggtgctttcctttgacccaaaaccaattaagggtgattggaatggtgctggtgctcacacaaattacagcaccaagtctatgagagaagatggtggctatgaagtcatcttgaaagcaattgagaagcttgggaagaagcacaaggagcacattgctgcttatggagaaggcaacgagcgtaggttgacagggcgacatgagacggctgacattaacaccttcttatggggtgttgcaaaccgtggtgcgtcgattagagttggaagggacacagagaaagcaggaaaaggttatttcgaggacaggaggccatcatctaacatggatccatatgttgttacttccatgattgcagacaccaccattctctggaaaccataagccaccacgctacttctgctataaaacacacacatgcattgtagtctttcaaagtcattgttgattccgcattagaatttggtcattggtttttctaggatttgatttgtgttattgttatggttcacactttgtttgtttggatctgagtccttgttatggtttcatatttctttttcttgttctaagtaaatgtctgaataataatgtaatgattatcggtaaaataattattgttgattatgattattgataaaaaaaaaaaaaaaaaaa

SEQ ID NO: 21172 - protein, 356 aa, Medicago truncatula
MSLLSDLINLDLSETTEKIIAEYIWIGGSGLDLRSKARTLPGPVTDPSQLPKWNYDGSSTGQAPGEDSEVIIYPQAIFKDPFRRGNNIFVMCDAYTPAGEPIPTNKRHAAAKVFSHPDVVAEVPWYGIEQEYTLLQKDINWPLGWPVGGFPGPQGPYYCGAGADKAFGRDIVDSHYKACLYAGINISGINGEVMPGQWEFQVGPSVGISAGDEIWVARYILERITEIADVVLSFDPKPIKGDWNGAGAHTNYSTKSMREDGGYEVILKAIEKLGKKHKEHIAAYGEGNERRLTGRHETADINTFLWGVANRGASIRVGRDTEKAGKGYFEDRRPSSNMDPYVVTSMIADTTILWKP

SEQ ID NO: 21173 - DNA, 1495 bp, Hevea brasiliensis
  CDS (114)..(1184)
actcggtactccaaaaagctttcacgccctccccccagctagacacctctgcatacagaggcaggaagaagaggaagaagaagagaagagttgccaattattactgtgtggacatgtcgcttctctcagatctcatcaaccttaacctctcagacaccactgacaagatcattgccgagtacatatggatcggcggatctggcatggacatgaggagcaaagcaaggactctttctggtcctgttagtgatccttcaaagctccccaagtggaactatgatggttccagcacaggacaggctcctggagaagacagcgaagtcatcctatatccccaggctattttcaaggatccatttaggaggggcaacaatatacttgtgatgtgtgatgcttacacccctgctggtgagccaattccaacaaacaagagacacgctgctgctaagatcttcagccatccagatgttgttgctgaagagccctggtacggcattgagcaagaatacaccttgctgcagagagatgttaaatggcctattgggtggcctcttggtggttaccctggtcctcaggggccatactactgtagtattggtgctgacaaatcctttgggcgagacgttgttgattcacactacaagtcctgtctatatgctggcatcaacattagtggtattaatggagaagtcatgccaggccagtgggaatttcaagtgggacctgcagttggaatctctgctggagatgaattatgggttgcgcgctacattttggagaggattacagagattgctggagttgtcctttcttttgatcccaagccaattcagggtgactggaatggtgctggagctcacacaaactatagtacaaagtcaatgaggcatgatgggggctatgaggtcatcaagaaagcaattgagaagttggggctgaggcacaaagaacacattgctgcatatggtgaaggcaatgaacgcagactgactggacgacatgaaacggctgacatcaacactttcttatggggcgttgctaaccgtggagcatcgattcgcgttggccgagacacagagaagcaaggaaagggatatttcgaggacaggaggcctgcatcaaacatggatccatatgttgtgacttctatgattgcagaaaccacaatcctgtggaaaccataagcaagttgatgctcccaaccactaaaaatttgaaacattgttgtttttagcctgtgtctgtgggagtgtagaaagaactgtgtttcagtgggaacttgttctccatgtggtttcaacttcctctttgattccaaattttcctgctgtttcgccagttcgcccttgtgtgggaggtgtggcaaggttgggttattgcttccttgcatatgcagtcattctctgttatgcattttaataatataaaacgctttaatacaataacattattattgggcagatttttctaaaaaaaaaaaaaaaaaaaaaaaaaa

SEQ ID NO: 21174 - protein, 356 aa, Hevea brasiliensis
MSLLSDLINLNLSDTTDKIIAEYIWIGGSGMDMRSKARTLSGPVSDPSKLPKWNYDGSSTGQAPGEDSEVILYPQAIFKDPFRRGNNILVMCDAYTPAGEPIPTNKRHAAAKIFSHPDVVAEEPWYGIEQEYTLLQRDVKWPIGWPLGGYPGPQGPYYCSIGADKSFGRDVVDSHYKSCLYAGINISGINGEVMPGQWEFQVGPAVGISAGDELWVARYILERITEIAGVVLSFDPKPIQGDWNGAGAHTNYSTKSMRHDGGYEVIKKAIEKLGLRHKEHIAAYGEGNERRLTGRHETADINTFLWGVANRGASIRVGRDTEKQGKGYFEDRRPASNMDPYVVTSMIAETTILWKP

SEQ ID NO: 21175 - DNA, 2160 bp, Helicobacter pylori
  CDS (573)..(2018)
cttgatcaacttgcacccatgtggatgcaagagcggtttcctacctttcattgaaatctaggctaggaaagttaagatttaaagcaggaagaacacttcccaaaatattctctagatgctgtatctttttaccttgttcgcgatttagagaaagtgaataataaagtgcttcattaagtcccttgttttcatctttaagtctttcattctgatctaaggtctgcttaagaccgccattcaaatatgcggcttcagcattatacagagccgcaccttttaaaggttttccgtacctatcgcagaaaactccatttataagtaagaagttttgtttcataatttttccttaaatttaaaataacaccccatttctaggtagagatagggcggcaattatacttataactagcaaacgaataataccacaataaaagaaacaaaatgccaaaattaaaaaaggtgggttttagtctctataaaatttagagcatcaattctactttttttaccccataaaatgctataatcacccctatcaatcaaactcaattcataacaattaaaggtggttaatgatagtaagaactcaaaatagtgaaagcaagatcaaagaattttttgaattttgcaaagaaaatgaagtggaatttgtggattttagattcagcgatattaaaggcacttggaatcacatcgcttattcttttggggctttaacgcatggcatgtttaaagaggggattccttttgatgcgagttgttttaagggctggcaaggcattgaacactccgatatgattttaacccccgatttggtgcgttatttcattgatccttttagcgcagatgtgagcgtggtcgtgttttgcgatgtgtatgatgtgtataaaaaccagccttatgaaaaatgccccagaagtatcgctaaaaaagccttacagcatttaaaagattcaggtttgggcgatgtggcttattttggtgcggagagcgaatttttcatctttgattccattaaaattaaagacgcttccaattcccaatactacgaagtggatagcgaagaaggcgaatggaatcgggataggagctttgaaaatggcgtgaattttgggcatagaccgggcaagcaagggggctatatgcctgtgccgccaacggatacgatgatggatattcgcactgaaattgtgaaagtcttaaaccaagtggggttagaaacttttgtcgcccatcatgaagtcgcgcaagcgcaaggcgaagtgggcgtgaaatttggggatttagtggaagccgctgacaatgtccaaaaactcaaatatgtggttaaaatggtcgctcatttaaacggcaaaaccgccactttcatgccaaaacctttatacggggataacgggagcgggatgcacacccatgtgagcgtttggaaaaacaacgaaaacctttttagcggcgaaacttataagggcttgagtgggttagcgttgcattttttagggggtgtgttgcgtcacgctagagggttagccgctttcactaacgcttccactaattcttacaaacgcctaattccaggctatgaagccccatctattttaacttattcagctaacaacaggagcgctagcgtgcgtatcccttatgggatttctaaaaatagcgcgaggtttgaattcaggtttcctgacagctcatcaaacccctacctggcttttggggctattttaatggcgggcattgatggcattaaaaataaaatggatcccggcgaagcgatggacattaaccttttcaagctaactttagacgaaattatagaacagggtatcatacaaatgccccacactttaaggagatcattagaagaaatgctagccgataagcagtatctaaaacagggtcaggtctttagcgaacaatttatccacgcctatcagtctcttaaattccattctgaagtgttcccatgggagagcaaaccccatccttttgaatttatcaccacttattcatgctaaaacaatgagtgggttcataaatcccactctaaaaatctagaataaggcaaaaataccttatttttaaaaagagtggttgaaagaattgattttctttgtttgttggttttattttaatagggtattgatcataaaatttaaa

SEQ ID NO: 21176 - protein, 481 aa, Helicobacter pylori
MIVRTQNSESKIKEFFEFCKENEVEFVDFRFSDIKGTWNHIAYSFGALTHGMFKEGIPFDASCFKGWQGIEHSDMILTPDLVRYFIDPFSADVSVVVFCDVYDVYKNQPYEKCPRSIAKKALQHLKDSGLGDVAYFGAESEFFIFDSIKIKDASNSQYYEVDSEEGEWNRDRSFENGVNFGHRPGKQGGYMPVPPTDTMMDIRTEIVKVLNQVGLETFVAHHEVAQAQGEVGVKFGDLVEAADNVQKLKYVVKMVAHLNGKTATFMPKPLYGDNGSGMHTHVSVWKNNENLFSGETYKGLSGLALHFLGGVLRHARGLAAFTNASTNSYKRLIPGYEAPSILTYSANNRSASVRIPYGISKNSARFEFRFPDSSSNPYLAFGAILMAGIDGIKNKMDPGEAMDINLFKLTLDEIIEQGIIQMPHTLRRSLEEMLADKQYLKQGQVFSEQFIHAYQSLKFHSEVFPWESKPHPFEFITTYSC

SEQ ID NO: 21177 - DNA, 1203 bp, Aedes aegypti
  CDS (1)..(1203)
atggcattcagagtggtgggattattgattcgccaggaactgtcctcccttggcagtgcatcgacaacgcgcatgatcagcaccagtgcgacacgatctgcacgtattctgcaagagtcacccaatgcttacatgaacaaaacgctgttggatcggtatcacaagctcaagtacgatccaaagtacgttcaagcaacctatgtgtggatcgatggcacgggtgaaaacgttcgtttgaaggatcgtgtgctcgattacgtaccgaaaaaaccggaagacgtgccaaactggcagtacgacggcagctcaacctatcaagctctgggtggtaactctgacatcaagttggttccccgtgctttgtacaaggatccattcaagccaggaccaaatgatttgattgtgctgtgcgacacgtaccaaccagacggaaagccaaccgaatctaacaaacgtgctttaatgcaggatgcctacaacaagtccaaagattacgaaccatggttcggaatcgagcaggaatacacgttcctagacatcgatggaaggcctttgggttggccaacggctggattcccaggaccccaggggccatactactgcgctactggtgcacagaacgtcgtcggtcgcgacatcgccgaagctcacgctctggcttgcctctatgctggagttgattttgccggaaccaatgccgaagtcatgccagctcagtgggaattccaagttggaccaaatcttggaatgaagtgcgctgacgatatctggcttgctcgttacctgctgtggcgtatcgctgaggactacggtgttgtcgtcacgttcgaccccaaaccaatggaaggaaactggaatggtgctggaggccattgcaacttctccaccaagcagatgcgagcagaaaatggtatcgaggccatcaaggcagctattgagaaactgtccaagcagcatgccaagcatatcaaggcctacgatccacgaggaggaaaggacaacgaacgtcgcctggttggccgtctcgagacttcgtccatcgacaaattcagttggggtgttgccgaccgtagcaccagtgttcgcattccacgaggcgttgccgatgccaacaagggctacctcgaggacagacgtccaagctcaaactgtgatccgcacagcgtttgccatgctatccttgaaacttgcctcgtcgagtaa

SEQ ID NO: 21178 - protein, 400 aa, Aedes aegypti
MAFRVVGLLIRQELSSLGSASTTRMISTSATRSARILQESPNAYMNKTLLDRYHKLKYDPKYVQATYVWIDGTGENVRLKDRVLDYVPKKPEDVPNWQYDGSSTYQALGGNSDIKLVPRALYKDPFKPGPNDLIVLCDTYQPDGKPTESNKRALMQDAYNKSKDYEPWFGIEQEYTFLDIDGRPLGWPTAGFPGPQGPYYCATGAQNVVGRDIAEAHALACLYAGVDFAGTNAEVMPAQWEFQVGPNLGMKCADDIWLARYLLWRIAEDYGVVVTFDPKPMEGNWNGAGGHCNFSTKQMRAENGIEAIKAAIEKLSKQHAKHIKAYDPRGGKDNERRLVGRLETSSIDKFSWGVADRSTSVRIPRGVADANKGYLEDRRPSSNCDPHSVCHAILETCLVE

SEQ ID NO: 21179 - DNA, 1518 bp, Skeletonema costatum
  misc_feature (1360)..(1360): n is a, c, g, or t
  CDS (40)..(1272)
gtaaatccattttttccttcctctactcaataaacaaccatgaagctcgctgttaccttcctcgctaccatcggtcctaccgggcggttcgcccctgcggccaacactgttgcccgcacctcggccctcaacatggtccaacagcttgacctcaaaaccggtcaatctcaacttgacacctccgttgttgaccgtttcagcgctcttccctaccccgacgacaaggtcctcgccgaatacgtttgggttgatgccaagggagagtgccgttccaagacacgtactcttcccgttgcccgtaccgaggccgtagacaagctcccgaactggaacttcgacggatcatctaccgaccaagctcccggagatgattcggaggttatcttgaggccatgccgtattttcaaggatcccttccgccctcgtgctcatggattagataacaacttggttatgtgtgatacttatactcctgctggagaggctatccctaccaacactcgtgctattgccgccaaggccttcgaaggcaaggaagacgaagaagtctggttcggacttgagcaagaattcacccctcttcaacctcgaccaacgcactcccctcggctggcccaagaaccggtgtcccaaccgcgctcaggaccctactactcgtccgccggtcccgagaacagcttcggacgtgccgtcaccgatgccatgtaccgctgctgcctttacgctggacttgaaatcagtggaaccaacggtgaggtcatgcccggacaacaggaataccagattggaccatgcgtcggaattgatgccggtgatcagcttttcatgagtcgttacatccttcagcgtgtgtgcgaagagttccaggtttactgcactcttcaccccaaacccatcaccgacgaagactggaacggtgctggtatgcacaccaatgattctaccaaatccatgcgtgaggccggtggacttgacattattaagcaggcaatttacaagttgggtgccaagcacaaagagcacattgccatttacggagagggcaatgagcttcgtttgactggaaagttcgagactgctagcatggacgagttctctttcggagttgccaaccgtggtgccagtgtgcgtattggacgtgataccgaggctgaggagatgctgggttacttcgaggacagaaagccccagtttccaaacgctgatccttaccttgttactggaaaaagatcatggctacccatcatcatggaggatattgaagtttcctgagattgctcctcttgtccgcgcgccgaggcttaagcaaaaagaaagtatattgcacctctgaattctgaaggattttctctgagaccancttcccattgaggagagagagagaagatgaaagaggagacagaacactagctaagaggaaatgaaagtctcgtttagttctgagctcttgggtttttcatttatctgagtataccttaacatataaaaagaagttatttgcaaaaaaaaaaaaaaaaa

SEQ ID NO: 21180 - protein, 410 aa, Skeletonema costatum
MKLAVTFLATIGPTGRFAPAANTVARTSALNMVQQLDLKTGQSQLDTSVVDRFSALPYPDDKVLAEYVWVDAKGECRSKTRTLPVARTEAVDKLPNWNFDGSSTDQAPGDDSEVILRPCRIFKDPFRPRAHGLDNNLVMCDTYTPAGEAIPTNTRAIAAKAFEGKEDEEVWFGLEQEFTPLQPRPTHSPRLAQEPVSQPRSGPYYSSAGPENSFGRAVTDAMYRCCLYAGLEISGTNGEVMPGQQEYQIGPCVGIDAGDQLFMSRYILQRVCEEFQVYCTLHPKPITDEDWNGAGMHTNDSTKSMREAGGLDIIKQAIYKLGAKHKEHIAIYGEGNELRLTGKFETASMDEFSFGVANRGASVRIGRDTEAEEMLGYFEDRKPQFPNADPYLVTGKRSWLPIIMEDIEVS

SEQ ID NO: 21181 - DNA, 2193 bp, Drosophila melanogaster
  CDS (184)..(1383)
acaagacttccaaacatcgaattggtcgggtgtccccaacagtcgctccgcagcccctgacagaaacagaaacgaaaaccgaaagtaccgcaatccaaaattaccaaaagacctgtccaaccagcgactgtttaaccaatcatataactgtaaagtggaaaaacgagcagagcacgaaccaagatgcgactacgcgtggcaggactcttcctgaagaaggagctggtggctcccgcaacacagcagctgcgtctgctgcgtactggcaataccacccgctcccagttcttggccaactcccccaacacggctctagacaagagcattctgcagaggtaccgcaacctggaaacgccggccaatcgagtgcaggctacttacttatggatcgacggtaccggcgagaacattcgcctcaaggatcgcgttttggacaaagtacccagctccgtggaggacttgccggattggcagtacgacggcagttccacctaccaggcccatggcgagaactcggacaccacgctcaagccacgcgccatatatcgcgatccctttaagccgggaaagaacgacgtaattgtcctgtgcgacacctacagcgccgacggcaagccgacggcgtccaacaagcgtgccgcgttccaggcagccattgacctaattagcgatcaggagccctggttcggcattgagcaagaatacactttattagacgtggacggacgtcccttcggctggccggagaacggtttcccagccccacaaggtccttactactgcggcgtgggagctgaccgtgtgtacgctcgcgatcttgtggaggcccacgtcgtggcctgcctgtatgctgggatcgacttcgccggcaccaatgccgaggtaatgcccgcgcagtgggagttccaaattggtccagccgggattaaggcatgtgacgatttatgggtgtcgcgatatattttgcagcgcatagctgaggagtatggcgtagtggtcacctttgaccccaaaccgatggagggtcagtggaacggagccggcgcgcataccaacttttccacaaaggagatgcgtgctgatggcggaatcaaggccatcgaggaagctatcgagaagctgagcaagcgccacgagcggcacatcaaggcatacgaccccaaggaaggcaaagacaatgaacggcgcctcgtgggacgtcttgagacttctagcatcgataagttttcttggggcgtggccaaccgggccgtaagtgtgcgagtgccgcgtggcgttgcgacggccggcaaaggatacctcgaagaccggcggccaagctccaactgtgatccctacgccgtgtgcaacgccattgttcgcacctgcctgctcaacgagtaggctgtgagcggtgcaacagatgtttaattttttgtacattatgttttatggaactgtgaagcgtatccgatcatttggttatatttacattgaactgaagcaaaatttagtttgcttgtgcaaaaaagacaggagaccgaggcacgaaaagcgtgcgcttagaatttaagaacgtgggtgggtggcaagaagaactaagctaaagcgaaatttccttaaagcgatggggcctcatgaatactttgccatatatctcacaaactacgtatatctatcattgctttaatctaaataataaaaaacattgtactctacgttaattttttgtaccttttagatcaaacaaacattttgggatccgacgttgaattcggtcaacgccattttttgcccttaacttcttgaacgcacttttttaataactcctaagagtttctaaatgtaaatttaagaaggaaatatcactgaaatcggacgatatgcatattaatcattcatatccatgagcacgaatacacatatatgtgaaatatgtttataaaaaccaattgttgattagaagttgttaaaaataaaatactaagaaattaatttatgtatatatattggtacatatgtatctcactttacggatctgtcgcttcactttgttcggtagcattttacatcattttactatatgctgttataatataaatgtctaaatactagcactagcaaaattaaaaattccattgagatacataaatacattttgagtaaaagcagaactgcgtacaaagcaaaacacaaaaaaaaaaaaaaaaaaaa

SEQ ID NO: 21182 - protein, 399 aa, Drosophila melanogaster
MRLRVAGLFLKKELVAPATQQLRLLRTGNTTRSQFLANSPNTALDKSILQRYRNLETPANRVQATYLWIDGTGENIRLKDRVLDKVPSSVEDLPDWQYDGSSTYQAHGENSDTTLKPRAIYRDPFKPGKNDVIVLCDTYSADGKPTASNKRAAFQAAIDLISDQEPWFGIEQEYTLLDVDGRPFGWPENGFPAPQGPYYCGVGADRVYARDLVEAHVVACLYAGIDFAGTNAEVMPAQWEFQIGPAGIKACDDLWVSRYILQRIAEEYGVVVTFDPKPMEGQWNGAGAHTNFSTKEMRADGGIKAIEEAIEKLSKRHERHIKAYDPKEGKDNERRLVGRLETSSIDKFSWGVANRAVSVRVPRGVATAGKGYLEDRRPSSNCDPYAVCNAIVRTCLLNE

SEQ ID NO: 21183 - DNA, 1410 bp, Rhodospirillum rubrum
  CDS (1)..(1410)
atgtccgacgttaagaccattctcgaaatgattaaggaaaacgacgttaagttcgtcgatttccgcttcaccgatcccaagggcaagtggcagcataccgcccagtacgtgaccaccatcgacgaggaaagcctggtcgaaggcatcatgttcgacggttcgtcgatcgccgggtggaaggacatcaacgagtccgacatgatcctgaagcccgacctgaagtcggccttcatggatccgttctcggctcagccgcagctcgtcttgttctgcgacgtgctcgagccctcgaccgggcagccctatgagcgttgcccgcgctcgatcgccaagaaggccctgtcctatctggcctcgaccggcatcggcgacacctcgtacttcggcccggaagccgagttcttcgtgttcgacgacgtgcgcttcgacgtgtcgatgaaccgcgtcatgtacgaagtcgacagcgaagaaggcccctacgtcaccggcaagatcttcgacgagggcaactacggccaccgtccgccgatcaagggcggctatttcccggttccgccggtggacagcgcccaggacctgcgcgccgaaatgctctcgaccatggccgagatcggcatgcccgtcgaaaagcaccaccacgaagtggcgccgtcgcagcatgaactgggtgttcgcttcaacaccctgatcgaagccgccgacgacatgcagaagtacaagtatgtcgttcacatggtcgcccatgcctatggcaagaccgcgaccttcatgcccaagccgatcgccggcgacaacgggtcgggcatgcacgtccatcagtcgatctggaaggatggcaagccgctgttcgccggttcgggctatgccgacctgtcggaaatggccctttactacatcggcggcatcatcaagcatgccaaggcgctgaacgccttcaccaatccgtcgaccaactcgtacaagcgcctgatccccggcttcgaagccccggttctgctggcctattcggcccgcaaccgctcggcctcctgccgtatcccctatgtggcgagcccgaagggcaagcgcgtcgaggttcgtttccccgatgccgccgccaacccctatctggctttcgccgccatgatgatggccggcatcgacgggatcgagaacaagatccatccgggcgacccgatggacaagaacctctacgacctgccccccgaagaactgatgggcatccccacggtttgcggctctctgcgcgaagcgcttgacagcctgaacgccgaccgtgacttcctgaagaagggtggcgtcttcaccgacgacatgatcgatggctatgtcgccctgaagtgggaagaggtttacaacctcgagcatgctccccacccgatcgaatacaagatgtactactcggtctga

SEQ ID NO: 21184 - protein, 469 aa, Rhodospirillum rubrum
MSDVKTILEMIKENDVKFVDFRFTDPKGKWQHTAQYVTTIDEESLVEGIMFDGSSIAGWKDINESDMILKPDLKSAFMDPFSAQPQLVLFCDVLEPSTGQPYERCPRSIAKKALSYLASTGIGDTSYFGPEAEFFVFDDVRFDVSMNRVMYEVDSEEGPYVTGKIFDEGNYGHRPPIKGGYFPVPPVDSAQDLRAEMLSTMAEIGMPVEKHHHEVAPSQHELGVRFNTLIEAADDMQKYKYVVHMVAHAYGKTATFMPKPIAGDNGSGMHVHQSIWKDGKPLFAGSGYADLSEMALYYIGGIIKHAKALNAFTNPSTNSYKRLIPGFEAPVLLAYSARNRSASCRIPYVASPKGKRVEVRFPDAAANPYLAFAAMMMAGIDGIENKIHPGDPMDKNLYDLPPEELMGIPTVCGSLREALDSLNADRDFLKKGGVFTDDMIDGYVALKWEEVYNLEHAPHPIEYKMYYSV

SEQ ID NO: 21185 - DNA, 1889 bp, Xenopus laevis
  CDS (23)..(1117)
caaaaccagtggtacctaaataatggcgttggcaaccaatagtccggctgatagtaaaacgcttctggccaaatactacaatttgccacaaccagaagacaaaattcaggttatgtatgtgtggattgacggaacaggggaaaatcttcgctgcaaaacgatgaccgtggaccgagaaccactcagaccagaggattgtcgtttgtggaactttgacgggagcagtaccggacaggctgagggttcaaactccgatgtgtatttgaaaccgcgcgccatttttagcgatccattccgaggcgggaaaaacaaactcgttctgtgcgaaacattcacttacgacatgaaaccacatgccacaaaccaccgtttccagtgcacagaagtaatggaaaaagccaaagaacatgagccgtggtttggaattgagcaagagtacacactattcgacacagatggttatccactccagtggccgaaaaacggttttccagctccacaaggtccatactattgttcagtcggtgctggtaaagctttgggtcgagacgttctggaggcgcattaccgtgcctgtctctatgctggcgtggaaatttgtggtaccaatgccgaggttatgccttcccaatgggaattccaaatcggaccgtgcgaaggtgtgagtgccggtgatcacctatggatggctcgcttcctactgcaccgtgtggctgaggatttcggtgttgtggtcagttttgatccgaagccgatgcctggtgattggaacggttccggggcgcacacgaacttctcgactaaggcgatgcgacgacctgacacggggttgaaagcgattgaagacgcagtggaaaaactatctcgaaaacacgcggagcacattctcgtctatgatccgaaacaaggaatggacaatcgacgtcgactgaccggtttgcatgagactagcagtattcacggcttctcatccggagtggctaatcgtggtagcagtattcgaattccgcgccaggtggccgaggacggatttggctacttggaggatcgcagaccttcggccaactgtgacccatatcaagtgattcgaatgttggttcaaaccacttgtctgtgaatggggatgcactaacgatcgctgttgcgatttgccatgctcgctgccatgttcggacaatgatagatagagaagagagccagagagtcagagagagagccatcacattgagcaagccattgctaacccttcattcactctttcattcattcccgcatcatgtgactgactgactgactgactcagtgagtcaagctgtgctgttactattccagctcacacactaccccccccatcttgcgtttgtcttctttgtcttctttgttttgattatcatctgcctaaatgtgatattctcaggctacttacttacttcatctcttatcgtctcatacggaaacacgtataaacgtaaaaccatgaaagacacccaatttgccagcttgtttgagtctattgtatcagtgtacccatccatctaccatctaccgtcactactattactactaccaccattgttgtgacccttccatcccgacaacatctttctggtcgtcatactcatgatggactactaacactgtgctgtgaccttgaggcaagctatttatctaaagggataatacgttttcatggttggtgaccacgtacatgttctgtccacacccactgacccttccaccgttcaccctccaaaccgatttcttatttgtttgttgtttttctttgtgagtagtgttttttgtcggtgtctttaaaatcagatgtgacgaaaaaatatatatttgattgctcttaaaaaaaaaaaaaaaaaaaaaaaaaaaaaaaaaaa

SEQ ID NO: 21186 - protein, 364 aa, Xenopus laevis
MALATNSPADSKTLLAKYYNLPQPEDKIQVMYVWIDGTGENLRCKTMTVDREPLRPEDCRLWNFDGSSTGQAEGSNSDVYLKPRAIFSDPFRGGKNKLVLCETFTYDMKPHATNHRFQCTEVMEKAKEHEPWFGIEQEYTLFDTDGYPLQWPKNGFPAPQGPYYCSVGAGKALGRDVLEAHYRACLYAGVEICGTNAEVMPSQWEFQIGPCEGVSAGDHLWMARFLLHRVAEDFGVVVSFDPKPMPGDWNGSGAHTNFSTKAMRRPDTGLKAIEDAVEKLSRKHAEHILVYDPKQGMDNRRRLTGLHETSSIHGFSSGVANRGSSIRIPRQVAEDGFGYLEDRRPSANCDPYQVIRMLVQTTCL

SEQ ID NO: 21187 - DNA, 1523 bp, Nicotiana attenuata
  CDS (51)..(1349)
caacactatttttccagcatagcattaccaacttagttggttaggtgaagatggctcagatcttggctccatctgcacaatggcagatgagaatgacaaagagctcaacagatgctaatcccttgacttcaaagatgtggagttctgtggtattgaagcagaataaaagacttgctgttaaaagctctgccaaatttagagtctttgctctccaatctgatagtggcactgtgaacagagtggaacagctgctaaacttggacgtaactccatacactgacaagatcattgctgaatatatttggatcggaggatctggaattgacatgcgcagtaaatcaaggactatttcaaagccagtcaagcatgcttctgagctcccaaagtggaactacgatggatcaagtactggacaagcacctggagaagacagtgaagtcattctataccctcaggcaatatttaaagaccctttccgtggtggtaacaacatcttggttatctgtgatgcctacacaccagctggagagccaattccaacgaacaaacgccataaagctgctcagatttttagcgactcaaaagttgtatctgaagttccatggttcggaatagaacaagagtacaccttactccaacaaaatgtgaagtggcctttaggttggcctgttggaggctaccccggacctcagggtccttactactgtggtgctggagcggataagtcatttggccgagatatatcagatgctcactacaaggcttgcctgtatgctggaattaacattagtggtaccaatggagaggttatgccggggcagtgggaatttcaagtaggtcctagtgtgggaattgaagctggagatcacatctggtgtgctagatacatccttgagagaattactgaacaagcaggagttgttctgtcacttgatccaaaaccaattgagggtgactggaatggtgccggatgccacactaactacagtacactaagtatgagagaagagggaggctttgaagtaataaagaaagcaattctgaatctctcccttcgccacaaggagcatataagtgcttatggagaaggaaatgagagaaggttgactggaaagcatgaaactgcaagtattgacaaattttcatggggagttgctaaccgtggtgcctcaatccgtgtggggcgtgacactgagaagcaaggcaaaggttatttggaagaccgtcgcccagcttcaaacatggacccctatgttgtgaccggattacttgccgaaaccactattctgtgggagccaacccttgaggctgaagctcttgctgctcaaaagctcgcattgaatgtttagattatttaagggcagaatgatccataataatcttcttagagttcatgagctgctaagtgaagaaacttgtaccttgtttagattcccttttagggaaaatcttgtaaaggaaccacaattatcagttattcctataaaagaggttccttaagacaaaaaaaaaaaaaaaaaaaa

SEQ ID NO: 21188 - protein, 432 aa, Nicotiana attenuata
MAQILAPSAQWQMRMTKSSTDANPLTSKMWSSVVLKQNKRLAVKSSAKFRVFALQSDSGTVNRVEQLLNLDVTPYTDKIIAEYIWIGGSGIDMRSKSRTISKPVKHASELPKWNYDGSSTGQAPGEDSEVILYPQAIFKDPFRGGNNILVICDAYTPAGEPIPTNKRHKAAQIFSDSKVVSEVPWFGIEQEYTLLQQNVKWPLGWPVGGYPGPQGPYYCGAGADKSFGRDISDAHYKACLYAGINISGTNGEVMPGQWEFQVGPSVGIEAGDHIWCARYILERITEQAGVVLSLDPKPIEGDWNGAGCHTNYSTLSMREEGGFEVIKKAILNLSLRHKEHISAYGEGNERRLTGKHETASIDKFSWGVANRGASIRVGRDTEKQGKGYLEDRRPASNMDPYVVTGLLAETTILWEPTLEAEALAAQKLALNV

SEQ ID NO: 21189 - DNA, 1410 bp, Erwinia carotovora
  CDS (1)..(1410)
atgtccgcagaacatgttttgacgatgctgaatgagcacgaagtgaagtttgttgatttacgcttcacggatactaaaggtaaagagcagcacgtcaccattccggctcatcaagtcaatgccgacttcttcgaagaaggtaaaatgtttgatggttcctcgattggcggctggaaaggtattaacgagtcagacatggttctgatgcctgatgccagcacagcgatgattgatccgttcttcgaagatactacgctgatcattcgttgtgacatccttgagccaggcaccatgcaaggctatgaccgtgacccgcgttctatcgcgaaacgtgcggaagatttcctgcgttcttccggtatcgccgacaccgtcctgttcgggcctgagccagaattcttcctgtttgatgacatccgtttcggcagcagcacttcaggttcccatgttgctatcgacgatgtcgaagcctactggaactccggtaaagcatacgaaggtggtaacaaaggtcaccgtccaggcctgaaaggcggctatttcccagttccacctgtcgattcatcacaggacatccgttctgctatgtgtctgaccatggagcaaatgggtctggttgttgaagctcaccaccatgaagtggctaccgctggtcagaacgaagtggctacccgcttcaataccatgaccaaaaaagctgacgaaattcagatctacaaatatgtcgtgcataacgtggctcacgcctacggtaaaacagcgaccttcatgccaaaacctatgttcggtgataacggttctggtatgcactgccacatgtctctgtctaaagacggcactaacctgttcgctggcgacaaatacggcggcctgtctgaaatggctctgttctacatcggcggtgttatcaagcacgctaaagccatcaacgccctggcgaacccgaccaccaactcctacaagcgtctggttccaggctacgaagcacctgttatgctggcttactctgcccgtaaccgttctgcttcaatacgtatcccagtggttgctagcccgaaagcacgtcgtatcgaagcgcgcttcccagatccagcagctaacccgtacctgtgcttcgctgcactgctgatggctggcctcgacggcatcatcaacaaaatccaccctggcgatgcgatggacaaaaacctgtacgacctgccgccggaagaagaagcagagattccaaaagttgcaggttctctggacgaggccctggctgcactgaacgaagaccgcgagttcctgacccgtggtggcgtgttcaccgacgacgctatcgaagcgtatatcgaactgcgtaaacctgagattgaccgcgttcgtatgacgccacacccagttgagttcgaactgtactacagcgtgtaa

SEQ ID NO: 21190 - protein, 469 aa, Erwinia carotovora
MSAEHVLTMLNEHEVKFVDLRFTDTKGKEQHVTIPAHQVNADFFEEGKMFDGSSIGGWKGINESDMVLMPDASTAMIDPFFEDTTLIIRCDILEPGTMQGYDRDPRSIAKRAEDFLRSSGIADTVLFGPEPEFFLFDDIRFGSSTSGSHVAIDDVEAYWNSGKAYEGGNKGHRPGLKGGYFPVPPVDSSQDIRSAMCLTMEQMGLVVEAHHHEVATAGQNEVATRFNTMTKKADEIQIYKYVVHNVAHAYGKTATFMPKPMFGDNGSGMHCHMSLSKDGTNLFAGDKYGGLSEMALFYIGGVIKHAKAINALANPTTNSYKRLVPGYEAPVMLAYSARNRSASIRIPVVASPKARRIEARFPDPAANPYLCFAALLMAGLDGIINKIHPGDAMDKNLYDLPPEEEAEIPKVAGSLDEALAALNEDREFLTRGGVFTDDAIEAYIELRKPEIDRVRMTPHPVEFELYYSV

SEQ ID NO: 21191 - DNA, 1122 bp, Xenopus laevis
  CDS (1)..(1122)
atggcaacctccgacagtgctcagttgagtaaggccattaagcagatgtatctggaactgccgcagggagataaggtgcaggcgatgtacatctggattgatgggaccggggagggtcttcgctgcaagactcgcactctggacagtgaacccaagaccatagaagatctgcccgaatggaacttcgatggatctagcacacaccaatctgagggatccaacagtgacatgtacctgattccagtcgcaatgtttagagacccttttcgaagggatcccaacaagctggtactttgcgaggtgctaaaatacaaccgaaaaactgcagaaacaaacctacgtcatacatgtaatcagataatggacatgatgggaaatgagcatccatggtttggaatggaacaggaatatacattgttgggtatggatggacatccttttggctggccttcaaatggcttcccaggaccacaaggcccctattactgtggagtaggtgcaaataaggcatatggtcgggatattgtggaggctcattatcgggcttgtctttatgctggtgtgaaaattgcaggaactaatgcagaagttatgccagcacagtgggaattccaaattggaccatgtgaaggaatagacatgggagatcacctttggattgctcgatttatactgcatagagtatgtgaggattttgggatcattgtgtcatttgacccaaaacccattactggaaactggaatggagctggatgtcacaccaatttcagcacaaagtcaatgcgtgaagaagaaggccttaagcacatagaagaatccattgaacgtctaagcaaacgtcatgagtatcacattagaatgtatgatccaaggggaggtaaagacaatgcccgtcgtctcacaggtttccatgagacatccagtatccatgagttctcagcaggagttgcaaaccgtggtgcaagtatccgcattccccgccttgtaggtcaggagaagaaaggctattttgaagatcgtcgtccatcggccaactgtgacccctatgctgtgaccgaggctatcatcaggacctgcctgctgaatgaaactggagacgaacctcttgaatacaagaactaa

SEQ ID NO: 21192 - protein, 373 aa, Xenopus laevis
MATSDSAQLSKAIKQMYLELPQGDKVQAMYIWIDGTGEGLRCKTRTLDSEPKTIEDLPEWNFDGSSTHQSEGSNSDMYLIPVAMFRDPFRRDPNKLVLCEVLKYNRKTAETNLRHTCNQIMDMMGNEHPWFGMEQEYTLLGMDGHPFGWPSNGFPGPQGPYYCGVGANKAYGRDIVEAHYRACLYAGVKIAGTNAEVMPAQWEFQIGPCEGIDMGDHLWIARFILHRVCEDFGIIVSFDPKPITGNWNGAGCHTNFSTKSMREEEGLKHIEESIERLSKRHEYHIRMYDPRGGKDNARRLTGFHETSSIHEFSAGVANRGASIRIPRLVGQEKKGYFEDRRPSANCDPYAVTEAIIRTCLLNETGDEPLEYKN

SEQ ID NO: 21193 - DNA, 1359 bp, Elaeagnus umbellata
  CDS (36)..(1103)
ctcctttgaaaaatagcccaaacttttttataactatgtctctcctctctgatctcctcaaccttaacatctcagaatccactgatagaatcatcgctgagtacatatggattggtggatcgggcttagatctcagaagcaaagcaactctgccaaaaaaagtgaagaacccatcagaactcccaaaatggaattatgatggttcaagcacgaatcaagcccctggcgatgacagtgaagtcatcttatatccacaagcaatatttagggatcctttcagaagagggaacaatatcctggttatgtgtgacgcatacactccagctggtgaaccaatccccactaacaaacgtcacaacgctgctaagattttcagtcacccggatgtcgatgccgaggagccatggtatgggattgagcaagaatatactcttcttcagaaggaggtcaactggcctctaggatggcctcttgggggcttccctggacctcagggaccttactattgtggtgttggggcagacaaggcttttggacgcgatattgtggattcacactacaaagcctgcctatatgctggtgttaacatcagtggaatcaatggtgaagttatgcctggccagtgggagtttcaagttggcccaactgttggtattgctgctggtgatcaagtatgggttgctagatatattcttgagagaattgctgaaattgctggagtagttgtttcatttgatccaaaaccaatcaagggtcactggaatggtgctggtgctcacaccaactacagcaccaaatccatgagaattgatggaggtattaatgtgattaagaaggccattgaaaaattgggtctccgccacaaggagcacattgctgcttatggtgaaggcaatgagaggaggttgactggtcgccatgagactgcagacattaacaccttctcctggggtgttgctaacagaggagcctctgtccgtgttggccgtgatactgaaaaggacggaaaaggttactttgaggacagaaggccagcatcaaacatggatccatatgttgtgacttccatgattgctgaaaccaccatcctgtggaagccttgagaagagaacaaaaaaccaagttgtttggttgatttgagttatattggttgattggggagaagaatcaaagctatgaggaatttgaataactttatctccctttcttgtgggtgtgtgtgcttgtactttgtctacttgtttacttattattaaatcatggttgttcacacaacatgaaatgtttttaattgctcgtgttttagaagaccttagtaataaaaaagttaatgttcaatcaaaaaaaaaaaaaaaaaaa

SEQ ID NO: 21194 - protein, 355 aa, Elaeagnus umbellata
MSLLSDLLNLNISESTDRIIAEYIWIGGSGLDLRSKATLPKKVKNPSELPKWNYDGSSTNQAPGDDSEVILYPQAIFRDPFRRGNNILVMCDAYTPAGEPIPTNKRHNAAKIFSHPDVDAEEPWYGIEQEYTLLQKEVNWPLGWPLGGFPGPQGPYYCGVGADKAFGRDIVDSHYKACLYAGVNISGINGEVMPGQWEFQVGPTVGIAAGDQVWVARYILERIAEIAGVVVSFDPKPIKGHWNGAGAHTNYSTKSMRIDGGINVIKKAIEKLGLRHKEHIAAYGEGNERRLTGRHETADINTFSWGVANRGASVRVGRDTEKDGKGYFEDRRPASNMDPYVVTSMIAETTILWKP

SEQ ID NO: 21195 - DNA, 1410 bp, Photobacterium profundum
  CDS (1)..(1410)
atgtcagtagaaaatgtactagcgctgatccaggaaaatgaagttaagtttattgacctacgttttaccgataccaaaggtaaagagcagcacatcactattccttctcatcaaatcgatagcgatttttttgaagatggcaaaatgtttgacggttcatcggttgctggttggaaaggtatcaatgaatcagacatggtgatgatgccagacgcttcaagcgcagtacttgacccattcacggaagattcaacactcaacattcgttgtgacattcttgagcctgcaaccatgcaaggctacgatcgcgacccacgttctatcgcaaaacgtgctgaagagtttatgcgttcgacgggtctagcagacacagtacttgtcggtcctgagcctgaatttttcctatttgacgatgttaagttcaacactgacatgtcaggttctttcttcaaaattgatgatatagaagcagcttggaactcgggttctgatttcgaaggcggtaacaaaggtcaccgtcctggcgttaaaggcggttacttcccagtagcacctgttgattcatctcaagacatccgttctgctatgtgtctaatcatggaagaaatgggccttgttgttgaagcacaccaccacgaagtagcgacagcgggtcagaatgagatcgcgactcgcttcaatacgctaacaacgaaagccgatgaaatccaaatctataagtacgttgtacacaacgttgctcatgcatttggtaaaacagcaaccttcatgccgaagccactcgttggtgataacggttcaggtatgcacgttcacatgtctctaaataaagacggacagaaccttttcgccggtgataagtacggcggcctttcagaaatggctatctactacatcggcggtatcattaagcacgcacgtgcaatcaatgcttttgctaacccagcaacgaactcgtacaagcgccttataccgggttacgaagcacctgtaatgcttgcatactctgcacgtaaccgttctgcttctattcgtatccctgtggtaccaagcccgaaagcacgtcgtatcgaagtacgtttcggcgatccagcagctaacccatacctagcattcgcagcaatgctaatggctggtcttgacggtattcaaaacaagatccacccaggcgaagcaatggataaagatctatacgatcttcctgctgaagaagcagctgaaattccacaagtagcagaatcgctagaaatcgcacttaagaacctagatgaagatcgtgagttcctaaccgctggtggtgtattctctgatgactttattgattcttacatcaagctgaagtctgaagacgtagagaaagtaaatatgacaactcacccacttgagtttgaactttactactctgtataa

SEQ ID NO: 21196 - protein, 469 aa, Photobacterium profundum
MSVENVLALIQENEVKFIDLRFTDTKGKEQHITIPSHQIDSDFFEDGKMFDGSSVAGWKGINESDMVMMPDASSAVLDPFTEDSTLNIRCDILEPATMQGYDRDPRSIAKRAEEFMRSTGLADTVLVGPEPEFFLFDDVKFNTDMSGSFFKIDDIEAAWNSGSDFEGGNKGHRPGVKGGYFPVAPVDSSQDIRSAMCLIMEEMGLVVEAHHHEVATAGQNEIATRFNTLTTKADEIQIYKYVVHNVAHAFGKTATFMPKPLVGDNGSGMHVHMSLNKDGQNLFAGDKYGGLSEMAIYYIGGIIKHARAINAFANPATNSYKRLIPGYEAPVMLAYSARNRSASIRIPVVPSPKARRIEVRFGDPAANPYLAFAAMLMAGLDGIQNKIHPGEAMDKDLYDLPAEEAAEIPQVAESLEIALKNLDEDREFLTAGGVFSDDFIDSYIKLKSEDVEKVNMTTHPLEFELYYSV

SEQ ID NO: 21197 - DNA, 1038 bp, Rhodopseudomonas palustris
  CDS (1)..(1038)
atgaccaagtacaagctcgagtacatctggctcgacggctacaagccgacgccgaacctccgcggcaagacgaccatcaaggaattcgagatctatccgacgctcgagcagcttccgctttggggattcgacggctcgtcgacgatgcaggccgagggccacagctccgactgcgtgctgaagccggttgcgatgtaccccgacgctgcgcggaagaacggcattctggttctgtgcgaagtgatgatgccggacggcgtcaccccgcatccgaccaacacccgcgccaccattctggacgacgaaggcgcctggttcggctttgaacaggaatacttcttctacaagaatggccgcccgcttggcttccccgaggccggctatcccgcgccgcagggcccgtactacaccggcgtcggctacaagcacgtcggtgacatcgcccgtcagatcgtcgaagagcacctcgacctctgcctcgcagccggcatcaaccacgaaggcatcaacgccgaggtggcgaagggccagtgggaattccaggtgttcggcaaggggtcgaggaccgctgccgaccagatgtggatggcgcgctatctgatgcttcgtctcaccgagaagtacggcatcgacatcgaattccactgcaagccgctcggcgacaccgattggaacggctcgggcatgcactgcaacttctccaccgcctacatgcgcgaagtcggcggcaaggagtatttcgaagcgatgatgaaggcgttcgaggccaacctcgacgaccacatcgcggtgtatggtcctgacaaccacatgcggctcaccggcaagcacgagaccgcgccgtggaacaagttttcctacggcatcgccgatcgcggcgcgtcgatccgggtgccgcactccttcgtcaacaacggctacaagggctatctggaagatcgccgcccgaactcgcagggcgacccctaccagatcgcgtcccaggttctgaagacgatttcgtcggtccccacctcgaagtcggcagccgccgcctga

SEQ ID NO: 21198 - protein, 345 aa, Rhodopseudomonas palustris
MTKYKLEYIWLDGYKPTPNLRGKTTIKEFEIYPTLEQLPLWGFDGSSTMQAEGHSSDCVLKPVAMYPDAARKNGILVLCEVMMPDGVTPHPTNTRATILDDEGAWFGFEQEYFFYKNGRPLGFPEAGYPAPQGPYYTGVGYKHVGDIARQIVEEHLDLCLAAGINHEGINAEVAKGQWEFQVFGKGSRTAADQMWMARYLMLRLTEKYGIDIEFHCKPLGDTDWNGSGMHCNFSTAYMREVGGKEYFEAMMKAFEANLDDHIAVYGPDNHMRLTGKHETAPWNKFSYGIADRGASIRVPHSFVNNGYKGYLEDRRPNSQGDPYQIASQVLKTISSVPTSKSAAAA

SEQ ID NO: 21199 - DNA, 1410 bp, Rhodopseudomonas palustris
  CDS (1)..(1410)
atgacgaccgctaaagaagtcctgaaatccatcaaggacaacgacgtgaaatacgtcgatctgcgtttcaccgatccgcgcggcaagtggcagcatgtcaccttcgacgtgtcgatgatcgacgaggagatcttctccgaaggcaccatgttcgacggctcctcgatcgccggttggaaggcgatcaacgagtccgacatgacgctgatgcccgatccggcgaccgccacgatcgatccgttcttcgcagagaccaccatggtgatcacctgcgacatcctcgagccgtcgaccggcgagccctacaaccgcgacccgcgcggcatcgccaagaaggcggaagcccaggtcaaggcgctcggcatcggtgacagcgtgttcgtcggccccgaagccgagttcttcgtgttcgacgacgtgcgctattcggcgagcccgtacaacaccggcttcaagctggactcgtcggaactgccgaccaactcggacaccgagtacgaaggcggcaacctcggccaccgcatccgcaccaaggccggttacttcccggtgccgccgcaggactccgtgcaggacatgcgctcggagatgctcggcgcgatggccaagatgggcgtcaaggtcgagaagcatcaccacgaagtcgcttcggcccagcacgagctcggcatgaagttcgacaccctgacccacatggccgaccagatgcagatctacaagtactgcatccatcaggtcgcccacatctacggcaagaccgcgaccttcatgccgaagccggtgttcggcgacaacggctcgggcatgcacgtccaccagtcgatctggaaggacggcaagccgaccttcgccggcaacaagtacgccgacctgtcggaaacctgcctccactacatcggcggcatcatcaagcacgccaaggcgatcaacgccttcaccaacccgtcgaccaactcctacaagcgtctggtcccgggctatgaagcgccggtgctgctggcctactcggcccgcaaccgctcggcctcgtgccgtatcccctacaccacctcgccgaaggccaagcgcgtcgaagtccgcttcccggacccgatggccaatccgtatctcgccttcgcggcgatgctgatggccggcctcgacggcatcaagaacaagatcgatccgggtccggcgatggacaaggacctgtacgatctgccgaaggaagagctgaagcagatcccgaccgtttgcggcagcttgcgcgaagcgctcgagaacctcgacaaggaccgcgccttcctcaaggccggcggcgtgttcgatgacgacttcatcgacgccttcatcgagctgaagatgaccgaagtggcgcggttcgaaatgaccccgcacccggtcgagttcgagatgtactactcgtactaa

SEQ ID NO: 21200 - protein, 469 aa, Rhodopseudomonas palustris
MTTAKEVLKSIKDNDVKYVDLRFTDPRGKWQHVTFDVSMIDEEIFSEGTMFDGSSIAGWKAINESDMTLMPDPATATIDPFFAETTMVITCDILEPSTGEPYNRDPRGIAKKAEAQVKALGIGDSVFVGPEAEFFVFDDVRYSASPYNTGFKLDSSELPTNSDTEYEGGNLGHRIRTKAGYFPVPPQDSVQDMRSEMLGAMAKMGVKVEKHHHEVASAQHELGMKFDTLTHMADQMQIYKYCIHQVAHIYGKTATFMPKPVFGDNGSGMHVHQSIWKDGKPTFAGNKYADLSETCLHYIGGIIKHAKAINAFTNPSTNSYKRLVPGYEAPVLLAYSARNRSASCRIPYTTSPKAKRVEVRFPDPMANPYLAFAAMLMAGLDGIKNKIDPGPAMDKDLYDLPKEELKQIPTVCGSLREALENLDKDRAFLKAGGVFDDDFIDAFIELKMTEVARFEMTPHPVEFEMYYSY

SEQ ID NO: 21201 - DNA, 1122 bp, Rattus norvegicus
  CDS (1)..(1122)
atggccacctcagcaagttcccacttgaacaaaggcatcaagcagatgtacatgaacctgccccagggcgagaagatccaactcatgtatatctgggttgatggtaccggggaagggctacgctgcaagacccgtactctggactgtgaccccaagtgtgtagaagagttacccgagtggaactttgatggttctagtacgtttcagtctgaaggctccgacagcgacatgtacctccatcctgtggccatgtttcgagaccccttccgcagagaccccaacaagctggtgttctgcgaagtattcaagtataaccggaagcccgcagagaccaacctgaggcacagctgtaagcgtataatggacatggtgagcagccagcacccctggtttggaatggaacaggagtatactctcatgggaacagacggccaccctttcggctggccttctaatggcttccctggaccccaaggaccctattactgcggtgtgggagctgacaaggcttatggccgagatatcgtggaggctcactaccgggcctgcttgtatgctggaatcaagatcacagggacaaatgccgaggttatgcctgcccagtgggaattccagataggaccctgcgaagggatccgcatgggagatcatctctgggtagcccgttttatcttgcatcgggtatgcgaagactttggggtgatagcaacctttgaccccaagcccattccagggaactggaatggggcaggctgccacaccaactttagcaccaaggccatgcgggaggagaatggtctgaggtgcattgaggaggccattgataaactgagcaagaggcaccagtaccacatccgtgcctacgaccccaaggggggcctggacaacgcccgccgtctgactggattccacgaaacctccaacatcaacgacttttccgctggcgttgccaaccgcagcgccagtatccgcattccccggattgtcggccaggagaagaagggttactttgaagaccgtcggccttctgccaattgcgacccctatgcggtgacggaagccatcgtccgcacgtgtctcctcaacgaaactggcgacgagcccttccaatacaagaactaa

SEQ ID NO: 21202 - protein, 373 aa, Rattus norvegicus
MATSASSHLNKGIKQMYMNLPQGEKIQLMYIWVDGTGEGLRCKTRTLDCDPKCVEELPEWNFDGSSTFQSEGSDSDMYLHPVAMFRDPFRRDPNKLVFCEVFKYNRKPAETNLRHSCKRIMDMVSSQHPWFGMEQEYTLMGTDGHPFGWPSNGFPGPQGPYYCGVGADKAYGRDIVEAHYRACLYAGIKITGTNAEVMPAQWEFQIGPCEGIRMGDHLWVARFILHRVCEDFGVIATFDPKPIPGNWNGAGCHTNFSTKAMREENGLRCIEEAIDKLSKRHQYHIRAYDPKGGLDNARRLTGFHETSNINDFSAGVANRSASIRIPRIVGQEKKGYFEDRRPSANCDPYAVTEAIVRTCLLNETGDEPFQYKN

SEQ ID NO: 21203 - DNA, 1278 bp, Triticum aestivum
  CDS (116)..(1204)
cccgcatttcccagagagctaccatttgccactacaacacctctccctctccctctccctctccatctccggtaggctccgggggaagaagaagaacagcacgccggcatccgccatgtctccgctcgccgaccttctcagcctcgacctgtccggctgcaccggcaagatcatcgccgagtacatatgggtcggcggcacgggcatggacgtcaggagcaaagccaggacgctgcccgggcccgttgatgaccccagcaagctcccaaaatggaatttcgacggctccagcaccggccaggccacgggcgacgacagcgaggtcatcctctgccctcaagccatcttcagggacccattcaggaaggggaacaacatcctggtcatctgtgactgctatgcgcctaacggagagccgattccgagcaacaagcggtacaacgcggcgaggatattcggccatcccgaggtcaaggctgaagaaccatggtatgggattgagcaagagtacacccttcttcagaaggacaccaactggcccattggctggccactagggggttaccctggccctcagggaccttactactgcgccgcgggtgcggagaaatcttacgggcgcgacatcgtcgatgcacactacaaggcctgcctctacgccggcatcaacatcggcggcatcaatgcagaagtcatgccaggacagtgggagttccaagtcggcccttccgtcggcatctcggccggcgacgagctctgggcggctcgctacatcctggagaggatcactgagattgctggcgtcgtcgtctccttcgaccccaagccgatcccgggagaatggaatggtgctggtgcccacacaaactacagcaccaagtcgatgaggagcgagggcgggtacgaggtgatcaagaaggcgatcaagaagctcgaggcgcggcacatggagcacatcgccgcctacggtgagggcaacgagcgccggctcaccggccgccatgagaccgccgacatcaacaccttcgtatggggcgtggcgaaccgcggcgcgtcggtgcgggtgggccgcgacaccgagaaggaaggcaagggctacttcgaggaccggaggccggggtccaacatggatccctacgtcgtcacctccctgatcgccgagaccaccatcctctgcaaggccggcctctccaatggcaagtagatgtcatctttgatgggttctgtcttctgtgtgaatgcccgtggttgtgtgtgtgtgtgtgtgtgtgtgtgtcc

SEQ ID NO: 21204 - protein, 362 aa, Triticum aestivum
MSPLADLLSLDLSGCTGKIIAEYIWVGGTGMDVRSKARTLPGPVDDPSKLPKWNFDGSSTGQATGDDSEVILCPQAIFRDPFRKGNNILVICDCYAPNGEPIPSNKRYNAARIFGHPEVKAEEPWYGIEQEYTLLQKDTNWPIGWPLGGYPGPQGPYYCAAGAEKSYGRDIVDAHYKACLYAGINIGGINAEVMPGQWEFQVGPSVGISAGDELWAARYILERITEIAGVVVSFDPKPIPGEWNGAGAHTNYSTKSMRSEGGYEVIKKAIKKLEARHMEHIAAYGEGNERRLTGRHETADINTFVWGVANRGASVRVGRDTEKEGKGYFEDRRPGSNMDPYVVTSLIAETTILCKAGLSNGK

SEQ ID NO: 21205 - DNA, 1299 bp, Triticum aestivum
  CDS (82)..(1170)
ttccaagaacacctctcccttcccttgctctgccctctccatctccatctccggctccgggaagaagaagaagaggtagccatgtctccgctcgccgaccttctcagcctcgacctgtccggctgcaccggcaagatcatcgccgagtacatatgggtcggcggcacagggatggacgtcaggagcaaagccaggacgctgcccgggcccgtggaggaccccagcaagcttccaaaatggaattttgacggctccagcaccggccaagccacgggtgacgacagcgaagtcatcctctgccctcaagccatcttcaaggacccattcaggagggggaacaacatcctggtcatctgtgactgctatgcgcctaacggagagccgattccgagcaacaagcggtacaacgcggcgaggatattcggccatcctgatgtcaaggctgaagaaccatggtatgggattgagcaagagtacacccttcttcagaaggacaccaactggcccattggctggccactagggggttaccctggtcctcagggaccttactactgcgccgcgggtgcggagaaatcttacgggcgcgacatcgtcgacgcgcactacaaggcctgcctctacgccggcatcaacatcggcggcatcaatgcagaagtcatgccaggacagtgggagttccaagtcggcccttccgtcggcatctcggccggcgacgagctctgggcggctcgctacatcctggagaggatcactgagattgccggtgtcgtcgtctccttcgaccccaaaccgatcccgggagagtggaatggtgctggtgcccacacaaactacagcaccaagtcgatgaggagcgagggtgggtacgaggtgatcaagaaggcgatccagaagctggaggcgcggcacatggagcacatcgccgcctacggggagggcaacgagcgccggctcaccggccgccacgagaccgccgacatcaacaccttcgtatggggcgtggcgaaccgcggcgcgtcggtgcgggtgggccgcgacaccgagaaggaaggcaagggctacttcgaggaccggaggccggcatccaacatggatccctacgtcgtcacctccatgatcgccgagaccaccatcctcagcaaggccggtctctccaatggcaagtagagtggctttgatgggttctgttatctgtgtgagtgcccgtggttgcgcatgtgtgtgtgtgtgtgtgtctgtgtgatctgcattgcagtgacaagactggcagggttgtgatatgatgataagcataac

SEQ ID NO: 21206 - protein, 362 aa, Triticum aestivum
MSPLADLLSLDLSGCTGKIIAEYIWVGGTGMDVRSKARTLPGPVEDPSKLPKWNFDGSSTGQATGDDSEVILCPQAIFKDPFRRGNNILVICDCYAPNGEPIPSNKRYNAARIFGHPDVKAEEPWYGIEQEYTLLQKDTNWPIGWPLGGYPGPQGPYYCAAGAEKSYGRDIVDAHYKACLYAGINIGGINAEVMPGQWEFQVGPSVGISAGDELWAARYILERITEIAGVVVSFDPKPIPGEWNGAGAHTNYSTKSMRSEGGYEVIKKAIQKLEARHMEHIAAYGEGNERRLTGRHETADINTFVWGVANRGASVRVGRDTEKEGKGYFEDRRPASNMDPYVVTSMIAETTILSKAGLSNGK

SEQ ID NO: 21207 - DNA, 1341 bp, Triticum aestivum
  CDS (28)..(1092)
ccctccttgcgagtagtagcagcagcaatggccagcctcgccgacctcgtcaacctcgacctcagcgactgcaccgacaagatcatcgtcgagtacctctgggttggaggatccggtatcgacatcaggagcaaagcaaggacggtgaacggccccatcaccgacgcgagccagctgcccaagtggaactacgacggctccagcaccggccaggctcccggagaggacagcgaagtcatcctctacccccaggccattttcaaggacccgttcaggaggggtgacaacctccttgttatgtgcgactgctacacaccacaaggtgttccaatccccactaacaagaggcacaatgctgccaagatcttcaacaccccgaatgttgcagctgaggagacatggtatggtatcgagcaggagtacactctcctccagaaggacgtgaactggccccttggctggcccattggtggctaccctggtcctcagggaccctactactgcgcggccggcgcggacaaggcgttcgggcgtgacatcgttgacgcgcactacaaggcgtgcctctacgccgggatcaacatcagcggcatcaacggggaggtcatgcccggccagtgggagttccaagtcgggccgtccgtggggatcgccgcgtccgaccagctgtgggtggcgcgctacatcctcgagaggatcacggaggttgccggggtggtgctgtccctggacccgaagccgatcccgggcgactggaacggcgccggcgcgcacaccaactacagcaccaagtcgatgcgggaggccggcgggtacggggtgatcaagacggccatcgagaagctgggcaagcggcacgcgcagcacatcgccgcctacggcgagggcaacgagcgccgcctcacgggccaccacgagaccgccgacatcaacaccttcaagtggggcgtggctgaccgcggcgcgtccatccgcgtggggcgcgacacggagaaggacggcaagggctacttcgaggaccgcaggccggcctccaacatggacccctacgtcgtcacctccatgatcgccgagaccaccctcctcctctgagccagcagcagatgacacacgcacacgctttcttcctctacctcggagtgagagagggcgacgatgaatttctttctgcaaaacgtctcctgtttccatttcttttgcaaggtctagtctgtttttggggcgtgcctttcgtgtctttcactttactcgttcagataagagtcttccgtgtactctgaaaataatgttcttctttccgcattccgataaatgaaatcatggaaccggttgtgattccgt

SEQ ID NO: 21208 - protein, 354 aa, Triticum aestivum
MASLADLVNLDLSDCTDKIIVEYLWVGGSGIDIRSKARTVNGPITDASQLPKWNYDGSSTGQAPGEDSEVILYPQAIFKDPFRRGDNLLVMCDCYTPQGVPIPTNKRHNAAKIFNTPNVAAEETWYGIEQEYTLLQKDVNWPLGWPIGGYPGPQGPYYCAAGADKAFGRDIVDAHYKACLYAGINISGINGEVMPGQWEFQVGPSVGIAASDQLWVARYILERITEVAGVVLSLDPKPIPGDWNGAGAHTNYSTKSMREAGGYGVIKTAIEKLGKRHAQHIAAYGEGNERRLTGHHETADINTFKWGVADRGASIRVGRDTEKDGKGYFEDRRPASNMDPYVVTSMIAETTLLL

SEQ ID NO: 21209 - DNA, 1634 bp, Aiptasia pallida
  CDS (77)..(1186)
attcctctatttattcagacttgatatttgtagtattccccgtcgttattagtaagctaaatttaaggacagagccatgagtcttcacgataaaagaactgtctctgacaagacatgtgttttggagaggtattcgaaacttgaccaaggaaccagcgttcaagccttgtacatttggattgacggtacaggcgaaggtatccgttgtaaaaccaagactttagagaaaaggccagattccattgaagaccttccaatctggaacttcgatggatcgagtaccgcacaagccgagggccataacagcgatgtctatcttcatcctgtagctattttcaaggacccattccgtggcggagaaaacatcttggttctctgcgagacctacacacacgaccataagccaacacacaccaacaacagaaagacctgtatgaacataatgaacgaccctgaagttaaatcttcacatccatggtttggcattgaacaagaatacaccctgcttgacattgatgggcacccacttggatggccaaagggaggctttccaggaccacaaggaccttactactgtggtgttggtaccaacaaagtgtttggtcgagaagtagtagaagcacattacagagcatgtttgtatgctggtgtgaagattgctggtactaatgccgaggttatgcctgctcagtgggaataccaagttggaccatgtgaaggcattgagatgggtgatcatctatggatctcaagatatatccttcatcgagttgctgaagacttccatgttgttgtatcatttgatcctaaacccatgcctggtgactggaatggtgctggtgctcactgcaattacagcaccgttggaatgagagaagaaaatggaatgaggttgatctatgaagccattgacaagcttgaaaagaaccatgactaccacatcaagaaatatgaccccaagcaaggacaagacaatgcgcgtcggttgactggaaggcatgagacctcaagtatttatcaattctctcatggtgtagccaacagaggtgccagtgtaagaatcccacgtcaatgtgctgaggatggcaagggctatcttgaagatagacgaccatcatcaaactgtgatccatacagtgttacagaggcaattgtcaggacaactataaagaactacacatgttgataagatggactagtaataattagtagagattattacatataatactgggttcaacatatttattttaacaccttcaaaaattattgaatgcaattttaattgacaaggtacctctacaaatagaatccaacgacattgtagttttctctttttaatagacatttaatgattctatgagaatcatcatccattgaattcatttaaattcaggggagtactgctgtttctgttcaaattattaatgggaattgcacgctatttagatttcaaaaattctacaaagcgttttttgagattaatgattacaagagttgtttagttgtatttgatgtttagtctagtactcgtttttatgtgatgtttttgtgacttattttgttgtttttagtacttatgtatatagatgacttttaataaagatattttagagattaaaaaaaaaaaaaaa

SEQ ID NO: 21210 - protein, 369 aa, Aiptasia pallida
MSLHDKRTVSDKTCVLERYSKLDQGTSVQALYIWIDGTGEGIRCKTKTLEKRPDSIEDLPIWNFDGSSTAQAEGHNSDVYLHPVAIFKDPFRGGENILVLCETYTHDHKPTHTNNRKTCMNIMNDPEVKSSHPWFGIEQEYTLLDIDGHPLGWPKGGFPGPQGPYYCGVGTNKVFGREVVEAHYRACLYAGVKIAGTNAEVMPAQWEYQVGPCEGIEMGDHLWISRYILHRVAEDFHVVVSFDPKPMPGDWNGAGAHCNYSTVGMREENGMRLIYEAIDKLEKNHDYHIKKYDPKQGQDNARRLTGRHETSSIYQFSHGVANRGASVRIPRQCAEDGKGYLEDRRPSSNCDPYSVTEAIVRTTIKNYTC

SEQ ID NO: 21211 - DNA, 1445 bp, Datisca glomerata
  CDS (77)..(1147)
gaattcggcacgagaaacaagagtgagagaaagaggtttactattcattttgaagcttttgttttgtattccgagtatgtctttgctatcagatctcgtcaacctcaacctctcagattctactgagaaggtcatcgcagagtacatatggatcggtggatctggtctggatatcagaagcaaagcaaggaccctcccagggcctgtcagtgatccttcaaagctccccaagtggaattatgatggttctagcacaggtcaagctcctggaaaagacagtgaagtgatcttataccctcaagcaattttcagggacccattcaggagaggcaacaacattcttgtaatgtgtgacgcttacacaccggccggagagccaattccgaccaacaagagatgtgctgcagcaaagatattcagtcatcctaatgttgttgctgaagtgccatggtatggaattgagcaggagtacacgttgttgcagaaagacgtcaagtggccaatcgggtggcctgtcggtggtttccctgggcctcagggaccatactactgtggtgttggtgctgacaaggcatttgcccgtgacgttgtcgatgctcattataaggcttgtttatatgctggcgtcaacattagcggcatcaatggggaagtcatgccggggcagtgggaatttcaagtcggtccttccgttggcatttcggccggagatgaattatgggttgctcgttacattttggagaggatcacagaaattgctggagttgttctttcttttgatcccaaaccaattcagggtgactggaatggtgctggagctcacacaaattacagtactaagtcaatgagagaaaaaggcggatacgaggttattaagaaagcgattgaaaagttagggctgaggcacaaagaacacattgctgcttacggtgaaggaaacgagcgtcgtctcaccggacgacacgagacagcagacatcaacacttccttatggggtgtggctaaccgtggagcgtccattcgtgttgggagagacaccgagaaggaaggcaaagggtactttgaggatcggagaccagcttctaacatggatccgtacgtggttacttcgatgattgcagagaccactcttctgtggaagccataagtggtctgctcagtttatcaaatgtattatcttggagaccgatgatatacaagtgtctcccattgaaattgtggaaatatgtgttttttagtaggctgcatcagaatgaatggttttccttcccattagtttttattatttgtaatttctgttgttgctgtttggccctttcggaggtggcgaagtgagattgataatctcgcgatgaataatgatcatttatgaataatgtttttttttggctgaaagggcttattttcattgttgcaatataattaattttatgatattttccctt

SEQ ID NO: 21212 - protein, 356 aa, Datisca glomerata
MSLLSDLVNLNLSDSTEKVIAEYIWIGGSGLDIRSKARTLPGPVSDPSKLPKWNYDGSSTGQAPGKDSEVILYPQAIFRDPFRRGNNILVMCDAYTPAGEPIPTNKRCAAAKIFSHPNVVAEVPWYGIEQEYTLLQKDVKWPIGWPVGGFPGPQGPYYCGVGADKAFARDVVDAHYKACLYAGVNISGINGEVMPGQWEFQVGPSVGISAGDELWVARYILERITEIAGVVLSFDPKPIQGDWNGAGAHTNYSTKSMREKGGYEVIKKAIEKLGLRHKEHIAAYGEGNERRLTGRHETADINTSLWGVANRGASIRVGRDTEKEGKGYFEDRRPASNMDPYVVTSMIAETTLLWKP

SEQ ID NO: 21213 - DNA, 1065 bp, Glomus mosseae
  CDS (1)..(1065)
atggctgttgctaacaaatccaacactcaaactctcgctaaatacctttctctcgatcaaggtggtaaaatccaagccgaatacatctggattgacggcgatggtggacttcgtgggaaaaccactactcttgattttaaaccaactgatgtttccgaattaaaagaatggaattttgatggttcttcaactaatcaagctccaggagataattctgatattttacttcgcccttgtgcaatctttaaggatcctttccgtggtggtgataacatcttggtcctcgccgaatgttataataatgatggaacaccaaaccgaacaaattatcgtcattcctgtactaaacttatgtcggctcattctgaagccaaaccttggtttggtattgaacaagaatataccttgttcgatatggacggtcaagtgcttggwtggccaaaaggtggtttcccaggtcctcaaggtccttattattgttccgttggtgctaatgtagcttttggacgcgacgtcgttgaagctcattaccgcgcttgcctttactccggtgtaaatatttcgggtgttaatggtgaagttatgcctggtcaatgggaataccaagttggtccatgtgaaggaattgatatgggagatcatctttgggtatctcgatatctccttcaacgtgtagcagaagatttcggtatagttgtttccttccatcccaaaccaatcaagggagattggaacggtgcaggatgccacacaaattattcaacagaagcaatgagaatagaaggcggaataaaagcaattcatgatgcaattgatagaatgagtaaacgtcacgcagaacacatcgccgtatatggcgaggataatgacaaacgtcttaccggtcgtcacgaaactggtcatatttcagaattctcatttggtgtagcgaatcgtggtgcttcaattagaattccaagacatgttgccgctcaaggttatggttatttcgaagatcgtagaccagcttccaatattgatccttatcgtgttactgaagtcatagttgaatctactctcggttaa

SEQ ID NO: 21214 - protein, 354 aa, Glomus mosseae
MAVANKSNTQTLAKYLSLDQGGKIQAEYIWIDGDGGLRGKTTTLDFKPTDVSELKEWNFDGSSTNQAPGDNSDILLRPCAIFKDPFRGGDNILVLAECYNNDGTPNRTNYRHSCTKLMSAHSEAKPWFGIEQEYTLFDMDGQVLGWPKGGFPGPQGPYYCSVGANVAFGRDVVEAHYRACLYSGVNISGVNGEVMPGQWEYQVGPCEGIDMGDHLWVSRYLLQRVAEDFGIVVSFHPKPIKGDWNGAGCHTNYSTEAMRIEGGIKAIHDAIDRMSKRHAEHIAVYGEDNDKRLTGRHETGHISEFSFGVANRGASIRIPRHVAAQGYGYFEDRRPASNIDPYRVTEVIVESTLG

SEQ ID NO: 21215 - DNA, 1341 bp, Thermus thermophilus
  CDS (1)..(1341)
atgggttacacgaaggccgagattttaaaagcgcttaagggggaaaacgtcaagttcttgcgcctgcagatcacggacatcctgggcgtggtcaagaacgtggaggtgcccgagtcccagtttgagaaggccctggacggggagatcatgtttgacggctcctccattgagggcttcacccggattgaggagtcggacatgctcctaaggcccgactacaacaccttcgtcatcctccccgacctggtggaagacccaaagcggggccgggtggcgcggctcatctgcgacgtctactaccccgacggccgcccctttgaaggggacccccgctacgtcctcaagcggcagattgaaaggctcaagaagctcgggtttgacaacctgtacgccggccccgagcccgagttcttcctcttcctcaggaccccggagggcctgcccaccaccgagacccacgaccgggcgggctactttgacctggcccccatagacaagggggaggaggcgcgccgcgacatggtgaacgccctggtggccatgggctttgagattgaggcggcccaccacgaggtggccccggggcagcacgagattgacttcaagtacgccgacgccctcaccaccgccgacaacatcgccaccttcaagtgggtggtgaagcggatcgccctgaaccacggcctccacgccaccttcctgcccaagcccatccggggcatcaacggcagcggcatgcacacccacctctccctcttcaaggacggggagaacgccttctatgaccccaacgccgagtaccagctctcccagaccgccctccacttcatcgctgggctcctggagcacgccgccgggatggtggccgtcaccaaccccttggtgaactcctacaagcgcctcacccccgggtacgaggcccccaccaacatcgcctggtccgcctccaaccgctccgccatgatccggatcccggcgcgccggggcgtgggcacccgggcggagctcaggatgcccgacccctcctgcaacccctacctggccctggcggtgatggcggccgcgggcgcggacgggattgagcggaagctcctcccgcccccgcccatccagcggaacatctaccagatgaccgtgcgggagcggcgcaagcacaagatccgggagctccccgggaccctccgggaggccctcgaggccctgaggaaggaccccgtgatccgggaggccctgggcgagcacgtctacacccacttcctccaggccaagcagatggagtgggacgactaccgggtcacggtccaccagtgggagctggaccggtacctggccacctactag

SEQ ID NO: 21216 - protein, 446 aa, Thermus thermophilus
MGYTKAEILKALKGENVKFLRLQITDILGVVKNVEVPESQFEKALDGEIMFDGSSIEGFTRIEESDMLLRPDYNTFVILPDLVEDPKRGRVARLICDVYYPDGRPFEGDPRYVLKRQIERLKKLGFDNLYAGPEPEFFLFLRTPEGLPTTETHDRAGYFDLAPIDKGEEARRDMVNALVAMGFEIEAAHHEVAPGQHEIDFKYADALTTADNIATFKWVVKRIALNHGLHATFLPKPIRGINGSGMHTHLSLFKDGENAFYDPNAEYQLSQTALHFIAGLLEHAAGMVAVTNPLVNSYKRLTPGYEAPTNIAWSASNRSAMIRIPARRGVGTRAELRMPDPSCNPYLALAVMAAAGADGIERKLLPPPPIQRNIYQMTVRERRKHKIRELPGTLREALEALRKDPVIREALGEHVYTHFLQAKQMEWDDYRVTVHQWELDRYLATY

SEQ ID NO: 21217 - DNA, 1413 bp, Geobacter sulfurreducens
  CDS (1)..(1413)
atgacaccacaagaggtagtaagcttcgccaaagagaacggcgcgctgatggtcgattacaagttcatggacttcgtcggcatctggcagcatgtttccgtgcccatttcggagttcggtgaagatacctttgaggaaggccagggtttcgacggctcctccatccgcggctggcagcccatccatgcgtccgacatgatcctcctgccggaccccgcaacggccaagatggatccgttcatcgcggtgccgaccctttcactcatctgcaatgtcttcgatccgatcaccaaggaagactacactcgcgatccgcgcaacattgcccgtaaggccgaggcgtacctgaagtcgaccggcctcggcgataccgctttcttcggtcccgaggccgagttcttcatttttgacgacgtccggtacgattcgacctccaaccagtcgttctacatggttgattcggtggagggtgcctggaacaccggccgcgaagagttcccgaacctgggctacaagccgcgccacaaggaaggttatttccccgtttccccgaccgactcccagaacgatctccgcaacgagatggtcatggagctccagaaggtcggcatccgggtcgagtgtcagcatcacgaagttgcctccggcggccaggccgaaatcgacatgcggttctcctccctcgtcgacatggccgaccagctccagtggttcaagtatgtcatcaagaacgttgcctaccgtaacggcaagaccgttaccttcatgcccaagccgctctatggcgacaacggctccggcatgcactgccacatgtccatctggaaggacggccagaacctctttgccggcgacaagtacggcggactttcccagatggcactctggtacattggtggtatcatcaagcacgccaaggctctctgtgccctgaccaacccgaccaccaactcgtacaagcgtctggtgccgggtttcgaggcaccggtgaacatggcttactccagccgtaaccgttccgcctccatccggatacccatgatgtccaccaacccgaaggccaagcggatcgagtaccggactccggacccctcctgcaacggctatcttgccttcgccgccatgctgatggccggcctcgacggcatcgagaacaagatcgatccggggcaaccgctggataaggacatctacgggctttcccccgaggagctcaagaacatcccgtccgctccgggaagccttgaagaagccctcaaggccctggaggccgaccacgagttccttctcaagggcgacgtcttcacccccgacgttgtcgagaagtggatcgagtacaagatggaagccgaggtcaacccggtccgcatgcgtccggtccccctcgagttcgccctctactacgacatctag

SEQ ID NO: 21218 - protein, 470 aa, Geobacter sulfurreducens
MTPQEVVSFAKENGALMVDYKFMDFVGIWQHVSVPISEFGEDTFEEGQGFDGSSIRGWQPIHASDMILLPDPATAKMDPFIAVPTLSLICNVFDPITKEDYTRDPRNIARKAEAYLKSTGLGDTAFFGPEAEFFIFDDVRYDSTSNQSFYMVDSVEGAWNTGREEFPNLGYKPRHKEGYFPVSPTDSQNDLRNEMVMELQKVGIRVECQHHEVASGGQAEIDMRFSSLVDMADQLQWFKYVIKNVAYRNGKTVTFMPKPLYGDNGSGMHCHMSIWKDGQNLFAGDKYGGLSQMALWYIGGIIKHAKALCALTNPTTNSYKRLVPGFEAPVNMAYSSRNRSASIRIPMMSTNPKAKRIEYRTPDPSCNGYLAFAAMLMAGLDGIENKIDPGQPLDKDIYGLSPEELKNIPSAPGSLEEALKALEADHEFLLKGDVFTPDVVEKWIEYKMEAEVNPVRMRPVPLEFALYYDI

SEQ ID NO: 21219 - DNA, 1290 bp, Phragmites australis
  CDS (1)..(1290)
atggcgcaggcggtggtgccggctatgcagtgccaggtgggagtgaaggcggcagtccgtgcgaggcctgcggccgcgggggctggcggtagggtgtggggcgtcaggaggagcggccgcggcacgtcggggttcaaggtgatggccatgggcatgtcgacctccggcgtggtgccgcgcctcgagcagctgctcaacatggacaccaagccctacaccgacaatatcatcgctgagtacatctgggttggaggatctggaattgacgtcagaagcaaatcgaggacaatatcgaaaccagttgaggatccctcggagctaccgaaatggaactatgatggatcaagcacagggcaagctccaggagaagacagtgaagtcatcctatatccccaggctatcttcaaggatccatttcgaggtggcaacaacatattggttatctgtgatacatacacgccagctggggaacccattcctactaacaaacgccacagggctgcacaaatattcagcgacccaaaggtcgttagccaagtgccatggtttggcattgagcaggagtacactttgctccagacagatgtgaattggcctcttggctggcctgttggaggctaccctggtccccagggtccatactactgcgcggtaggagcagacaaatcatttggccgtgacatatcagacgctcactacaaaccatgtctttacgctggaatcaacattagtggaacaaacggggaggtcatgcctggtcagtgggagtatcaagttggacctagcgttggaattgaagcaggagaccacatatggatttcaagatacattctcgagagaatcacggagcaagctggtgtggtgcttacccttgatccaaaaccaattcagggtgactggaatggagctggctgccacacaaactacagcacaaagagcatgcgtgaagatggaggatttgaagtgatcaagaaagcaatccttaacctttctcttcgccatgatttgcatattagtgcatatggagaagggaatgaaaggaggttgacagggttacatgagacagcgagcattgacaacttctcatggggtgtggcaaaccgtggctgctctattcgggtggggcgagatactgaggcaaaagggaaaggctacctggaagaccgtcgcccggcatcaaacatggacccatatgttgtgacatcgctactggctgaaaccacaattctttgggagccaaccctcgaagtagaggctcttgccgctaagaagttggcgctgaaggtatga

SEQ ID NO: 21220 - protein, 429 aa, Phragmites australis
MAQAVVPAMQCQVGVKAAVRARPAAAGAGGRVWGVRRSGRGTSGFKVMAMGMSTSGVVPRLEQLLNMDTKPYTDNIIAEYIWVGGSGIDVRSKSRTISKPVEDPSELPKWNYDGSSTGQAPGEDSEVILYPQAIFKDPFRGGNNILVICDTYTPAGEPIPTNKRHRAAQIFSDPKVVSQVPWFGIEQEYTLLQTDVNWPLGWPVGGYPGPQGPYYCAVGADKSFGRDISDAHYKPCLYAGINISGTNGEVMPGQWEYQVGPSVGIEAGDHIWISRYILERITEQAGVVLTLDPKPIQGDWNGAGCHTNYSTKSMREDGGFEVIKKAILNLSLRHDLHISAYGEGNERRLTGLHETASIDNFSWGVANRGCSIRVGRDTEAKGKGYLEDRRPASNMDPYVVTSLLAETTILWEPTLEVEALAAKKLALKV

SEQ ID NO: 21221 - DNA, 1290 bp, Phragmites australis
  CDS (1)..(1290)
atggcgcagccggtggtgccggcgatgcagtgtcaggtcggggcgcggggcaaggcggccgtccgggcgaggccggcgggtgcgggaggaagggtgtggggcgtgaagaggagcgggcgcggcacgtccgggttcaaggtgatggccgtgagcacggagagcaccggggtggtgccgcgcctcgagcagctgctcaacatggacaccaagcccttcaccgacaagatcattgccgagtacatctgggttggaggatctggaattgacctcagaagcaaatcaaggacattatcaaaaccagtggaggatccctctgagctaccgaaatggaactacgacggatcaagcacagggcaagctccaggagaagacagtgaagtcatcctatacccccaggctatcttcaaggacccatttcgaggtggcaacaacatattggttatctgtgatacttacacaccagctggggaacccattcctactaacaaacgccacagggctgcacaaatattcagtgacccgaaggtcgtggaccaagtgccatggtttggcattgaacaggagtacactttgctccagacagatgtgaattggcctcttggctggcctgttggaggctaccctggtccccagggtccatactactgcgctgtaggagcagacaaatcatttggccgtgacatatcagatgctcactacaaggcatgtctttacgctggaattaacattagtggaacaaatggggaggtcatgcctggtcagtgggagtatcaggttggacctagcgttggtattgaagcaggagatcacatatggatttcaagatacattctcgagaggatcacggagcaagctggcatagtgcttactcttgatccgaaaccaattcagggtgactggaacggagctggttgccacacaaattacagcacaaagagcatgcgtgaggatggaggttttgaagtgatcaagaaagcaatcctgaacctttctcttcgccatgatctgcatattagtgcatatggagaaggaaatgaaaggaggttgacaggattacatgagacagctagcatagacaacttctcatggggtgtggcaaaccgtggctgctctattcgggtggggcgagatactgaggcaaaaggaaaaggctacctggaagaccgtcgcccggcatcaaacatggacccatatgttgtgacatcgctactggctgaaaccacaattctttgggagccaacccttgaggcggaagctcttgccactaagaagttagcactgaaggtatga

SEQ ID NO: 21222 - protein, 429 aa, Phragmites australis
MAQPVVPAMQCQVGARGKAAVRARPAGAGGRVWGVKRSGRGTSGFKVMAVSTESTGVVPRLEQLLNMDTKPFTDKIIAEYIWVGGSGIDLRSKSRTLSKPVEDPSELPKWNYDGSSTGQAPGEDSEVILYPQAIFKDPFRGGNNILVICDTYTPAGEPIPTNKRHRAAQIFSDPKVVDQVPWFGIEQEYTLLQTDVNWPLGWPVGGYPGPQGPYYCAVGADKSFGRDISDAHYKACLYAGINISGTNGEVMPGQWEYQVGPSVGIEAGDHIWISRYILERITEQAGIVLTLDPKPIQGDWNGAGCHTNYSTKSMREDGGFEVIKKAILNLSLRHDLHISAYGEGNERRLTGLHETASIDNFSWGVANRGCSIRVGRDTEAKGKGYLEDRRPASNMDPYVVTSLLAETTILWEPTLEAEALATKKLALKV

SEQ ID NO: 21223 - DNA, 1409 bp, Camellia sinensis
  CDS (126)..(1196)
agctcattactcctcgccacagactccaacacaaaccacgtatagtacggagagaaagaggagagagggagagtcaaagcatcgtgtggtttgtttggagtgggtgtttttgatcgatcgtcactatgtctcttctttccgatctttgcaacttgaatctatctgagtccaccgagaagatcattgcagagtacatatggatcggtggatctggtatggacctcagaagcaaagccaggaccctgaatgcaccagtctctgatccttcaaagttaccacaatggaactacgatggttccagcactggccaagcccctggcgaggacagtgaagtgattttatatccccaggcaatttataaagacccattcaggagaggcaacaacattcttgtaatgtgtgatgcttacacgccgggtggagagccaatcccaacaaataagaggtttgatgctgccaagatattcagccaccctgatgttgttgctgaggaaccttggtatggtatagagcaggagtacactttgttgcagaaagaagtgaagtggccgattggttggcctgtgggaggttatcctggaccacagggaccatactactgtggtattggtgcggataaagcttttgggcgagacattgtcgatgcccattataaggcatgtctttatgctggtattaacattagtggcatcaatggagaggtgatgccgggtcagtgggaattccaagttgggccttctgttggcatcagttctggagatcagttgtggatggctcgttacattctagaaaggatcactgaaattgctggagtcgttgtttcgttcgaccctaaacctattgagggtgactggaatggagccggtgctcacaccaactacagtaccaagtccatgcgaagtgatgggggctttgaagtcattaagaaggccatcgaaaagcttggattgaagcacaaggaacacattgctgcttatggagaaggcaatgagcgtcggcttacaggaaagcacgaaacagctgacataaacacattcttatggggagtggcaaaccgtggagcctccattagggttggccgggacacagagaaggcaggcaaaggttattttgaggacaggaggcctgcatcaaacatggatccgtacgttgtcacttccatgatcgcaaacaccaccatcctctggaaaccgtaagaacggaagcaagaatttctattgttttttggatgtgcacattttgttttagttgtttccaaaatgtatttgcagttgtgggttttggacatttgcatcttcatttgccgtgaattgacaataagttaattgacattaaaaaaaaaagaagcaggcttttgccttattagtaaattcatcatggtatgtttggctgttaaaaaaaaaaaaaaa

SEQ ID NO: 21224 - protein, 356 aa, Camellia sinensis
MSLLSDLCNLNLSESTEKIIAEYIWIGGSGMDLRSKARTLNAPVSDPSKLPQWNYDGSSTGQAPGEDSEVILYPQAIYKDPFRRGNNILVMCDAYTPGGEPIPTNKRFDAAKIFSHPDVVAEEPWYGIEQEYTLLQKEVKWPIGWPVGGYPGPQGPYYCGIGADKAFGRDIVDAHYKACLYAGINISGINGEVMPGQWEFQVGPSVGISSGDQLWMARYILERITEIAGVVVSFDPKPIEGDWNGAGAHTNYSTKSMRSDGGFEVIKKAIEKLGLKHKEHIAAYGEGNERRLTGKHETADINTFLWGVANRGASIRVGRDTEKAGKGYFEDRRPASNMDPYVVTSMIANTTILWKP

SEQ ID NO: 21225 - DNA, 1525 bp, Xenopus laevis
  CDS (30)..(1145)
tttccttgctcataagatcagctgccaccatgtccgtctcccacagttcgagactcaacaagggggtgagggaacagtacatgaaactgccccaaggtgggatggcccaggtcacctacgtctggatcgatggcaccggggaaggagtaaggtgcaaaaccaggactctggatcaggaaccaaaaaccatagatgaaatcccagaatggaactttgatggatccagtacttaccaagcagaaggctcaaacagtgacatgtatcttgtcccagtccagatgttcagagacccattctgcctggaccccaataagctggttatgtgtgaagtcttgaaatacaaccgcaagtctgcagagaccaacctgcggcacacatgcaagaagatcatggagatggtgggtgatcaccgcccatggttcggaatggagcaagaatacaccttgctgggcattaacgggcacccgtatggctggccagaaaatggcttccctgggccacaaggtccctattactgcggtgttggggcagataaggtttacgggcgggatattgtggaggctcattacaaggcctgtctgtatgctggcatcaagatctgtggcaccaatgcagaagtcatgccctctcagtgggagttccaggtgggtccatgtgaaggtatcgatatgggggatcatttgtggatggccaggttcatccttcatcgggtctgtgaagacttcggggtggtggcaacgctagacccgaaaccaatgactggaaactggaacggtgccgggtgccacaccaactacagcacagagagcatgagggtcgaaggaggcctcaaacacattgaagatgccattgagaagctggggaagaggcacgactatcacatctgcgtgtacgacccccgaggagggaaagacaactcccggagactcaccgggcagcacgagacatctagtattcacgagttctcagctggcgtggccaaccggggcgccagcatccgtatcccgcgtcaggtgggccaggaaggctacggctactttgaagaccggcggccagcagccaactgcgacccctacgccgttacagaggcgctggtcagaaccaccatcctgaacgaaaccggcagcgagactaaagactattaaaaactgagctgggagctggtttctcctgggcaatcagtatggcgtctcccgatactacttgaattaaattcctttggttggaaaggcatttctagaaccagagaccttgcatggtgtctcccatattgtctgtaaaaatagggggtcttaccttgggggtggggggttgcacagatctatgtgctggttttatagtataagaacaaagcacgtgaccctgctgacatttaattggccagtgccaagtgattccttcagtttatccctttggggagggttttatgaattggctcctctgaagtcttatacccacagtgtgttttaatgcctaataataaagtttgttttttattaaaaaaaaaaaaaaaaaaaaaaaaaaa

SEQ ID NO: 21226 - protein, 371 aa, Xenopus laevis
MSVSHSSRLNKGVREQYMKLPQGGMAQVTYVWIDGTGEGVRCKTRTLDQEPKTIDEIPEWNFDGSSTYQAEGSNSDMYLVPVQMFRDPFCLDPNKLVMCEVLKYNRKSAETNLRHTCKKIMEMVGDHRPWFGMEQEYTLLGINGHPYGWPENGFPGPQGPYYCGVGADKVYGRDIVEAHYKACLYAGIKICGTNAEVMPSQWEFQVGPCEGIDMGDHLWMARFILHRVCEDFGVVATLDPKPMTGNWNGAGCHTNYSTESMRVEGGLKHIEDAIEKLGKRHDYHICVYDPRGGKDNSRRLTGQHETSSIHEFSAGVANRGASIRIPRQVGQEGYGYFEDRRPAANCDPYAVTEALVRTTILNETGSETKDY

SEQ ID NO: 21227 - DNA, 1050 bp, Neurospora crassa
  CDS (1)..(1050)
atggccgagtacatctggattgactctgagggcaacacccgctcaaaatctcgcactctcgatgagaagccagagggctacaagcccgaggagctccccatctggaactttgacggtagctcaacaggccaggctcctggtgacaactcggatgtttacctaaagccggtcgccgtctaccccgatcctttccgccctcccaacaacattcttgtcctcgccgaatgctgggatgccgacggcacccccaacaagtacaaccaccgccacgagtgcgccaagctcatggagcttcacgccaagcatgagccttggttcggcctcgagcaagaatacacccttctcgatctgaatgatcgtccctacggctggcctcagaatggctaccccgccccgcaaggtccttactactgcggtgtcggtgccggaaaggttgtcatgcgcgacattgtcgaagcgcactaccgcgcctgcctgtactcgggcatcaagatctcgggaaccaacgccgaagttatgcccgcccagtgggagttccaagtcggcccctgcgtcggcatcgagatgggcgaccagctttggctcgcccgtttcttgctgcaccgcgtagctgaggagttcgccgtcaaggtgtcgctcgatcccaagcccatccctggcgactggaacggtgccggtctacacagcaacttttcgacggtcgagatgaggaaggagggcggcatgaagcagatcgaggcggccatcaagaagctggagggaaggcataaggagcatattgctggtgagtttgtccgatcagaggaagaatggagtggggttgggacggaggctaatgcggggaaaacagtctacggcgaaggcaacgagaagcgtctcaccggccgtcacgagacgggtgccatcgacaccttcacctacggcgtggccaaccgtggcgcgtccattcgtatccctcgcgagtgcgccgccaagggctacggctactttgaggatcgtcgtcctgcttccaacgcggatccctatctcattactggcatcatcacgtag

SEQ ID NO: 21228 - protein, 349 aa, Neurospora crassa
MAEYIWIDSEGNTRSKSRTLDEKPEGYKPEELPIWNFDGSSTGQAPGDNSDVYLKPVAVYPDPFRPPNNILVLAECWDADGTPNKYNHRHECAKLMELHAKHEPWFGLEQEYTLLDLNDRPYGWPQNGYPAPQGPYYCGVGAGKVVMRDIVEAHYRACLYSGIKISGTNAEVMPAQWEFQVGPCVGIEMGDQLWLARFLLHRVAEEFAVKVSLDPKPIPGDWNGAGLHSNFSTVEMRKEGGMKQIEAAIKKLEGRHKEHIAGEFVRSEEEWSGVGTEANAGKTVYGEGNEKRLTGRHETGAIDTFTYGVANRGASIRIPRECAAKGYGYFEDRRPASNADPYLITGIIT

SEQ ID NO: 21229 - DNA, 1101 bp, Rhodopirellula baltica
  CDS (1)..(1101)
atgtctgacagtttcattctttgctctggcaagaccgccacgggcaccaaaaaagtctttaggagactcgcatccatgaccaagtgtaagttggaatacatctggctcgacggctatcaaccgacccagagcatgcgcagcaaaaccaaaatcgtcgaagacttcagcggcaaagtggaagatgccgaaatgtggtcgttcgacggttcgtcaaccgaacaagcgcccggtggagccagtgactgcttgctgaagcccgtcttctgccttcccgatccggatcgtttgggcaccggcttcttggtgatgtgcgaagtgatgaatgccgatggcacgcctcaccgcagcaacggccgtgcaacgatcaaagacgatgacaatgacttctggttcggtttcgaacaggagtacacgatcttcgatccagaaaccaagaaaccaatcggcttccctgctgaaggtttcccaggacctcaaggtccttactactgctcggtcggtgctggcaaagcagtcggtcgtgaaatcgtcgaagagcacctcgaactgtgcttgcaagctggcttgaacgtcgaaggcatcaacgccgaagtcatgatgggccagtgggaattccaaatcttcgccaagggcgcagcccaagctggtgacgaaatttggctcgcacgctacttgctggatcgcaccggcgagaagtacggcatggaaattaactaccactgcaaaccagtcaaaggtgactggaacggcagcggcatgcacgccaacttcagcaacacgaccctgcgtacgtgcggcagcaaagaagtttacgaagcgatttgccaagccttcgagcctcgtatcaccgagcacatcgatgtttacggtgctgacaacgatcagcgtttgaccggtttgcacgaaacgcaatcgatcgacaagttcagctacggcatctcggaccgcggtgcatcgatccgcattccaatcgccacggttgaaaagggctggaagggctggttggaagatcgtcgcccagcttcgaacgctgacccatacatggttgccagtgcaatcatcgcaacggtcaagacagccaacgtcccagccggcgtttga

SEQ ID NO: 21230 - protein, 366 aa, Rhodopirellula baltica
MSDSFILCSGKTATGTKKVFRRLASMTKCKLEYIWLDGYQPTQSMRSKTKIVEDFSGKVEDAEMWSFDGSSTEQAPGGASDCLLKPVFCLPDPDRLGTGFLVMCEVMNADGTPHRSNGRATIKDDDNDFWFGFEQEYTIFDPETKKPIGFPAEGFPGPQGPYYCSVGAGKAVGREIVEEHLELCLQAGLNVEGINAEVMMGQWEFQIFAKGAAQAGDEIWLARYLLDRTGEKYGMEINYHCKPVKGDWNGSGMHANFSNTTLRTCGSKEVYEAICQAFEPRITEHIDVYGADNDQRLTGLHETQSIDKFSYGISDRGASIRIPIATVEKGWKGWLEDRRPASNADPYMVASAIIATVKTANVPAGV

SEQ ID NO: 21231 - DNA, 1440 bp, Helicobacter hepaticus
  CDS (1)..(1440)
atgagtagagtaagcatagataaacaagcggtagcagagttttttagattctgtgatgaaaatgaagtagaatttattgatttccgttttagtgacattaaaggcgtatggcatcatttgagcttttctcgcaatgcaattaacgaagaaagctttgagggcataccttttgatggtagctctatccctgcttggcagcccgtagataaatccgatatgatgcttatccctgaacctgtgcggtatttcattgacccatttactgctgataccactgcggtagtcttttgcgatatttgggacatttacaacaataagccttatgagaaatgtccgcgctccattgttaaacgtgcaatgaaatatctcaaagaaagcggtattggcgatatcgcctactatggaccagagaatgagttttttgtatttgattctattaagattaaagattctgtgaattgtcaatattatgagatagattccgaagagggcgaatggaatcgtgcgcgtgagtttgaaggcggtgtaaatatggggcatcgtcccggcacaaaaggtgggtattttcctgtgccacctgtagattctatggtggatttacgcgctgaaatcgtcaaagtgcttaatcaagtaggattagaaactttcgtgcttcaccacgaagtcgcacaagggcaaaatgaaattggtgtgaaatttggcgatatgcttgaagcagcagataatgtacaaaaactcaaatatgttgtcaaaatggttgctcatctcaatggcaaaaccgcgacttttatgccaaagccactttatggagataatggcagtggtatgcacgtgcatattagtatttggaaagatgggcataatctctttgcaggagaagcataccaaggcttaagcgaaatggctctacatttcttaggcggtgtgcttaaacacgcacgcgcattagccgcctttacaaatcctagcacaaactcatataaacgccttataccgggatttgaagcaccaagtatcctcacttattccgcacaaaaccgctctgcaagtatcagaatcccatataatagcggcgagaaagcaaaacgaatggaatttagattcccagatagctctgcaaatccttatcttgcatttgcaagcctcttactcgcaggaattgatgggataaaaaacaaaattgacccgggcgcgcctatggaaatcaatctttttgaacttactttagatgaaattcgcgaaaaaggcattaaacaactaccacacactttgcgccacgctattgaggaaatgcttgttgataaagcatatcttaaagaaggcggtgtatttagtgaagaatttatccaaacttataaagcatataagtttgaaacagagatttggccttgggaggcacgccctcacccatttgagttccttactacttatagttgctag

SEQ ID NO: 21232 - protein, 479 aa, Helicobacter hepaticus
MSRVSIDKQAVAEFFRFCDENEVEFIDFRFSDIKGVWHHLSFSRNAINEESFEGIPFDGSSIPAWQPVDKSDMMLIPEPVRYFIDPFTADTTAVVFCDIWDIYNNKPYEKCPRSIVKRAMKYLKESGIGDIAYYGPENEFFVFDSIKIKDSVNCQYYEIDSEEGEWNRAREFEGGVNMGHRPGTKGGYFPVPPVDSMVDLRAEIVKVLNQVGLETFVLHHEVAQGQNEIGVKFGDMLEAADNVQKLKYVVKMVAHLNGKTATFMPKPLYGDNGSGMHVHISIWKDGHNLFAGEAYQGLSEMALHFLGGVLKHARALAAFTNPSTNSYKRLIPGFEAPSILTYSAQNRSASIRIPYNSGEKAKRMEFRFPDSSANPYLAFASLLLAGIDGIKNKIDPGAPMEINLFELTLDEIREKGIKQLPHTLRHAIEEMLVDKAYLKEGGVFSEEFIQTYKAYKFETEIWPWEARPHPFEFLTTYSC

SEQ ID NO: 21233 - DNA, 1811 bp, Brachydanio rerio
  CDS (122)..(1240)
gttatgaggatgagagacaaacagccaggactaccctataaaaccctctggaaatacagccactcttatagtgactatttgtactttttgataggtttgatatagcaccactagcaccaccatggccacttcagccagttccaaattaagcaaagctatgaaacagcagtacatggatctccctcagggagaaaaagttcaggtcatgtacatctggattgatggaaccggagagggattgagatgcaaaaccaggactctagactctgaacctaaatctgttgaagaacttcctgagtggaactttgatggttccagcacatatcaggctgaggggtccaacagtgacatgtatttgttccctcaagccatgttcagagaccctttcaggaaagaccccaacaaactggttctgtgcgatgttctcaaatacaaccataaacctgcagaaaccaatcttcgtcagtcctgtaagaagattatggatatggtccagaaccagcatccttggtttggaatggaacaggagtacactcttctcggcacagatggtcatccttttggttggccctccaatggcttccctggacctcaaggtccatattactgtggtgttggagctgataaggcctatggacgagatgttgtagaggcacattatagagcctgtctgtatgctggggtaaaaatctgtggcaccaatgctgaagtcatgcctgcacagtgggagttccaagttggcccttgtgaggggatcgagatgggagaccatctgtgggtcgcccgcttcctcctacacagggtttgtgaggactttggtgttgtggcctcttttgaccccaagcctattccaggcaactggaatggagccggctgccacaccaacttcagcaccaaggagatgcgcgaggaaggaggtttgaagcatattgaggagtcgattgagaagcttggcaagagacaccagtaccatatccgtgcctacgatcctaaaggagggctggacaatgccagacgtctgactggccatcacgagacctctaacattaacgagttttcggctggagtggccaaccgtggtgctagcatacgaattccacgatctgtgggtcaggaaaagaagggctatttcgaagaccgccgtccttcagccaactgtgatccatacgcagtcactgaagctcttatacgcacatgtctgctcaacgaagagggtgaagtgccagagaaatacatgtgaaagactggactgaagcgttattttaataacaaaatctatctacagactccttgtattttgaattcattagctgtctaaaatgaggtatgacactagatggatctttactccttttgttggttgtagaaacgcacattgggtcagtttatcctacaattttagctttttcactgtcggtttctttttgtgataagcttcgtaatgataccagatccggtcaaatgtctgatagagatgaacatttgcacccatcattactactacttggcctttatacctgaagctgttcagtgtattgacttgtttttaatgtcatttaattttagcttcttttttatatatatatataaactaattgtagatattttaatgcatatcatagtcagttttagacttttcacgggctataaattatggcactatttctcacaaggaccaaaatacattgtacttgtatggcgctgactgttgctcaaagggttatttcatttttgcagttccaggtttcagaaaacactattaacttgtcttattaaaagaattttattaaaatgtaaaaaaaaaaaaaaaa

SEQ ID NO: 21234 - protein, 372 aa, Brachydanio rerio
MATSASSKLSKAMKQQYMDLPQGEKVQVMYIWIDGTGEGLRCKTRTLDSEPKSVEELPEWNFDGSSTYQAEGSNSDMYLFPQAMFRDPFRKDPNKLVLCDVLKYNHKPAETNLRQSCKKIMDMVQNQHPWFGMEQEYTLLGTDGHPFGWPSNGFPGPQGPYYCGVGADKAYGRDVVEAHYRACLYAGVKICGTNAEVMPAQWEFQVGPCEGIEMGDHLWVARFLLHRVCEDFGVVASFDPKPIPGNWNGAGCHTNFSTKEMREEGGLKHIEESIEKLGKRHQYHIRAYDPKGGLDNARRLTGHHETSNINEFSAGVANRGASIRIPRSVGQEKKGYFEDRRPSANCDPYAVTEALIRTCLLNEEGEVPEKYM

SEQ ID NO: 21235 - DNA, 1029 bp, Streptomyces avermitilis
  CDS (1)..(1029)
atgaccttcaaggctgagtacatctggatcgacggcaccgagccgacggccaagctccgttcgaagacgaagatcctggcggacgatgccaagggtgccgagctgccgatctggggcttcgacgggtcctccacgaaccaggccgaggggcacgcctccgaccgcgtactcaagccggtcgccacctacccggacccgatccgcggcggcgacgacgtcctcgtcatgtgcgaggtcctgaacatcgacatgacgccgcacgagtccaacacgcgtgccacgctggccgaggtcgaggagaagttcggcgcccaggagccgatcttcggcatcgagcaggagtacaccttcttcaagggctcgcgcccgctgggcttccccgagggcggcttcccggccgcgcagggcggctactactgcggtgtcggctcggacgagatcttcggccgtgacgtcgtcgaggcgcacctggagaactgcctcaaggcgggtctgggcatctccggcatcaacgccgaggtcatgcccggccagtgggagttccaggtcggcccgctggcgccgctcgaggtctccgaccagctgtgggtggcccgctggctgctctaccgcaccgccgaggacttcggcgtctccgcgacgctggacccgaagccggtgaagggcgactggaacggcgcgggcgcgcacaccaacttctccacgaaggcgatgcgcgagggctacgacgcgatcatcaccgcgtgcgagtcgctgggcgagggctccaagccgctcgaccacgtcaagaactacggcgcgggcatcgacgaccgcctgacgggcctgcacgagaccgccccgtggaacgagtactcgtacggcgtctcgaaccgtggcgcctcggtccgtatcccgtggcaggtcgagaaggacggcaagggctacatcgaggaccgccgtccgaacgccaacgtcgacccgtacgtcgtgacgcgtctgctcgtcgacacctgctgctccgccctggagaaggccggccaggtctga

SEQ ID NO: 21236 - protein, 342 aa, Streptomyces avermitilis
MTFKAEYIWIDGTEPTAKLRSKTKILADDAKGAELPIWGFDGSSTNQAEGHASDRVLKPVATYPDPIRGGDDVLVMCEVLNIDMTPHESNTRATLAEVEEKFGAQEPIFGIEQEYTFFKGSRPLGFPEGGFPAAQGGYYCGVGSDEIFGRDVVEAHLENCLKAGLGISGINAEVMPGQWEFQVGPLAPLEVSDQLWVARWLLYRTAEDFGVSATLDPKPVKGDWNGAGAHTNFSTKAMREGYDAIITACESLGEGSKPLDHVKNYGAGIDDRLTGLHETAPWNEYSYGVSNRGASVRIPWQVEKDGKGYIEDRRPNANVDPYVVTRLLVDTCCSALEKAGQV

SEQ ID NO: 21237 - DNA, 1080 bp, Coxiella burnetii
  CDS (1)..(1080)
atgtttgctcaagttacctatatttggatggacggcgcgcagccaacccaaaagttacgatcaaaagttcggatcgtcaaacatcctgagcgagatattacgctggccgactttccagaatgggggttcgacggctcttcaacctaccaagcgacgggaaaggattccgatttgattttacaaccggtccattttgttaaagatccaatcttaggcgatggaaattacttggtgttatgtgaagtgatgaatcccgatggatctccacatgcttcaaacacccgtgcccgcttgcgccaaatcatggccaatggcgctgctgagcatgagccctggattggttttgagcaagaatacactctctttcaaggcgtccaacctctcggatggcccgatcgaggatatcccgcgcctcaaggccctttttattgcggcatcggtgcggatgaagtgtttggtcgcccgctggtggaagaacatgccaccgcttgtattgaggctgagctcatgatttttggaacgaacgccgaagtcatgccaggacaatgggagttccaaattggctatcgaggcgctgacgacgagacgcctgatcctttgacggtttctgatcatctttggttggctcgatggttgctctatcgtattggagaagattacgggatcacagcaaccctccagcctaaaccggttaaaggggattggaacggtgctggaaaacacacgaacttttctactaagttgatgcgcgaccccgccacaggccgggaagccatcgaacaggccatcgagcgattatcaaaacgtcatgacgctcatattgcggtgtacggtcatggtttagaagagcggctcacgggtaaacacgaaacggctcctattacgcaattttcttcaggcgtaggcaatcgcggcgcttccgttcgcatacctagcgcggtagcctctcggggttgtggttacttagaagatcgtcggcccggtgctaacgccgatccttaccaagtcgcggctattttgttagaaacgatttgtgggattcaattgccgaaaaacagtgggatcgaaacaaccgtttga

SEQ ID NO: 21238 - protein, 359 aa, Coxiella burnetii
MFAQVTYIWMDGAQPTQKLRSKVRIVKHPERDITLADFPEWGFDGSSTYQATGKDSDLILQPVHFVKDPILGDGNYLVLCEVMNPDGSPHASNTRARLRQIMANGAAEHEPWIGFEQEYTLFQGVQPLGWPDRGYPAPQGPFYCGIGADEVFGRPLVEEHATACIEAELMIFGTNAEVMPGQWEFQIGYRGADDETPDPLTVSDHLWLARWLLYRIGEDYGITATLQPKPVKGDWNGAGKHTNFSTKLMRDPATGREAIEQAIERLSKRHDAHIAVYGHGLEERLTGKHETAPITQFSSGVGNRGASVRIPSAVASRGCGYLEDRRPGANADPYQVAAILLETICGIQLPKNSGIETTV

SEQ ID NO: 21239 - DNA, 1659 bp, Pantoea agglomerans
  CDS (223)..(1632)
gcgctgaagatttcctgcgctcttccggcatcgctgataccgtactgtttggaccagaaccagaattcgctttatctaaatcaagcgtaaacgccagacagatgtcggttgaagagcgtgccggaagaggttggtcagggagttgttttcccgcaacgtattccggaaacgacgtttcctcgccatgtagataatgaaagaccatttccaggagagttgagtatgtccgctgaacacgttctctcgatgatgaacgagcatgaagttaagtttgttgacctgcgttttaccgataccaaaggtaaagaacagcacgttacgatccctgctcaccaggttaacgctgacttcttcgaagaaggcaaaatgttcgatggttcgtctattggcggctggaaaggcattaacgaatcagacatggtgctgatgcctgacgccaccacggcggtcatggatcctttcttcgaagattctacgctgatcatccgttgtgacatcctcgagccaggcaccatgcagggctacgaccgcgatccacgctctatcgctaagcgcgctgaagatttcctgcgctcttccggcatcgctgataccgtactgtttggaccagaaccagaattcttcctgttcgatgacatccgtttcggctcatcgacgtccggttcacacgttgctatcgacgatatcgaagcggcatggaacaccggtaaagagtacgaaggcggtaacaaaggtcaccgtccaggtctgaaaggcggctacttcccggttccaccggttgactcatcacaggacatccgttctgccatgtgtctgaccatggagcagatgggcctggttgttgaagcgcatcaccacgaagtggcgaccgcgggtcagaacgaagtggcaacccgcttcaataccatgaccaaaaaagcggacgaaattcagatttacaaatatgtggttcacaacgttgcgcatgcttacggcaaaaccgcgacctttatgccgaagcctatgtttggcgacaacggttcaggcatgcactgccatatgtcactctccaaaggtggccagaacctgtttgccggcgataagtacggcggcctgtctgaaatggcgctgttctacatcggcggtatcatcaagcacgctaaagcgatcaacgccctggcgaacccgaccaccaactcttacaagcgtctggtcccgggttacgaagcaccggttatgctggcttactctgcccgtaaccgttcagcctcaatccgtattccggttgttgccagcccgaaagcgcgtcgtatcgaagcgcgcttcccggatccagcggctaacccatacctggcgttcaccgcactgctgatggctggcctggatggcatcatcaacaaaatccatcctggcgatgcgatggacaaaaacctgtatgacctgccaccggaagaagaagctgagattccaaaagttgcaggctctctggaagaagcgctgaatgcactgaacgaagaccgcgagttcctgacccgcggcggagtattcactgacgaatcgatcgatgcttacatcgaactgcgtaaagcagagatggatcgcgttcgcatgacgccacacccggttgagttcgagctctactacagcgtttaactggtcagacgttttttgttgccgtgg

SEQ ID NO: 21240 - protein, 469 aa, Pantoea agglomerans
MSAEHVLSMMNEHEVKFVDLRFTDTKGKEQHVTIPAHQVNADFFEEGKMFDGSSIGGWKGINESDMVLMPDATTAVMDPFFEDSTLIIRCDILEPGTMQGYDRDPRSIAKRAEDFLRSSGIADTVLFGPEPEFFLFDDIRFGSSTSGSHVAIDDIEAAWNTGKEYEGGNKGHRPGLKGGYFPVPPVDSSQDIRSAMCLTMEQMGLVVEAHHHEVATAGQNEVATRFNTMTKKADEIQIYKYVVHNVAHAYGKTATFMPKPMFGDNGSGMHCHMSLSKGGQNLFAGDKYGGLSEMALFYIGGIIKHAKAINALANPTTNSYKRLVPGYEAPVMLAYSARNRSASIRIPVVASPKARRIEARFPDPAANPYLAFTALLMAGLDGIINKIHPGDAMDKNLYDLPPEEEAEIPKVAGSLEEALNALNEDREFLTRGGVFTDESIDAYIELRKAEMDRVRMTPHPVEFELYYSV

SEQ ID NO: 21241 - DNA, 1401 bp, Securigera parviflora
  CDS (99)..(1169)
gaaaacccccctatcaaaagctagaagctttcactagtgattagctaccatttgccatcctctcactgttctgctttctgcacaacaactagtttaccatgtctttgcttacagatctcgtcaacctcaacctctcggaatccacggaaaagattattgctgagtacatatgggttggtggatctggattggatatcagaagcaaagccaggactcttcctggaccggttagtgaccctgcaaaacttcccaagtggaactatgatggttctagcacagatcaagctcctggggaggatagtgaagtcatcctatatccacaagctattttcagggacccctttagaagaggcagcaacattcttgtgatttgtgatgtttacaccccagctggagagccacttccatcaagctataggtacaatgctgccaaaattttcagccacccagaggtagctgctgaggaaccttggtatggtattgagcaagagtataccttgttgcagaaagatataaattggccactaggttggccagttggtggatttcctggacaacagggcccatactactgtggtattggtgctgataaagcctatggccgtgacattgtagatgcacattacaaagcttgtctttatgctggcattaacattagtggtatcaatggagaggttatgcctggccagtgggaattccaagttggtccttccgttggtatctcagctggtgatgagatatgggctgcaagatacattcttgagagaattacagagattgctggagcagttgtttcatttgatcccaagcctattccaggagactggaatggtgctggtgctcacacaaactacagcaccaagtccatgagagaagatggaggctttgagatcatcaaaaaggccattgaaaagcttggattgaagcacaaggagcacattgcagcttatggaaaaggcaatgagagacgtctcactggcaaacatgaaacagcagacatcaacaccttctcttggggtgtggcaaaccgtggagcctcagttagagttggaagagagacagaaaaagaagggaaaggctactttgaggacaggaggcctgcttctaacatggatccatacattgtcacctccatgattgcagagactaccatcctctggaagccatgaagatgaaaatattcacagccatcgattaatttctctctagaaatttataccactacataatatatcttgtgttgttgttgttgttcctggctgttagtaattagtaatttgctatgtggtcttttgatcattagcatatggtccatgggccctgtgttctgtttcacaataatttcatcattaataacaaggactacctctgcttcttgatttcaaaaaaaaaaaaaaaaaa

SEQ ID NO: 21242 - protein, 356 aa, Securigera parviflora
MSLLTDLVNLNLSESTEKIIAEYIWVGGSGLDIRSKARTLPGPVSDPAKLPKWNYDGSSTDQAPGEDSEVILYPQAIFRDPFRRGSNILVICDVYTPAGEPLPSSYRYNAAKIFSHPEVAAEEPWYGIEQEYTLLQKDINWPLGWPVGGFPGQQGPYYCGIGADKAYGRDIVDAHYKACLYAGINISGINGEVMPGQWEFQVGPSVGISAGDEIWAARYILERITEIAGAVVSFDPKPIPGDWNGAGAHTNYSTKSMREDGGFEIIKKAIEKLGLKHKEHIAAYGKGNERRLTGKHETADINTFSWGVANRGASVRVGRETEKEGKGYFEDRRPASNMDPYIVTSMIAETTILWKP

SEQ ID NO: 21243 - DNA, 1508 bp, Securigera parviflora
  CDS (105)..(1175)
gaaaaaaagagagaagcaaaagagagagaaagaggtcattgctggttgctgtgagcgacgacgacgacgactgtgaagtcttgctgctgctgctgcttttgaagatgtcgctgctctcagatctcatcaacctcaacctctctgaaaccaccgacaagatcatcgccgagtacatatggatcggtggatcaggcctggacttgaggagcaaagcaaggaccctgccaggaccagtcagcgacccttcagaactgcccaagtggaattatgatggttccagcacaggtcgagctcctggggaagacagtgaagtgattttatacccacaggccattttcaaagatccattcagaaggggaagcaatatcttggttatctgtgatgcatacactcctgctggagaacccattcccaccaacaagagacatgctgctgccaaggtcttcagccatcctgatgttgtagctgaagtaccatggtatggtattgagcaggaatataccttgttgcagaaagaggttaactggcctcttggttggcctcttggtggtttcccaggaccacagggaccatactactgtggtactggagctgataaggctcttggccgtgatattgtggacgcacactacaaagcatgcctatatgctggtgtgagcatcagtggaattaatggagaagtgatgcctggtcagtgggaattccaagttggaccttcagtaggtatctctgctggtgatgaggtgtgggttgctcgttacgttttggagaggatcactgagattgctggtgtggtgctttcctttgaccctaagccaattaagggtgattggaatggtgctggtgcgcacacaaattacagcacaaagaccatgagagaggatggtggctatgaaatcatcaagaaggcaattgagaagttgggcttgagacacaaggagcacattgctgcttatggagaaggcaacgagcgtcgtttgacaggaagacacgagacagctgacataaacactttcttatggggagttgcaaaccgtggtgcttctattagagttggaagggacacagagaaagcagggaagggttactttgaggacagaaggcctgcatctaacatggacccatatgtggttacttccatgattgcagacacaaccattctctggaaaccatgagccacagttacaggaacatttgcttgcatgtcttcgaaagtcattgttatttctcctttggatggatcaagggagcagtttctttttcctgattaggatttggccattgctttttatttcgtctgattttattgtgttcttgttatggctggcatatggtctgaggcctgtgtgtttgcacaaactaccaaggctcattgcttgctacttctctccctcattttctttttaagtttcacaataataatgtaatggttatcagtgaaaaagatgattgtcgagtatattaataatatatatgaagttgatatgttgatgaaaaaaaaaaaaaaa

SEQ ID NO: 21244 - protein, 356 aa, Securigera parviflora
MSLLSDLINLNLSETTDKIIAEYIWIGGSGLDLRSKARTLPGPVSDPSELPKWNYDGSSTGRAPGEDSEVILYPQAIFKDPFRRGSNILVICDAYTPAGEPIPTNKRHAAAKVFSHPDVVAEVPWYGIEQEYTLLQKEVNWPLGWPLGGFPGPQGPYYCGTGADKALGRDIVDAHYKACLYAGVSISGINGEVMPGQWEFQVGPSVGISAGDEVWVARYVLERITEIAGVVLSFDPKPIKGDWNGAGAHTNYSTKTMREDGGYEIIKKAIEKLGLRHKEHIAAYGEGNERRLTGRHETADINTFLWGVANRGASIRVGRDTEKAGKGYFEDRRPASNMDPYVVTSMIADTTILWKP

SEQ ID NO: 21245 - DNA, 1313 bp, Arabidopsis thaliana
  CDS (53)..(1117)
gatcgtcttctctttccctaaacacactgattattttctctccgacgccgccatgtctctgctctcagatctcgttaacctcaacctcaccgatgccaccgggaaaatcatcgccgaatacatatggatcggtggatctggaatggatatcagaagcaaagccaggacactaccaggaccagtgactgatccatcaaagcttcccaagtggaactacgacggatccagcaccggtcaggctgctggagaagacagtgaagtcattctataccctcaggcaatattcaaggatcccttcaggaaagacaacaacatcctggtgatgtgtgatgcttacacaccagctggtgatcctattccaaccaacaagaggcacaacgctgctaagatcttcagccaccccgacgttgccaaggaggagccttggtatgggattgagcaagaatacactttgatgcaaaaggatgtgaactggccaattggttggcctgttggtggctaccctggccctcagggaccttactactgtggtgtgggagctgacaaagccattggtcgtgacattgtggatgctcactacaaggcctgtctttacgccggtattggtatttctggtatcaatggagaagtcatgccaggccagtgggagttccaagtcggccctgttgagggtattagttctggtgatcaagtctgggttgctcgataccttctcgagaggatcactgagatctctggtgtaattgtcagcttcgacccgaaaccagtcccgggtgactggaatggagctggagctcactgcaactacagcactaagacaatgagaaacgatggaggattagaagtgatcaagaaagcgatagggaagcttcagctgaaacacaaagaacacattgctgcttacggtgaaggaaacgagcgtcgtctcactggaaagcacgaaaccgcagacatcaacacattctcttggggagtcgcgaaccgtggagcgtcagtgagagtgggacgtgacacagagaaggaaggtaaagggtacttcgaagacagaaggccagcttctaacatggatccttacgttgtcacctccatgatcgctgagacgaccatactcggttgatgacacatttcatgatttgatttctctccaatttggttttttttttttcccttttgattgcacttttcgataataaaaaaataattcttattatgggcgtattgttgtgacattttgtgttttgtttcgaataattaaataagcgcttcttaaggtgaaaataaaaaaaaaaaaaaaaaagaaaaaaaaaaaaaaa

SEQ ID NO: 21246 - protein, 354 aa, Arabidopsis thaliana
MSLLSDLVNLNLTDATGKIIAEYIWIGGSGMDIRSKARTLPGPVTDPSKLPKWNYDGSSTGQAAGEDSEVILYPQAIFKDPFRKDNNILVMCDAYTPAGDPIPTNKRHNAAKIFSHPDVAKEEPWYGIEQEYTLMQKDVNWPIGWPVGGYPGPQGPYYCGVGADKAIGRDIVDAHYKACLYAGIGISGINGEVMPGQWEFQVGPVEGISSGDQVWVARYLLERITEISGVIVSFDPKPVPGDWNGAGAHCNYSTKTMRNDGGLEVIKKAIGKLQLKHKEHIAAYGEGNERRLTGKHETADINTFSWGVANRGASVRVGRDTEKEGKGYFEDRRPASNMDPYVVTSMIAETTILG

SEQ ID NO: 21247 - DNA, 1263 bp, Opsanus beta
  CDS (33)..(1154)
cggcttcagacagaaaccttcacacagagacgatggcctcttcggtgtctgtcagctctcgcctcaacaaggcggtgctgcagcggtacctgagcctgccgcagcaaggaaaaacccaggtcacctacatctggatcgacggcaccggagagggacttcgaagcaagacacgaactctggatagcgagccaaaaagtgtagaagacattcctgagtggaactttgacggttccagtacgtaccaggccgaaggctccaacagtgatatgtacctcatcccagtgtgcatgttcaaagatccgtttacacttgaccccaacaaactggtcctctgcgaagtcctcaaatacaaccgcttacctgcagaaactaaccatcgcaacagctgcaacaaagtgatggaggcagtgaaggagcagcatttgtggtttggcatggagcaggagtacacgctgtttggtacagatggacatccctatgggtggcccgccaatggattcccggcaccacaaggcccctactactgtagcgtgggtgccaacaatgcttacgggcgtgacgtagtggagtgccactacaaggcgtgcctgtatgcaggaatcaaaatctacggcacaaatgctgaggtcatgccagctcagtgggagttccagatcggcccctgtgagggcatcgagatgggcgaccacctgtgggtggcgcgtttcttgttgcatcgagtgtgtgaagattttggcatcatcgccaccatggaccccaaaccaatgaaggggaactggaacggtgctggctgtcacacaaatgtgagcaccaaagagatgagggaggagggaggactgcaatacatcgagcaggccatcgagaagttgagtaaaaatcatgccgagcacatctgcatgtatgacccccataagggccaggataacatcagaaggctcacggggatccacgagacctccagcatccatgacttctctgctggcgtggccaaccgaggtgccagtatccgcatccctcggcatgtggggcaggagaaacgaggttactttgaggaccgccgccctgctgcaaactgtgacccgtacgccgtcaccaaggtcatcgcaagcacctgtattctcagcactgacaataatacacagtcccagcaataaaaaatgaaggtcaaaccatggtctgtagcaaacttgttttcggtgtttgataaagtataaagagagctgtttgggaaaaaaaaaaaaaaaaaaaaaaaaaaaaaaaaaa

SEQ ID NO: 21248 - protein, 373 aa, Opsanus beta
MASSVSVSSRLNKAVLQRYLSLPQQGKTQVTYIWIDGTGEGLRSKTRTLDSEPKSVEDIPEWNFDGSSTYQAEGSNSDMYLIPVCMFKDPFTLDPNKLVLCEVLKYNRLPAETNHRNSCNKVMEAVKEQHLWFGMEQEYTLFGTDGHPYGWPANGFPAPQGPYYCSVGANNAYGRDVVECHYKACLYAGIKIYGTNAEVMPAQWEFQIGPCEGIEMGDHLWVARFLLHRVCEDFGIIATMDPKPMKGNWNGAGCHTNVSTKEMREEGGLQYIEQAIEKLSKNHAEHICMYDPHKGQDNIRRLTGIHETSSIHDFSAGVANRGASIRIPRHVGQEKRGYFEDRRPAANCDPYAVTKVIASTCILSTDNNTQSQQ

SEQ ID NO: 21249 - DNA, 1434 bp, Yersinia pestis
  CDS (1)..(1434)
atgacaaatccgggagatataagtatgtccgctgaacatgttttgacgatgctgaatgagcacgaagtgaaatttgttgatttacgtttcactgataccaaagggaaagagcagcacatcacgatccctgctcatcaagtcaacgctgacttcttcgaagaaggcaaaatgtttgatggctcctcgattggtggctggaaaggcattaacgaatccgacatggtactgatgccagacgccagcactgccgttatggacccgttcttcgcagattcaacactgattatccgttgtgacattcttgagccaggcaccatgcagggctatgaccgcgatccacgttctatctccaaacgtgctgaagacttcctgaaatcttcaggtatcgctgataccgtgttgttcgggccagaaccagaattcttcctgtttgacgatatccgttttggtagcagcatcaatgggtcacacgtatccatcgatgacgtcgaaggcgcatggaactccagcaccaaatacgaaggcggcaacaaaggccaccgtcctgcagtaaaaggcggttacttccctgttcctccggtcgactctgcacaagacctccgttctgccatgtgtctgacgatggaagagatgggcttggtggtagaagcacaccaccacgaagtggctaccgcgggtcaaaacgaagtggctacccgcttcaataccatgaccaagaaagcagatgagatccagatttacaaatacgtcgtacacaacgtggcgcacgcatttggtaaaacagcgacctttatgccaaaaccgatgttcggcgataacggctcaggtatgcactgccatatgtctttgtccaagaacggtaataacctgttcgctggcgacaaatacggcggcctgtctgaaatcgccctgttctacatcggcggtatcatcaaacatgcgaaagccattaatgccttggctaacccgaccaccaactcctacaagcgtctggtcccaggttatgaagcaccggtcatgctggcatattcagcccgtaaccgttcagcttctatccgtattcctgttgttgccagcccgaaagctcgtcgtattgaagcgcgtttccccgatcctgcggctaacccgtacctgtgcttcgccgcgctgttgatggctggccttgatggcatcatcaacaaaattcacccaggtgatgcgatggacaaaaacctgtatgacttgccgccggaagaagaagctgagattccaaaagttgccggttcactggacgaagccatggccgcattgaacgaagatcgcgagttcctgactcgtggtggcgtgttcaccgatgatgctatcgatgcgtatatcgagctacgtagagaagaaatggatcgcgtgcgtatgactccgcatcctgttgagttcgaactgtattacagcgtttaa

SEQ ID NO: 21250 - protein, 477 aa, Yersinia pestis
MTNPGDISMSAEHVLTMLNEHEVKFVDLRFTDTKGKEQHITIPAHQVNADFFEEGKMFDGSSIGGWKGINESDMVLMPDASTAVMDPFFADSTLIIRCDILEPGTMQGYDRDPRSISKRAEDFLKSSGIADTVLFGPEPEFFLFDDIRFGSSINGSHVSIDDVEGAWNSSTKYEGGNKGHRPAVKGGYFPVPPVDSAQDLRSAMCLTMEEMGLVVEAHHHEVATAGQNEVATRFNTMTKKADEIQIYKYVVHNVAHAFGKTATFMPKPMFGDNGSGMHCHMSLSKNGNNLFAGDKYGGLSEIALFYIGGIIKHAKAINALANPTTNSYKRLVPGYEAPVMLAYSARNRSASIRIPVVASPKARRIEARFPDPAANPYLCFAALLMAGLDGIINKIHPGDAMDKNLYDLPPEEEAEIPKVAGSLDEAMAALNEDREFLTRGGVFTDDAIDAYIELRREEMDRVRMTPHPVEFELYYSV

SEQ ID NO: 21251 - DNA, 1338 bp, Bifidobacterium longum
  CDS (1)..(1338)
atggataaacagcaggagtttgcgctgcgcacggtcgaagaacgcgacgtgcgctttattcgtctgtggttcacggacgtgttgggaacactgaagtccgtggcgattgctccggccgaactggaagccgcgtttgaggagggtctcggcttcgacggttccgccatcgagggcatgacccgcgtgtccgaagacgatatgatcgttcaacccgatccctcgacgttccagatcctgccgtggcgcggtggcccgcaaggtaccgcccgcatgttctgcgacattctgaccccggacggcgagccttcgctcggcgatccacgtcacgtgttgaagcgcacgctcgccaaagccaaggacaagggcttcacgttctacgtgcatccggaaatcgagttctacctgttcgaaagccaggacgactggtccaaggccccgaccccgatcgacgagggcggctacttcgaccacgtgccgcgcagcccaggcatggacttccgccgtgccaccgtgaacatgctcgagcaaatgggcatctcggtggaatactcgcaccatgaggcggggccaggccagaacgagatcgatctgcgatacgcggacgcgctcaccatggccgacaacatcatgacattccgtacggtggtcaaggagatttccttggagcgtggcattcacgccagcttcatgcccaagcccctggccgacgcgcccggttccggcatgcacacgcacctgagcctgttcgaaggcgattccaacgccttctacgaggccggtcaggagttcaacatgtccctgaccgcccgccagttcgccgccggcatcctgtaccatgcggccgaaatctgcgcggtcaccgaccagtacgtcaactcgtacaagcgcctgtggggcggtaacgaggcaccaagctacatctgctggggccacaacaaccgttccgcgctgctgcgtatcccgcagtacaagccgggcaagggcaactccgcgcgcatggagttccgtgcgctcgacccggtggccaacccataccttgcctactcggtgctgctggccgccggtctcgacggtatcgataagcagatgcagttgggcgagcctaccagtgatgacgtgtgggagctcaccgacggcgaacgtcaggctatgggcattcagccgctgccgcgctcgctggacgaggcgctgaagatcatggagaaatccgacttcgtggccgacgtgctcggcgaacacgccttcggctacttcctggacaacaagcaccaggaatgggaggagtacaaccagcaggtcacgccttacgagctgaagaagtatctgccgaagctgtaa

SEQ ID NO: 21252 - protein, 445 aa, Bifidobacterium longum
MDKQQEFALRTVEERDVRFIRLWFTDVLGTLKSVAIAPAELEAAFEEGLGFDGSAIEGMTRVSEDDMIVQPDPSTFQILPWRGGPQGTARMFCDILTPDGEPSLGDPRHVLKRTLAKAKDKGFTFYVHPEIEFYLFESQDDWSKAPTPIDEGGYFDHVPRSPGMDFRRATVNMLEQMGISVEYSHHEAGPGQNEIDLRYADALTMADNIMTFRTVVKEISLERGIHASFMPKPLADAPGSGMHTHLSLFEGDSNAFYEAGQEFNMSLTARQFAAGILYHAAEICAVTDQYVNSYKRLWGGNEAPSYICWGHNNRSALLRIPQYKPGKGNSARMEFRALDPVANPYLAYSVLLAAGLDGIDKQMQLGEPTSDDVWELTDGERQAMGIQPLPRSLDEALKIMEKSDFVADVLGEHAFGYFLDNKHQEWEEYNQQVTPYELKKYLPKL

SEQ ID NO: 21253 - DNA, 2681 bp, Acetobacter diazotrophicus
  CDS (832)..(2292)
gcgccgacatgacggtgaagatcgtcgtcggcaggccggacagcatgctgttcagcgatttcatgaacatccttccttcggacccgtcctgtgggcccttccctgctgcgatccgtgctgcaatccgccggccatgcgcagatgtgcgtaaaatgccggccttttgcaatccgatccgattgcccgaaagcgcaacccgtgcaacggtgtcaggtacgggcggcccgcggcgcccacgggatcgggcgggcggcccgggcgtgtgcacatcgctgccccgggatttcggggctgcccggggacatgacgacgcggcatgaaaaagatcgaggccatcatcaagcccttcaagctggacgaggtgaaggacgcccttcacgagatcggcctgatgggcatcacggtgaccgaggccaagggattcggccgccagaaaggccacaccgaactgtatcgcggcgccgaatacatcgtcgatttcctgccgaaggtgaagctggagatcgtctgcgccgacaacttggtggaccgcgccgtcgagacgatcatggccgccgcgcgcaccgggcgcatcggtgacggcaagatcttcatcctgccggtggaagacgtcatccgcatccgcaccggagagcacggcgaggaggccatctgacccgccgcgccaccatccccttcccggccgacggagaccggtgcccccgtggacaccggcatgcttccgatagccggtgccggggtccgtatgtcctatcgacaacggcgccccagtctcgtaaccgtttcaccgccgtgtcgttcggcatcccaagttaaggcaggtaatcagcaatggcgaaaaaagccccgagttcagctccgaccacgactccgtccccatcggcggaggctgttgccaaggtattcagcctgatccaggaacattccgtggaactggtggacctgcgcttcacggacccgcgcggcaagtggcaccacaccacgcagcatatctcgacgatcgagcaggacacgttccgcgacggcttcatgttcgacggatcgtccatcgtcggctggaaggccatcaacgagagcgacatggtgctgctgcccgacccgacgacggcggtcatggacccgttctcggcgaagccgcagctgatcctgatctgcgacatcatcgagccctcgaccgggcagttctacaaccgcgacccccgcgccaccgccaagctggccgaggcctacctgaagtccaccggcctgggcgacacggcgtttttcggtccggaagccgaattcttcgtcttcgacagcgtcaagttcggcacgggcccgaatttcggcatctaccagcttgacagcatcgaggggcccggcgcctcgctgaaggactatcccgagggcaacatgggccatcgcccgacggtgaagggcggctatttccccgtcccgccggtcgacagcgaaaacgacctgcgcgccgagatgctgtccacgatgggcgagatgggcctgccgatcgaaaagcatcaccacgaggtcgcgcagtcgcagcacgagttgggcaccaagttcgcgacgctggtgaagtccgccgacttcatgcagatctacaaatactgcgtgcacaacgtcgcccattcctacggcaagtccgcgacgttcatgccgaagccgatctatggcgacaacggatcgggcatgcacgtccaccagtcgatctggaagagcggcaagccggtcttcgccggcaacggctatgccgacctgtcggaccaggcgctgtattacatcggcggcatcatcaagcacgccaaggcgctgaacgccttcaccaacccgtcgaccaattcctacaagcgcctgatcccgggcttcgaggcgccggtgctgctggcctattcggcgcgcaaccgctcggcgtcctgccgcatcccgtatgcgaccagcccgaaggccaagcgcgtcgaggtccgcttccccgacccgaccgccaacccctacctggcgttcgcggccatgctgatggccggcctggacggcatcaagaacaagatccatccgggcgacgccatggacaaggatctgtacgacctgccgcccgacgagctgaagcagatcccgaccgtctgcggatcgctgcgcgaggcgctggaggccctgacggccgatcatgagttcctgctggccggcggcgtgttcaccaaggaccagatcgagagctatatcgacatcaagtggcaggaagtgttcaagttcgaacacaccccgcacccggccgagttcgagatgtactactccgtctgatcccggcgggattgacgaaaaaagggggcgccggaccgattgggtccggcgcccctttttcgttcggcacgccctcagacgcgggcgtggagacgaccctcacccgccagttcgcggcgagtacggtccagttcctcgctatagcggcgcagggcgtgctgttcggtcagcagtcccagcaccatgcgggattccatgccatcgaccaccaccagcgcgtcgctttccgcctgttcgaaacgggcgatcgcgtcgcgcaggttcatctgcggcatcagcatcacgtcgcgatactgggcgaagcgggtcaggtcctcggtcgcacgcgccgtttcggcatacaggtcgggcacctgcaccaatccgacatagcggcccgcgccgtcgac

SEQ ID NO: 21254 - protein, 486 aa, Acetobacter diazotrophicus
MAKKAPSSAPTTTPSPSAEAVAKVFSLIQEHSVELVDLRFTDPRGKWHHTTQHISTIEQDTFRDGFMFDGSSIVGWKAINESDMVLLPDPTTAVMDPFSAKPQLILICDIIEPSTGQFYNRDPRATAKLAEAYLKSTGLGDTAFFGPEAEFFVFDSVKFGTGPNFGIYQLDSIEGPGASLKDYPEGNMGHRPTVKGGYFPVPPVDSENDLRAEMLSTMGEMGLPIEKHHHEVAQSQHELGTKFATLVKSADFMQIYKYCVHNVAHSYGKSATFMPKPIYGDNGSGMHVHQSIWKSGKPVFAGNGYADLSDQALYYIGGIIKHAKALNAFTNPSTNSYKRLIPGFEAPVLLAYSARNRSASCRIPYATSPKAKRVEVRFPDPTANPYLAFAAMLMAGLDGIKNKIHPGDAMDKDLYDLPPDELKQIPTVCGSLREALEALTADHEFLLAGGVFTKDQIESYIDIKWQEVFKFEHTPHPAEFEMYYSV

SEQ ID NO: 21255 - DNA, 1640 bp, Crataegus crus
  CDS (85)..(1383)
atctctctctctcactctcataagctctgagtggttccagccaagttgcagcgctcttctgtcttcagtgaggagtaggccgaaatggcgcagattttggcacccacttcacaatggcggatgaaagttacaaggagctcagcaactgccagtcctatgacagcaaagatgtggggttctcttgtgttgaaacagaacaagaaaggaccagctcggagctctactaaatttagagtgctcgccaccaagtccgaaggttataccataaacaggctagagggtttactaaacctggacctcactccattcactgacaagattattgccgagtacatttggattggagggtcaggcgttgatgtccgtagcaagtcaaggacaatttcaaagcctgttgaggatccttctgagcttcccaagtggaattatgatggatcaagtaccggacaagcgcccggtgaagacagtgaagtaatcttataccctcaggcaatatttaaggaccctttccgtggtggcaacaatattttggtaatttgcgatgcatacacaccgcaaggcgagcctatcccaacaaacaagcgcgccagggctgctgagattttcaagaacaagaaggttatagacgaagtcccatggtatgggattgagcaagagtacacattactccaaaccgatgtgaaatggcctttgggatggccaattggaggttatcctggtcctcagggtccctactactgtggtgctggtgcagacaagtcattcggccgtgacatatcagatgctcactacaaggcttgcctatatgccggaatcaacatcagtggcaccaatggggaggttatgcctggccagtgggagtatcaagttggtccgagtgtgggaattgaagctggagatcatatctgggcttcaagatacattcttgagagaatcactgaacaagctggtgttgttctcacacttgatccaaaaccgatagagggtgactggaacggtgcagggtgccacaccaattacagtacaaagagcatgagggaagatggaggctttgaagttattaagaaggcaattttgaacctgtcacttcgccatgttgagcacattagtgcctacggagaaggaaatgagagaaggttgacaggaaagcatgaaacagccagcattaacacattttcttggggagtggctaatcgtggttgctcaatccgtgttggtcgtgaaactgagaagcaaggaaaaggttatctggaggatcgtcgtccagcttcaaacatggacccttacattgtgacctcgctgctggcagaaactacattgttgtgggagccaacccttgaggctgaagctcttgcagctcaaaagcttgcattgaacgtctgaaaccaattcgtcgaagataatccactggggcttcaaatgctgtcaattgggacaaaacagccaaatgtgggaagcattttccctcaccttttaaatccttttgagaagatcctttgtaaataaaggtcctatcgtcagtgattgttcatgattcatcccatgctcaactttgtagaatatttgctcgtatcgaagaaattaatcgtgtagatcggagagccttaattgaatcaaaaaaaaaaaaaaaaaaaaaaaaa

SEQ ID NO: 21256 - protein, 432 aa, Crataegus crus
MAQILAPTSQWRMKVTRSSATASPMTAKMWGSLVLKQNKKGPARSSTKFRVLATKSEGYTINRLEGLLNLDLTPFTDKIIAEYIWIGGSGVDVRSKSRTISKPVEDPSELPKWNYDGSSTGQAPGEDSEVILYPQAIFKDPFRGGNNILVICDAYTPQGEPIPTNKRARAAEIFKNKKVIDEVPWYGIEQEYTLLQTDVKWPLGWPIGGYPGPQGPYYCGAGADKSFGRDISDAHYKACLYAGINISGTNGEVMPGQWEYQVGPSVGIEAGDHIWASRYILERITEQAGVVLTLDPKPIEGDWNGAGCHTNYSTKSMREDGGFEVIKKAILNLSLRHVEHISAYGEGNERRLTGKHETASINTFSWGVANRGCSIRVGRETEKQGKGYLEDRRPASNMDPYIVTSLLAETTLLWEPTLEAEALAAQKLALNV

SEQ ID NO: 21257 - DNA, 1340 bp, Phytophthora infestans
  CDS (56)..(1129)
agtggacgtcccagttccagcctcttcaagcttcaactccattctaccaaacatcatgagccagcttgaccgcgccgtttacgaccagtacatgtccctcgacgtgtctgagagcgtcacgctcgccgagtacgtctggatcggcggttcgggccaggacctgcgctgcaagaccaagacgctgaccaagcccgtcaagtcggtggccgacctgcccatctggaacttcgatggctccagcacgggccaggctcccggcgaggactcggaggtgctgctgcgtcccgtggccatcttcaaggatccgttccgtcgcggccagcacatcttggtgctgtgcgactgcctgaagcccgacatgacgcccatcgccaacaacacgcgtgctgacgctgctcgtgtcatgaaggctgctgagggcgaggagccgtggttcggtattgagcaggagtacactctgttcgagaaggacggcgtgaccccgtacggctggccgaagggaggtttccctggtccgcagggtccgtactactgcggtgccggtgcgcactcggtgttcggccgtatcattgtggacgctcactaccgcgcatcgctgtacgctggcatcaacatctctggcatcaacgccgaggtgatgcctggccagtgggagtaccaggtgggtccgtgcacgggcattgagtctggcgaccacctgtggatgtctcgctacattctgctgcgtgtgtgcgaggactttggcgtgaacgtgtcgtgggacccgaagccgatccctggcgactggaacggcgctggctgccacaccaactactcgaccaaggcgatgcgtgaggagggcggcatggccaagatcatcgaggccatcgagaagatgaagctgaagcacaaggagcacattgcggcgtacggcacgggcaacgagcgtcgtctgacgggccgccacgagacggccagcatggacacgttctcgtacggcgtggccaaccgtggtgcgtcgatccgcattccgcgtgtggcggaggccgagggcaagggctacttcgaggaccgtcgcccagcgtccaacatggacccgtacgtggtgactggccgcatcatcaagacgacgatcttgaacgaggcataagtctcaaggttaaagtggtagatttcgactggtagcgggttgcagctgctgcttccagagcagagctgcccgtagctattgtgaccgcgatcgcttctctttgttttgtcgtggaggagtgagtagcggtgtttcctatatatgcttagtgagagaagaaaaatacagaacttcctatgatagcttaaaaaaaaaaaaaaaaaaaaaaaaa

SEQ ID NO: 21258 - protein, 357 aa, Phytophthora infestans
MSQLDRAVYDQYMSLDVSESVTLAEYVWIGGSGQDLRCKTKTLTKPVKSVADLPIWNFDGSSTGQAPGEDSEVLLRPVAIFKDPFRRGQHILVLCDCLKPDMTPIANNTRADAARVMKAAEGEEPWFGIEQEYTLFEKDGVTPYGWPKGGFPGPQGPYYCGAGAHSVFGRIIVDAHYRASLYAGINISGINAEVMPGQWEYQVGPCTGIESGDHLWMSRYILLRVCEDFGVNVSWDPKPIPGDWNGAGCHTNYSTKAMREEGGMAKIIEAIEKMKLKHKEHIAAYGTGNERRLTGRHETASMDTFSYGVANRGASIRIPRVAEAEGKGYFEDRRPASNMDPYVVTGRIIKTTILNEA

SEQ ID NO: 21259 - DNA, 1369 bp, Canis familiaris
  CDS (248)..(1369)
agagccgagaatgggagcggaggggagcttctgagcagcgccccggcctcctctcctcgccgcacctcgctctcgcggcccgcccgcccgccctgctgcctgcgacccgcccagaaagctccggtgtatggaccagcgggagcccgagagcctggagaggcgcgaacgcgactccaaacggagaagggccagggaaggcaatcccaacgacccgattgaccttctgtggctgggaacaacttccaccatggccacctctgcgagttcccacttgaacaaaggcatcaagcaggtgtacatgtccctgcctcagggcgagaaagtgcaagctatgtatatttggattgacgggactggagaaggattacgttgcaagacccggaccttggacagtgagcccaagggtgttgaagagttgcctgaatggaattttgatggctctagcacctttcagtctgaaggctccaacagtgacatgtatcttgtccctgctgccatgtttcgcgaccctttccgcaaggaccccaacaagctggtattctgtgaagtcttcaaatacaacagaaagcctgcagaaaccaatttaaggcatacctgtaaacggataatggacatggtgagcaaccaacacccctggtttggaatggagcaggaatatactctcatgggcacagatggtcacccttttggttggccttccaatggcttccctgggccccaaggtccgtactactgtggtgtaggagcagacaaagcctatggcagggatatcgtggaggctcactaccgggcctgcttgtatgctggcatcaagattgctgggacaaacgctgaggtcatgcctgcccagtgggaattccagataggaccctgtgaaggaatcgacatgggagatcatctctgggtggcccgtttcatcttgcatcgtgtatgtgaagacttcggagtgatagcaacctttgatcctaagcccattcccggaaactggaatggtgcaggctgccacaccaacttcagcaccaaggccatgcgagaggagaatggtctaaagtacattgaggagtccattgaaaaactgagcaagcggcaccagtaccacatccgagcctacgatcccaagggaggcctggataatgcccggcgcctaactggattccatgagacatccaacatcaacgacttttctgccggcgtggccaaccgtggtgctagcatccgcattccccggactgtcggccaggagaagaagggttactttgaagaccgtcgcccctctgccaactgcgaccccttttcggtgacagaagccctcatccgcacatgtcttctcaacgaaactggcgatgaacccttccagtacaaaaactaa

SEQ ID NO: 21260 - protein, 373 aa, Canis familiaris
MATSASSHLNKGIKQVYMSLPQGEKVQAMYIWIDGTGEGLRCKTRTLDSEPKGVEELPEWNFDGSSTFQSEGSNSDMYLVPAAMFRDPFRKDPNKLVFCEVFKYNRKPAETNLRHTCKRIMDMVSNQHPWFGMEQEYTLMGTDGHPFGWPSNGFPGPQGPYYCGVGADKAYGRDIVEAHYRACLYAGIKIAGTNAEVMPAQWEFQIGPCEGIDMGDHLWVARFILHRVCEDFGVIATFDPKPIPGNWNGAGCHTNFSTKAMREENGLKYIEESIEKLSKRHQYHIRAYDPKGGLDNARRLTGFHETSNINDFSAGVANRGASIRIPRTVGQEKKGYFEDRRPSANCDPFSVTEALIRTCLLNETGDEPFQYKN

SEQ ID NO: 21261 - DNA, 1905 bp, Homo sapiens
  CDS (644)..(1765)
ggcttccaatgtgaccgaacaatggagagcccgggcctcggcgcagtcagtggagaagccggtccgggcggaggcagcagcagcgcgcagtccctacggcctgcgcccccaccctcccccggaccccccaacccctcggcggcagggtatggccacctccgtgaggccctgagattcggacgggggcccgaggggcagggcgcccactttagggacatttcagtgggaaggggctgctctcaaagtggataattataactccctcgggggcgggaagcggggatcctcccccagccgcaagtccacgaagaaagcaacgaatgaaaattatgaagacgagaagtcagcctcctccgggtcgcgctccagctgcttcggcttcgtcgcctactctgtgaactccggggagagatctcgagtcaagattaagaccttaacccaccaacctgcctgttcggacaccccccgggccggccgctgtctgtccccttctccatcgccctctcccaggaagctccggtgcttggaccagctagagtctgagaaagaggagaggcgcgaacgccactccaaaaagagaagggttaaagagggcaaccctaacgatacgcttgactttctgtggctgggaacaccttccaccatgaccacctcagcaagttaccacttaaataaaggcatcaagcaggtgtacatgtccctgcctcagggtgagaaagtccaggccatgtatatctggatcgatggtactggagaaggactgcgctgcaagacccggaccctggacagtgagcccaagtgtgtggaagagttgcctgagtggaatttcgatggctctagtactttacagtctgagggttccaacagtgacatgtatctcgtgcctgctgccatgtttcgggaccccttccgtaaggaccctaacaagctggtgttatgtgaagttttcaagtacaatcgaaggcctgcagagaccaatttgaggcacacctgtaaacggataatggacatggtgagcaaccagcacccctggtttggcatggagcaggagtataccctcatggggacagatgggcacccctttggttggccttccaacggcttcacagggccccagggtccatattactgtggtgtgggagcagacagagcctatggcagggacatcgtggaggcccattaccgggcctgcttgtatgctggagtcaagattgcggggactaatgccgaggtcatgcctgcccagtgggaatttcagattggaccttgtgaaggaatcagcatgggagatcatctctgggtggcccgtttcatcttgcatcgtgtgtgtgaagactttggagtgatagcaacctttgatcctaagcccattcctgggaactggaatggtgcaggctgccataccaacttcagcaccaaggccatgcgggaggagaatggtctgaagtacatcgaggaggccattgagaaactaagcaagcggcaccagtaccacatccgtgcctatgatccgaagggaggcctggacaatgcccgacgtctaactggattccatgaaacctccaacatcaacgacttttctgctggtgtagccaatcgtagcgccagcatacgcattccccggactgttggccaggagaagaagggttactttgaagatcgtcgcccctctgccaactgcgaccccttttcggtgacagaagccctcatccgcacgtgtcttctcaatgaaaccggcgatgagcccttccagtacaaaaattaagtggactagacctccagctgttgagcccctcctagttcttcatcccactccaactcttccccctctcccagttgtcccgattgtaactcaaagggtggaatatcaaggtcgtttttttcattccaaaaaaaaaaaaaaaa

SEQ ID NO: 21262 - protein, 373 aa, Homo sapiens [sequence omitted]

SEQ ID NO: 21263 - DNA, 1520 bp, Oncorhynchus mykiss
  CDS (7)..(1122)
aataatatggctacgtcctccagcgcagaactgagtaaggctgtcaaacagcagtacatggacctccctcagggagacaaagtccaaatcatgtatgtctggatcgatggaaccggagagggactccgctgtaagaccagaacgctggattcggagcccaagtgcattgaagaactgcctgaatggaactttgatggctctagcacctaccagtctgagggctcaaacagtgatatgtatttgattccttctgcaatgttcagagatcctttccgcaaagaccccaacaaactggtcctgtgtgaagtgctgaagtacaaccgcaaacctgcagaaaccaaccttcgtttgacgtgtaataaagttatggacatggttgagaaccaggtcccttggtttggcatggagcaagagtacaccattttgggcacggatggacacccatttggctggcccaacaacggcttccctggcccacaaggtccctattactgtggagtgggatctgacaaggcctacggtagagatattgtggaagcccactacaaagcctgcctgtatgctggggtcatgatctgtggaaccaatgctgaagtcatgcctgcacagtgggagttccaggttggcccttgtgaaggcatcagcatgggtgatcacctttgggcagctaggttcattctccaccgggtgtgtgaggactttggtgtggtggcctcatttgaccccaagcccatccctggaaactggaacggcgctggatgccacaccaatttcagcacaaaagagatgagggaagagggtgggttgaaggccattgaggagtccattgaaaggctggggaagaggcatagctaccacatccgtgcctatgaccctaaagggggacttgacaatgcccgtcgccttaccggccaccatgaaacctccaacatccacgagttctctgccggtgtggccaaccgcggtgccagcatccgcatccctcgcactgtgggccaggagaagaagggctacttcgaggaccgccgcccatctgccaactgtgacccgtacgccgtgactgaggctataatccgcacctgtttgcttagcgaggaaggagatgaacctgtgaactactagatctaactagagccacacctctggactgaatccccttcgccaccacccttctccattctcattttctaaatggctgaaaagttgaactagtactgtatttgttgtaatttttcactgaaattattctaaccttctaaatggcttaaagttggctggtcaacttaacatggaattaaatctgtttaacataaaaacaaacatttaatgaaagatggtggctgacagggcattgtcttccccttttgagtcttctagtggggagtataactgtttttaaatccccatttgatctcgcgtttcctgcagtctgtcgaactgaaataaactaaagcacatgtggacactgacgactatggctgggcggcatgtgtaattgtcttaataaaacctattttgct

SEQ ID NO: 21264 - protein, 371 aa, Oncorhynchus mykiss
MATSSSAELSKAVKQQYMDLPQGDKVQIMYVWIDGTGEGLRCKTRTLDSEPKCIEELPEWNFDGSSTYQSEGSNSDMYLIPSAMFRDPFRKDPNKLVLCEVLKYNRKPAETNLRLTCNKVMDMVENQVPWFGMEQEYTILGTDGHPFGWPNNGFPGPQGPYYCGVGSDKAYGRDIVEAHYKACLYAGVMICGTNAEVMPAQWEFQVGPCEGISMGDHLWAARFILHRVCEDFGVVASFDPKPIPGNWNGAGCHTNFSTKEMREEGGLKAIEESIERLGKRHSYHIRAYDPKGGLDNARRLTGHHETSNIHEFSAGVANRGASIRIPRTVGQEKKGYFEDRRPSANCDPYAVTEAIIRTCLLSEEGDEPVNY

SEQ ID NO: 21265 - DNA, 1840 bp, Oncorhynchus mykiss
  CDS (76)..(1191)
attatattggacttgccagtcctttaaattttatttaaaatttctcgtatttccaggtgttttataacaaacaagatggctatgtccgccagcgccgaactaagtaaggctgttaaacagcagtacatggaactccctcagggagacaaagtccaagtcatgtatgtctggatcgatggaaccggagagggactccgctgcaaaaccagaacgctggattcggagcccaagagcatcgaagaactgccggaatggaactttgatggctccagcacctaccagtctgagggctcaaacagtgatatgtatttgattccttctgcaatgttcagagatcccttccgcaaagaccccaacaaattggtattgtgtgaagtgctgaagtacaaccacaagcctgcagaaaccaaccttcgtttgacttgtaagaaagtcatggacctggttgagaaccagatcccttggtttggcatggagcaagagtacacaatcctaggcactgatggacacccatttggctggcccaacaacggcttccctggcccacaaggtccctattattgtggagtgggatctgacaaggcctatggtagagatattgtggaagcccactatagagcctgtctgtatgctggggtcatgatctgtggcaccaatgctgaagtaatgcctgcacagtgggagttccaggttggtccttgtgaaggcatcaccatgggtgatcacctctgggtggctcgcttcatcctccaccgggtgtgtgaggactttggcgtggtggcctcatttgaccccaagcctatccctgggaactggaacggtgctggctgccacaccaatttcagcaccaaagagatgcgggaagaaggcgggttaaaggccattgaggagtccattgagaggctggggaggaggcatagctaccacatccgtgcctacgaccctaaaggggggcttgacaacgcccgtcgcctcaccggccaccatgaaacctccaatatccacgagttctctgctggcgtagccaaccgtggcgccagtatccgcatccctcgcaccgtgggccaggagaagaagggctactttgaggaccgccgcccgtcggccaactgcgacccgtatgccgtgacggaggctctgatccgcacctgtttgctcagcgaggagggagatgaacctgtggactattagacccaacgagatccactgctctctggacttagtccccttccccctcaccctcatttttttttttaatggctgaaaagtcaaactagtactgtatttgtcattttttttattttccactgaaatgattctaaccttgcatttttatgtagcttaaagttggctggtcaacttaacatggaattaaatctggtgttaacatatgggggggagggaaagagtgtctgacagggtattgtctttcccctctcgtgttggttgttttctagtggggagtatttgtaatgtaactgtttaagtcctcatttggtctctttccctgcagtctgttgaactgaaatgctctaaagaacatattgacactgaagactagggctgggtggcatgtgtcactttcttaataaaacctatggctagtttgtgtactttgtatgttgacctgccttttaaactatgtactgtttcaatgttaactaactaggcagtgtctttaaatggcaacatttctgtctccagatttgacacattcctggatcatgttgtctggtacattctttagatgtctggctctaaacactgtcttttacatttggctcagtcttgccaattgtagcgttcctgtaagactcatgaaggagttttatcccttttt

SEQ ID NO: 21266 - protein, 371 aa, Oncorhynchus mykiss
MAMSASAELSKAVKQQYMELPQGDKVQVMYVWIDGTGEGLRCKTRTLDSEPKSIEELPEWNFDGSSTYQSEGSNSDMYLIPSAMFRDPFRKDPNKLVLCEVLKYNHKPAETNLRLTCKKVMDLVENQIPWFGMEQEYTILGTDGHPFGWPNNGFPGPQGPYYCGVGSDKAYGRDIVEAHYRACLYAGVMICGTNAEVMPAQWEFQVGPCEGITMGDHLWVARFILHRVCEDFGVVASFDPKPIPGNWNGAGCHTNFSTKEMREEGGLKAIEESIERLGRRHSYHIRAYDPKGGLDNARRLTGHHETSNIHEFSAGVANRGASIRIPRTVGQEKKGYFEDRRPSANCDPYAVTEALIRTCLLSEEGDEPVDY

SEQ ID NO: 21267 - DNA, 1681 bp, Oncorhynchus mykiss
  CDS (160)..(1281)
tcatatctctcttttataaatggaaccgttaggacaaattttgcggtagagaatgaaacaaaaacatttggaattacacagaacatttacagaaggctgtaccaggcttttgatcctaattccttacttgatataaggttttccagggctcattgaaaaatggccacgtcagagagtgccagtttgagtaaaactgtgaagcagcattatatggacctttctcagggagacaaggtccaggccatgtacatctggatagatgggactggagaggggctccgctgcaagaccagaactctggattctgaacccaagaacattgatgatctcccagagtggaactttgatggttccagtacgtaccagtcggagggctccaacagcgatatgtaccttatccctgctgccatgttcagggaccccttcaggaaagaccccaacaaactggtcctgtgtgaagtgctcaaatacaaccgcaagcctacagaaactaacctcaggctgatgtgtaagaagatcatggagatggtagagaaccaggtgccgtggtttggcatggaacaggagtacaccatcctgggaacagacggacatccgtttggctggccttccaacggcttccctggtccacaaggcccctactactgtggtgtgggagcagacaaggcgtatggtagagacatcgtagaagcccactatagagcttgtctttatgctggggttaagatatgtggcaccaatgctgaagtcatgccagctcagtgggagttccaggttgggccatgtgaaggtatcaacatgggtgaccacctctgggctgctcggttcatcctccaccgggtgtgtgaagactttggcgtggtggcctcattcgaccccaagcccatccctgggaattggaacggcgctggctgccatacaaacttcagcaccaaggagatgagagaagatggcggattgaggggcatcgaagattcgattgagaagttgggaaggagacaccgctaccacatccgtgcctacgaccccaaaggggggctggacaacgcccggcgcttgaccggtcaccacgaaacatccaacatccacgagttctctgccggcgtggcaaaccgcggcgccagcatccgcataccccgctcggtgggtcaggacaagaagggctacttcgaggaccgccgtccatctgctaactgcgacccatatgcagtcacggaagcgctgatacgcacatgtttgctcagtgaagagggggaggagcctaaagaatacagcaaatgaactagatactcttttggtctgaaataatccccctcctgtcctattgcgctacatctcaagtgtcattccaagtactgttttgtctgtggctttgtaaaccccttgcatattgcaagtcttgaccatccatgtatggcttgctttttaacccttttcatgggagaatcttcggtatattctgcagtctgtgttcagggtagagtagatccctaccttttgatcactgccaacattgccctttttaattgatgctatggacttaacaattccagacagatgtctgttggagggatacatgttttctatatataggtctacttctagttgtgtatcaatttgctactcataatattgtttaacatgatttactaaccaagatgctgtagatttttgattgggg

SEQ ID NO: 21268 - protein, 373 aa, Oncorhynchus mykiss
MATSESASLSKTVKQHYMDLSQGDKVQAMYIWIDGTGEGLRCKTRTLDSEPKNIDDLPEWNFDGSSTYQSEGSNSDMYLIPAAMFRDPFRKDPNKLVLCEVLKYNRKPTETNLRLMCKKIMEMVENQVPWFGMEQEYTILGTDGHPFGWPSNGFPGPQGPYYCGVGADKAYGRDIVEAHYRACLYAGVKICGTNAEVMPAQWEFQVGPCEGINMGDHLWAARFILHRVCEDFGVVASFDPKPIPGNWNGAGCHTNFSTKEMREDGGLRGIEDSIEKLGRRHRYHIRAYDPKGGLDNARRLTGHHETSNIHEFSAGVANRGASIRIPRSVGQDKKGYFEDRRPSANCDPYAVTEALIRTCLLSEEGEEPKEYSK

SEQ ID NO: 21269 - DNA, 1926 bp, Oreochromis niloticus
  CDS (94)..(1209)
gagacatcattcagcaacacattggacctgccagtcctttagtttttatttcaattttctcgtttctccaggtgtattatagtagcaaataagatggctacatccgccagcgccagcttgagtaaagctgtcaagcagcagtacatggagctccctcagggggacaaagtccaggccatgtacatctggatcgacggaaccggagaggggctccgatgcaaaaccaggacgcttgattctgagcccaaaagcatcgaagatcttcctgaatggaactttgacggatccagtacctaccagtccgaaggctccaacagcgacatgtatctgatcccctcagccatgttccgcgatccattccgcaaagaccccaacaagctggtgctgtgtgaagtcctgaagtacaaccgtaaacctacagaaaccaaccttcggctcacctgtaagaaagtgatggatatggtggcggatcagcatccttggtttggcatggagcaggagtacaccatccttggaacggacgggcatccatttggctggccatctaatggtttccccggaccacaggggccgtactactgtggtgttggagctgacaaagcctatggcagggacgtagtcgaggcccattacaaagcttgtttgtacgctggagtccagatttgtggcacaaatgctgaagtaatgcctgctcagtgggagttccaggtcggaccttgcgaaggcattgacatgggcgatcatttgtgggtagcgcgcttcatcctgcaccgtgtctgtgaggattttggcgtcgtcgcctcatttgatcccaagccaatccctggaaactggaacggtgctggctgccatacaaacttcagcacgaaagagatgagggaagacggtggattgaaagctattgaggattccattgagaagcttggaaagaggcacagctaccacattcgtgcctacgaccccaaaggggggctcgacaacgcccgccgtctcactggccgccatgaaacctcaaacatcaacgaattctctgctggtgtggccaaccgtggtgccagcattcgcattcctcgtaatgttggtcaggagaagaaaggctacttcgaagaccgtcgcccttcagccaactgtgacccgtacagtgtgaccgaggccctgatccgcacctgtctgctgaacgaggaaggagatgaacccgcggattactaaatccacaactgactcccactgtcctccctaatttcttttaaactagtatttttttttttttttttttttccttttctccctctgagatgattttaacccacatttttaatggcttaaagttgactggtcaactgaaaacatgacaaaggtgttacatccttggtagttgtgagctggtcatggcagggtatgcctttcccctcatctttagcagggatcggcttttgtaacactgttttgtaacccatgtcatatcattcccttttttgtcagtgactaaaacgaactaaagcacatggacactgcagagtagcgctgctaagactggacagcatttgtaattgaataaatctgactagttcgtgtactgttaatatgttgaactgcctttcaactatccagtcttcaatgttactaattctgtcgttttatcaagtgtctacttttaaatggcaacatttgtcttcagagttttgacacactgggtcatctttgtattgtacacttcgtagaggtctgtacccagatgtaagttgtgcaaatgtggtggatctgtccgtaatgccatttgtagatttcctcaaggagttttatccttttgttaactgcaatattgtaatgcacctgatttggtaaaacattacatttactgaacatggtgatttttattgaaacatttaaaacttttatttttatcaaaaaaaaaaaaaaaaaaaa

SEQ ID NO: 21270 - protein, 371 aa, Oreochromis niloticus
MATSASASLSKAVKQQYMELPQGDKVQAMYIWIDGTGEGLRCKTRTLDSEPKSIEDLPEWNFDGSSTYQSEGSNSDMYLIPSAMFRDPFRKDPNKLVLCEVLKYNRKPTETNLRLTCKKVMDMVADQHPWFGMEQEYTILGTDGHPFGWPSNGFPGPQGPYYCGVGADKAYGRDVVEAHYKACLYAGVQICGTNAEVMPAQWEFQVGPCEGIDMGDHLWVARFILHRVCEDFGVVASFDPKPIPGNWNGAGCHTNFSTKEMREDGGLKAIEDSIEKLGKRHSYHIRAYDPKGGLDNARRLTGRHETSNINEFSAGVANRGASIRIPRNVGQEKKGYFEDRRPSANCDPYSVTEALIRTCLLNEEGDEPADY

SEQ ID NO: 21271 - DNA, 1429 bp, Arabidopsis thaliana
  CDS (91)..(1161)
atcatctcattaacaaaaataaaacacacaatctcaagattttctacttcttattacaaagattcaatcttcttgtttcttcttgcaaccatgagtcttcttgcagatcttgttaaccttgacatctcagacaacagtgaaaagatcatcgctgaatacatatgggttggtggttctggtatggacatgagaagcaaagccaggactctccctggacctgtgaccgatccatcaaaacttccaaagtggaactatgatggttcaagcactggtcaagctcctggtcaagacagtgaagtgatcttataccctcaagcaattttcaaagatccattccgtagaggcaacaacatccttgttatgtgtgatgcttacactccagcgggagagccaatccctactaacaagcgacatgctgcggctgagatctttgctaaccctgatgttattgctgaagtgccatggtatggaatcgaacaagaatacactttgttgcagaaggatgtgaactggcctcttggatggcccattggtggcttccctggccctcagggaccatactactgcagtattggagctgacaaatcttttggaagagacattgttgatgctcactacaaagcctctttgtatgctggaatcaacatcagtgggatcaatggagaagtcatgccgggacaatgggagttccaagtcggcccatcggtcggtatctcagctgctgatgaaatatggatcgctcgttacattttggagaggatcacagagattgctggtgtggttgtatcttttgacccaaaacctattcctggtgactggaatggagctggtgctcacaccaattacagtactaaatcaatgagggaagaaggaggatacgagataatcaagaaggcgatcgagaagcttggcttgagacacaaggaacacatttccgcttacggtgaaggaaacgagcttcgtctcacgggacaccatgaaactgctgacatcaacactttcctttggggtgttgcgaaccgtggtgcatcgatccgagtaggacgtgacaccgagaaagaagggaagggatactttgaggataggaggccagcttcaaacatggacccttacgttgttacttccatgattgcagagactacactcctctggaacccttgaaaggatgatccgtaactcttgaagctgcttctgattgggttttttggaagttccaagcttgtcttttctctacagtgtgtattaagcaattgtaccggttgacactgccggagtttgtgatttggggcctttctttctttttcttctttttataatcttttgggttctgtggttagagcaaattcggtttgctctgtttgtttgacctttattgaaacctttggtatttgtactaataatacaatctgaaaaggcctcttcatgttcc

SEQ ID NO: 21272 - protein, 356 aa, Arabidopsis thaliana
MSLLADLVNLDISDNSEKIIAEYIWVGGSGMDMRSKARTLPGPVTDPSKLPKWNYDGSSTGQAPGQDSEVILYPQAIFKDPFRRGNNILVMCDAYTPAGEPIPTNKRHAAAEIFANPDVIAEVPWYGIEQEYTLLQKDVNWPLGWPIGGFPGPQGPYYCSIGADKSFGRDIVDAHYKASLYAGINISGINGEVMPGQWEFQVGPSVGISAADEIWIARYILERITEIAGVVVSFDPKPIPGDWNGAGAHTNYSTKSMREEGGYEIIKKAIEKLGLRHKEHISAYGEGNELRLTGHHETADINTFLWGVANRGASIRVGRDTEKEGKGYFEDRRPASNMDPYVVTSMIAETTLLWNP

SEQ ID NO: 21273 - DNA, 1356 bp, Oryza sativa
  CDS (1)..(1356)
atggcgcaggcggtggtgccggcgatgcagtgccaggtcggggccgtgcgggcgaggccggcggcggctgcggcggcggcgggggggagggtgtggggagtcaggaggaccgggcgcggcacgtcggggttcagggtgatggccgtgagcacggagaccaccggggtggtgacgcggatggagcagctgctcaacatggacaccacccccttcaccgacaagatcatcgccgagtacatctgggttggaggaactggaattgacctcagaagcaaatcaaggacaatatcaaaaccagtggaggacccctcggagctaccaaaatggaactacgatggatcaagcacagggcaagctccaggagaagatagtgaagtcatcttatacccacaggctatattcaaggacccatttcgaggtggcaacaacatattggttatgtgtgatacctacacaccagctggggaacccatccctactaacaaacgtaacagggctgcacaagtattcagtgatccaaaggttgtcagccaagtgccatggtttggaatagaacaggagtacactttgctccagagagacgtaaactggcctcttggctggcccgttggaggctaccctgggccccagggtccatactactgcgctgtaggatcggacaaatcgtttggccgtgacatatcagatgctcactacaaggcatgtctttatgctggaattaacattagtggaacaaatggagaggtcatgcctggtcagtgggagtaccaggttggacctagtgtcggtattgaagctggagaccacatatggatttcaagatatattcttgagagaataacggagcaggctggtgtagtgcttacccttgaccccaaaccaattcaggcggattctgtaatttgttttgttattagactacgtttaatacttcaaatcaccaagagtatgcgtgaagatggaggatttgaggtgatcaagaaggcaatcctaaacctatcacttcgccatgacttgcatataagtgcatatggtgaaggaaatgaaaggaggttgacaggtttacacgagacagctagcattgacaatttctcatggggtgtggcaaaccgtggatgctctattcgggtggggcgagacaccgaggcgaagggaaaaggctacttggaagaccgtcgcccggcatcaaacatggacccgtacgtcgtgacagcgctattggctgaaaccacaattctttgggagccaaccctcgaagcggaggttcttgctgctaagaagttggccctgaagtttctagaaaaccacgccaccttccattcgccagttaacattttggttgaacaccacacttga

SEQ ID NO: 21274 - protein, 451 aa, Oryza sativa
MAQAVVPAMQCQVGAVRARPAAAAAAAGGRVWGVRRTGRGTSGFRVMAVSTETTGVVTRMEQLLNMDTTPFTDKIIAEYIWVGGTGIDLRSKSRTISKPVEDPSELPKWNYDGSSTGQAPGEDSEVILYPQAIFKDPFRGGNNILVMCDTYTPAGEPIPTNKRNRAAQVFSDPKVVSQVPWFGIEQEYTLLQRDVNWPLGWPVGGYPGPQGPYYCAVGSDKSFGRDISDAHYKACLYAGINISGTNGEVMPGQWEYQVGPSVGIEAGDHIWISRYILERITEQAGVVLTLDPKPIQADSVICFVIRLRLILQITKSMREDGGFEVIKKAILNLSLRHDLHISAYGEGNERRLTGLHETASIDNFSWGVANRGCSIRVGRDTEAKGKGYLEDRRPASNMDPYVVTALLAETTILWEPTLEAEVLAAKKLALKFLENHATFHSPVNILVEHHT

SEQ ID NO: 21275 - DNA, 1544 bp, Bostrychus sinensis
  CDS (90)..(1205)
catcacaacacaagacattggacctgtcagtcctttagtttttatttgtatttccttgtacatccaggtgtgttatagtagcggtgaagatggccacatccgccagctccagtttgagtaaagctgtgaagcagcagtacatggagctgccccagggggataaggtgcaggccatgtacatctggatagacggcactggagaggggctccgctgcaaaacgaggacactagacagtgagcctaaaagcattgaagatctgcctgagtggaacttcgatggctcaagcacatatcaagcagaagactccaacagtgacatgtacctgattcctgctgctatgttccgtgacccttttcgcaaagaccccaacaaactggtcctgtgtgaagtgctgaagtataaccgaaaacctgcagaaaccaacctcagaattacatgtaaaaagctgatggatatggtggcagaccagcacccctggtttggcatggaacaagagtacactattttggggactgatggacacccctttggatggccatctaatggattccctggaccacaaggtccatactactgtggtgtgggagcagacaaggcttatggcagagacattgtggaggcacattacagagcctgcctctatgctggagtgcagatttgtggcacaaatgcagaagtgatgccagctcagtgggagttccaggtggggccttgcgagggcattaacatgggtgatcatctctgggcggcccgcttcatcctgcaccgtgtgtgtgaagactttggagttgttgcctcatttgaccccaagcccatccctggaaactggaatggtgctggctgccatacaaacttcagcacaaaagagatgagggaagaaggcggcctaaaagccattgaggagtctattgaaagacttggaaagaggcaccgctaccacatccgtgcctatgatcccaaaggcgggctcgacaacgcccgccgcctcacgggccaccacgaaacctcaaacatcaatgaattctccgcaggcgtggccaatcgtggtgccagcatccgcattcctcgcagtgttggtcaggagaagaagggctactttgaagaccgccgtccctctgtcaactgtgacccatatggtgtcactgaggccctgatccgtacctgtttgctgggtgaggagggggatgaacccacggattactaaactataactcatggactgactcctaatgcccttctggcttctcttaaaaaaaaataatagtactgtatttctcccactgagattattttaacctgcattttaatggctaaagttggctggtcaacttaaacatgtcaaggtagtcacatctttagtagttgtgagctggtaatggcagggtatgtctttcccttcatctttagatgggattggcctttgtaacggttttctagcttgtgttctttccttttttgtttgactaaaatgaactaaaagcacatggacactgaaaagtagagctgctacagctggaaagcatgtgtaacaaaataaatgatt

SEQ ID NO: 21276 - protein, 371 aa, Bostrychus sinensis
MATSASSSLSKAVKQQYMELPQGDKVQAMYIWIDGTGEGLRCKTRTLDSEPKSIEDLPEWNFDGSSTYQAEDSNSDMYLIPAAMFRDPFRKDPNKLVLCEVLKYNRKPAETNLRITCKKLMDMVADQHPWFGMEQEYTILGTDGHPFGWPSNGFPGPQGPYYCGVGADKAYGRDIVEAHYRACLYAGVQICGTNAEVMPAQWEFQVGPCEGINMGDHLWAARFILHRVCEDFGVVASFDPKPIPGNWNGAGCHTNFSTKEMREEGGLKAIEESIERLGKRHRYHIRAYDPKGGLDNARRLTGHHETSNINEFSAGVANRGASIRIPRSVGQEKKGYFEDRRPSVNCDPYGVTEALIRTCLLGEEGDEPTDY

SEQ ID NO: 21277 - DNA, 1696 bp, Lotus japonicus
  misc_feature (934)..(934): n is a, c, g, or t
  misc_feature (997)..(997): n is a, c, g, or t
  CDS (147)..(1439)
gcgtccgatatctatctcacacgagtctctcctactactattcttcacactctgcctcagggtctctgactcatacacggggcgcattttcacttgaacttagttcaagtttgcatctttagccatttttccactctctactgaacatggcacagattttggcaccctcgacgcaatggcagacgagaatcaccaaaacctctcccaatgcaagtcccattacatcaaacatgtggagttctttattgtggaaacaaaacaagaaagttgcacgtgcttctaagtttagagtactggcaatcaagtctgatggtagcaccatcaacaggctagagggtctgcttaatttggatgtcactccatacactgataagttcattgctgagtacatctggattggggggactggtgtcgatgttcgcagtaaatcaagaactatatcgaagcctgtttcacatccctctgagctccctaaatggaactatgatggatctagcactgggcaggcaccgggcgatgatagtgaagtaattctatatcctcaagcaattttcagagatcctttccgtggtggtaacaatattttggttatttgcgatgcttacacaccacaaggtgagcctatccctacaaacaagcggcacagagctgctgaaatcttcagtaacccaaaggttcaagctgaaattccatggtatggaatagaacaagagtacaccctacttcaaacggatgtgaagtggcctttgggatggcctgttggcggctatcctggtcctcagggtccctattactgtgctgccggggctgataagtcattcggacgtgatatatctgatgctcattacaaggcttgcttgtatgctggaatcaacatcagtggcaccaatggggaggttatgcctgggcagtgggagtatcaagttggtcctantgtaggtattgaagctggtgatcatatctgggcttcaaggtacctccttgagagaatcactgnacaagctggtgttgtcctcactcttgatccaaaaccaattgagggtgactggaacggtgccggagcccacaccaattacagcacaaagagcatgagggaagagggaggctttgaggtaatcaagaaggcaattttgaatctatcccttcgccaccaggaccatattcgtgcttatggagaaggaaatgagagacgattgacgggaaagcatgaaacagccgacattaacacattttcttggggagtggctaaccggggttgctcaatccgtgtgggaagagacacagagaaggaaggaaaaggttacttggaagacaggcgccctgcttcaaacatggatccatatgttgtgacagcattgctggcagagactaccttgttgtgggaaccaactctagaggctgaagctcttgcagctcagaagatacaattgaaggtctaaatctattgattgatggcattcttgatggagagcacgtacactttccttttagattatctacattctgaagatcttgtttggacaaaagaggctcctatgcccagttattgattgtcaaatgaaatgtgcactgtatatcataaattctgttggttatgtttgcatctggacaaacattgatgcttggttatatttcagtgttccttcggatttgaaaaaaaaaaaaaaaaaaaaaaaaaaaaaaaaaaaaaaaaaaa

SEQ ID NO: 21278 - protein, 430 aa, Lotus japonicus
  misc_feature (263)..(263): Xaa can be any naturally occuring amino acid
  misc_feature (284)..(284): Xaa can be any naturally occuring amino acid
MAQILAPSTQWQTRITKTSPNASPITSNMWSSLLWKQNKKVARASKFRVLAIKSDGSTINRLEGLLNLDVTPYTDKFIAEYIWIGGTGVDVRSKSRTISKPVSHPSELPKWNYDGSSTGQAPGDDSEVILYPQAIFRDPFRGGNNILVICDAYTPQGEPIPTNKRHRAAEIFSNPKVQAEIPWYGIEQEYTLLQTDVKWPLGWPVGGYPGPQGPYYCAAGADKSFGRDISDAHYKACLYAGINISGTNGEVMPGQWEYQVGPXVGIEAGDHIWASRYLLERITXQAGVVLTLDPKPIEGDWNGAGAHTNYSTKSMREEGGFEVIKKAILNLSLRHQDHIRAYGEGNERRLTGKHETADINTFSWGVANRGCSIRVGRDTEKEGKGYLEDRRPASNMDPYVVTALLAETTLLWEPTLEAEALAAQKIQLKV

SEQ ID NO: 21279 - DNA, 1233 bp, Gelidium crinale
  misc_feature (1232)..(1232): n is a, c, g, or t
  CDS (66)..(1121)
tcgtctctatctctttatcacttttcttttcagattcgtacatccacttttgatcttatttcaatatggaaaaatctttcgatcaacttttaagtctcaacgtagatgaaggatgtattgttgaatacgtctggattgatggatatgatgctgttcgttctaaaggtcgttatcttaagaatattccatcaaaagcttccgatttacctgattggaattatgatggtagttcaactaatcaagcaagtggtgaagattcagaagtaattattaaacctcaacgtatttttccagatccatttcgtggaaaaccaaatcttcttgttatgtgtgatacttatactccaaatggtgaacctttaaaaacaaatactcgttttgaatgtgaacgtattatgaatcaagcaaaagatttaaaaccttggtttggtttagaacaagaatattttctaattaatcctaatactggtaaacctttaggatttcctaatgataaagatcctgaaccacaaggtccatattattgtggtgtatctggatctaaaatgtttggtagagatattgctgatgcacattttaaagcttgtgtatatgcaggtattaaaatttcaggtattaatgcagaagttgcacctggacaatgggaatttcaagtaggtccatgtgttggtattgaagaaggtgatgaattatggatgggaagatatttattacaaagaattgctgaaatgaaaggtttggatgttaattatgatcctaaacctgttaaaggtgattggaatggttctggttgtcattctaatttttctactaaacctatgcgtgaaaaagatggttatcaaaatgctattatacctgcattagaaaaattgagtaagaaacataaagaacatattgcagcttatggtattggtaatgaagatcgacttactggaaaacatgaaactgctagtattgaacaatttaaatggggtgtagctgatcgtggtgcttcatgtcgtgttggtcatgatgtagaaaagaaaggttatggatattttgaagatagacgtcctgctggtaattgtgatccttatgttgttactatgatgcttgttaagacttgttgtcttgaagattagataagaaaatgctttcttgaaagaattgatagccttaagaaaacttgaggattcttctctaccatatcttcctttgtaatacgtttaataaacaaattgaatttattaccnt

SEQ ID NO: 21280 - protein, 351 aa, Gelidium crinale
MEKSFDQLLSLNVDEGCIVEYVWIDGYDAVRSKGRYLKNIPSKASDLPDWNYDGSSTNQASGEDSEVIIKPQRIFPDPFRGKPNLLVMCDTYTPNGEPLKTNTRFECERIMNQAKDLKPWFGLEQEYFLINPNTGKPLGFPNDKDPEPQGPYYCGVSGSKMFGRDIADAHFKACVYAGIKISGINAEVAPGQWEFQVGPCVGIEEGDELWMGRYLLQRIAEMKGLDVNYDPKPVKGDWNGSGCHSNFSTKPMREKDGYQNAIIPALEKLSKKHKEHIAAYGIGNEDRLTGKHETASIEQFKWGVADRGASCRVGHDVEKKGYGYFEDRRPAGNCDPYVVTMMLVKTCCLED

SEQ ID NO: 21281 - DNA, 1338 bp, Vitis vinifera
  CDS (27)..(1097)
ctgtgtcttattctttctattccaccatgtctctcctcgctgatctccaaaacatcaacctcagtgactccacggagaagattatcgccgaatacatatggatcggcggatccggaaatgatttgaggagtaaagcaaggaccctctccggtccggtcactggcccagcgcaactgccgaagtggaactacgatggatccagcaccggccaggctcccggcgaagacagtgaagtcattttataccctcaggcgatctttaaggatcccttcagaggaggagacaatattctggtcatgtgcgatgcctacactccagggggcgaaccaatcccgacaaacaagagattcaatgctgccaagatttttagccatcctgaagtgaccgccgaggagccttggtatggcattgagcaagaatatactcttcttcagaaggacgtcaactggccgcttggatggccagtcggcggcttccctggccctcagggcattatctactgtggaattggggctgacaaggcctttggtcgtgacatagtagattctcactacaaggcatgcctgtatgctggaatcaacatttctggaatcaatggagaggtcatgcctgggcagtgggaattccaagttgggcctgcagttgggatctctgctggtgatgaattatgggttgcccggtacattctggagaggattaccgaaattgctggagttgtcgtttcattcgacccaaaacctatcaagggagactggaatggtgctggagctcacaccaactatagcacgaaatccatgaggaatactggtggatatgatgtgattaaaaaggcaattgaaaagttgggtttgcgccacaaggagcatatttcagcttatggagagggtaatgagagaagattgacaggtcgccatgaaacagctgacatcaacactttctgttggggagttgccaacagaggtgcctctatccgtgttggccgtgacactgaaaaagaaggaaaaggttactttgaagacagaagacctgcttccaacatggatccaatcgttgtcacttccatgatcgccgagaccaccatcctctggaagccttaacaaggaaagtggaatatagaaattgattgaaggaaaaccagtatggtcagatttcaataaataattgtgttaattcctatttctgctgctttgaattgatgggttgcttgtcaaacttgggtttccttttggctttggtggaaagttctcatctgttgaactctctgtttaaagtactgctatattctgccttcgaatgttgacgttatgaagtggtatgtatgccttctcaattcaaaaa

SEQ ID NO: 21282 - protein, 356 aa, Vitis vinifera
MSLLADLQNINLSDSTEKIIAEYIWIGGSGNDLRSKARTLSGPVTGPAQLPKWNYDGSSTGQAPGEDSEVILYPQAIFKDPFRGGDNILVMCDAYTPGGEPIPTNKRFNAAKIFSHPEVTAEEPWYGIEQEYTLLQKDVNWPLGWPVGGFPGPQGIIYCGIGADKAFGRDIVDSHYKACLYAGINISGINGEVMPGQWEFQVGPAVGISAGDELWVARYILERITEIAGVVVSFDPKPIKGDWNGAGAHTNYSTKSMRNTGGYDVIKKAIEKLGLRHKEHISAYGEGNERRLTGRHETADINTFCWGVANRGASIRVGRDTEKEGKGYFEDRRPASNMDPIVVTSMIAETTILWKP

SEQ ID NO: 21283 - DNA, 1557 bp, Populus alba x Populus tremula
  CDS (114)..(1184)
acactgtactccttaaagctttcaggccctggccccagctagacaccactgctaacacaggcaggttgaagagctagaagaagagaagagttgcctattattactgtgtggacatgtcacttctcacggacctaattaaccttaagctctctgacattactgacaagataattgcggaatatatctggattggaggctcaggtatggatatgagaagtaaagccagaacgctctcaggcccagttacggatccagcacaactacctaagtggaattacgacggctctagtaccggccaagcaccaggcgaggatagcgaggtaatactttatcctcaagcgatctttaaagacccgttcagaagaggtaataacattctcgttatgtgcgacgcgtatactccgcaaggcgaacctatcccgaccaataagaggtatgccgctgcgaagatatttagctcaccagaggttgctgctgaggaaccatggtatggaatcgaacaggagtatacattacttcaaagggacgtcaactggccgataggttggcctgtcggaggctatccaggaccgcaaggtccttattactgcggtatcggcgccgataaggcgtatgggcgagacattgttgatgctcactataaagcttgcctatacgcaggtattaatatcagtggcatcaacggtgaggttatgcctggacaatgggagttccaggtgggcccgtcagtaggcatctctgctggtgatcatatttgggctgcacgatatatattggaaagaatcactgaacaagctggcgtggtactctccttcgacccgaagcctatcaaaggcgattggaacggagcaggtgcgcatactaattacagcacgaagtcgatgagagaggacggtggatacgaagttattaagaaggcgatcgaaaagttaggtctcagacataaggagcatatcagtgcgtacggagagggtaacgagcgtcggcttacaggtagacacgagacagccgatattaatacgttctcatggggagtagcgaatcgaggtgcgtctatccgagtcggtcgtgatacagagaaggagggtaaaggctactttgaagatagaagaccagcgtcgaatatggacccgtacgtggtcacgtcgatgatcgctgagactacgattctatggaagccgtaagcaagttcatgctggcaataactaaaaatttgaaacacctttgtttttacgctgtgtctgtcccagtgtacaaagaactgtgaatcagtcccaacttgaactccatgtccaatcaacttgctctttgatatgaaattttactattgtttgctcagttcgagtttgtatgcatcattgtccgaggtgtagcttggttgatttattgcatcagatcgattctttgcatatgacttcattctcctagatgcaggttaatataataaaacgccctaatacaatatcattagaatcatgcgttacctgacagatccctctagttagtacgctcgaatactactaggtatggtaaaaaaaaaaaaaaaaaaaaaaaaaa

SEQ ID NO: 21284 - protein, 356 aa, Populus alba x Populus tremula
MSLLTDLINLKLSDITDKIIAEYIWIGGSGMDMRSKARTLSGPVTDPAQLPKWNYDGSSTGQAPGEDSEVILYPQAIFKDPFRRGNNILVMCDAYTPQGEPIPTNKRYAAAKIFSSPEVAAEEPWYGIEQEYTLLQRDVNWPIGWPVGGYPGPQGPYYCGIGADKAYGRDIVDAHYKACLYAGINISGINGEVMPGQWEFQVGPSVGISAGDHIWAARYILERITEQAGVVLSFDPKPIKGDWNGAGAHTNYSTKSMREDGGYEVIKKAIEKLGLRHKEHISAYGEGNERRLTGRHETADINTFSWGVANRGASIRVGRDTEKEGKGYFEDRRPASNMDPYVVTSMIAETTILWKP

SEQ ID NO: 21285 - DNA, 1541 bp, Glycine max
  CDS (30)..(1328)
ccactgtttattgagaacaactgcagaacatggcacagattttggctccctctacgcaatggcagatgagaatctcaaaatcctctcccaatgcaagtcccattacatcaaacatgtggagttctttattgtggaaacaaaataagaaagtttcacccacaagttctgctaaatttagagtgatggcaattaagtctgacaatagcatcatcaacaggctagagggtctacttaatttggatatcactccattcacggacaagataattgctgagtacatttggattggggggacaggaattgatgtgcgcagtaaatcaagaacaatatcaaagcctgttgaacatccctctgagctccctaaatggaactatgatggatctagcactggacaggcaccgggtgatgatagtgaagtaatcctatatcctcaagcaattttcaaagatccgttccgtggtggtaacaatattttggtcatttgcgattcttacaccccacaaggtgagcctatccctacaaacaagagacacagagctgctgaaattttcagtaacccaaaggtccaagcagaagttccatggtatggaatagaacaagagtacaccttacttcaaacaaatgtgaaatggccattaggttggcccgttggtggctatcctggtcctcagggtccttattattgcagcgctggggcagacaagtcatttggacgtgacatatctgatgctcattacaaggcttgcttatatgctggaattaacatcagtggtacgattggagaggtgatgcctggtcagtgggagtaccaagttggtcctagtgtaggtattgaggctggtgatcatatctgggcttcaaggtacatcctcgagagaattactgagcaagctggtgttgtgctctctcttgatccaaaaccaatagagggtgactggaatggagcaggatgccacaccaattacagtacaaagagcatgagggaagatggaggctttgaggtaataaagaaggcaattttgaatctatcgctacgccacaaggatcacatcagtgcatatggagaaggaaatgagagaaggttgacaggaaagcatgagacagcaagcattaacacattttcttggggagtggctaaccgtggttgctcaatccgtgtgggaagagacacagagaagaatggcaaaggttacttggaagacaggcgaccgacttcaaacatggatccatatgttgcgacatcattacttgcagagactacactattgtgggagccaactctggaggctgaagctcttgcagctcagaagttagcattgaaggtctaaacctattgaatgatggcattctggatgcaaaatcactttccttttagattatctatatgtattctaatgatcttgtttggactaaagaggttgccatgcccagttattggttatcatatgaaatgcacattgtatatcagaagtttggttggtactacttgcttcaggacaaattttctttgatgcttggttaaaaaaaaaaaaaaaaaaaaa

SEQ ID NO: 21286 - protein, 432 aa, Glycine max
MAQILAPSTQWQMRISKSSPNASPITSNMWSSLLWKQNKKVSPTSSAKFRVMAIKSDNSIINRLEGLLNLDITPFTDKIIAEYIWIGGTGIDVRSKSRTISKPVEHPSELPKWNYDGSSTGQAPGDDSEVILYPQAIFKDPFRGGNNILVICDSYTPQGEPIPTNKRHRAAEIFSNPKVQAEVPWYGIEQEYTLLQTNVKWPLGWPVGGYPGPQGPYYCSAGADKSFGRDISDAHYKACLYAGINISGTIGEVMPGQWEYQVGPSVGIEAGDHIWASRYILERITEQAGVVLSLDPKPIEGDWNGAGCHTNYSTKSMREDGGFEVIKKAILNLSLRHKDHISAYGEGNERRLTGKHETASINTFSWGVANRGCSIRVGRDTEKNGKGYLEDRRPTSNMDPYVATSLLAETTLLWEPTLEAEALAAQKLALKV

SEQ ID NO: 21287 - DNA, 1410 bp, Rhizobium loti
  CDS (1)..(1410)
atgacgacagccaaagacatcatgaagcagatcaaggacaacgacgtgaaattcgtcgacctgcgcttcaccgacccgaagggcaagctgcagcacgtaacgatggatgtcgtcgaggtcgaggaagacatgttcgccgatggtgtcatgttcgacggctcctcgattgccggctggaaggccatcaacgagtccgacatggtgctcatgcccgatccggacacggtccacatggatccgttcttcgcgcagtcgaccatggtcatcctgtgcgacatcctcgatccggtctcgggcgaatcctacaaccgcgacccgcgcggcacggccaagaaggccgaagcctacatgaagtcggaaggcatcggcgaccagatcttcgtcggcccggaagccgaattcttcgtcttcgatgacgtcaagtacaaggccgacccgtacaacaccggcttcaagctcgactccaccgaactgccgtcaaacgacgacaccgactacgagaccggcaatctcggccatcgcccgcgcatcaagggcggctatttcccggtgccgccgatcgacagcgcgcaggacatgcgctccgagatgctgaccgtgctcgcggaaatgggcgtgcgcgtcgaaaagcatcaccacgaagtcgccgccgcgcagcacgaactcggcatcaagttcgacacgctggtccgcaacgccgacaagatgctgatctacaagtatgtcgtgcaccaggtcgccaacgcctatggcaagacggccaccttcatgccgaagcccatcttcggcgacaatggctcgggcatgcacgtccaccagtcgatctggaagggcggcaagccgaccttcgccggcaatgaatatgccggcctgtcggaaagctgcctgttctacatcggcggcatcatcaagcacgccaaggcgatcaacgcgttcaccaacccgctgacgaactcctacaagcgcctggtgcccggctatgaagcgccggtgctgctcgcctattccgcgcgcaaccgttcggcctcctgccgcatcccgttcggctcgtcgccgaaggccaagcgcgtcgaggtccgcttccccgatccgggcgcgaacccgtacctcgccttcgcagccatgctgatggccggcctcgacggcatcaagaacaagatccaccccggccagccgatggacaaggatctctacgacctgccgccgaaggagttgaagaagatcccgaccgtctgcggctcgctgcgtgaagctctccagagcctcgataaggatcgcggcttcctgaaggccggcggcgtcttcgacgacgaccagatcgacagctacatcgaactgaagatggccgaggtgatgcgctttgaaatgaccccgcatccggtggaatacgacatgtactattcggtgtaa

SEQ ID NO: 21288 - protein, 469 aa, Rhizobium loti
MTTAKDIMKQIKDNDVKFVDLRFTDPKGKLQHVTMDVVEVEEDMFADGVMFDGSSIAGWKAINESDMVLMPDPDTVHMDPFFAQSTMVILCDILDPVSGESYNRDPRGTAKKAEAYMKSEGIGDQIFVGPEAEFFVFDDVKYKADPYNTGFKLDSTELPSNDDTDYETGNLGHRPRIKGGYFPVPPIDSAQDMRSEMLTVLAEMGVRVEKHHHEVAAAQHELGIKFDTLVRNADKMLIYKYVVHQVANAYGKTATFMPKPIFGDNGSGMHVHQSIWKGGKPTFAGNEYAGLSESCLFYIGGIIKHAKAINAFTNPLTNSYKRLVPGYEAPVLLAYSARNRSASCRIPFGSSPKAKRVEVRFPDPGANPYLAFAAMLMAGLDGIKNKIHPGQPMDKDLYDLPPKELKKIPTVCGSLREALQSLDKDRGFLKAGGVFDDDQIDSYIELKMAEVMRFEMTPHPVEYDMYYSV

SEQ ID NO: 21289 - DNA, 1041 bp, Rhizobium loti
  CDS (1)..(1041)
atgacgaaatacaagctcgagtacatttggctcgatggttacaccccggtccccaaccttcgcggcaagacgcagatcaaggaattcgccgaattcccgacgctcgaacagctgccgctgtggggcttcgacggttcctcgaccatgcaggccgaaggccgcagctccgattgcgtgttgaagccggtggcgctttacccggatccggcccgcaccaacggcattctcgtcatgtgcgaggtcatgatgcccgacggcgtcaccccgcatgaatcgaacagccgcgcgaccatcctcgacgacgaggacgcctggtttggtttcgagcaagagtacttcttctacaaggacggccgcccgctcggcttcccggagagcggttatcccgcgccgcagggcccttactacaccggcgtcggctacaagaacgtcggcgacgtcgcgcgcaagatcgtcgaagagcatctcgaccagtgcctcgcggccggcatcaaccatgaaggcatcaacgccgaagtggccaagggccagtgggaattccagattttcggcaagggctccaagaaggccgccgaccagatctggatggcgcgctacctgctcctgcgtctgaccgagacttacggcatcgacatcgagttccactgcaagccgctcggcgacaccgactggaacggctcgggcatgcactgcaatttctcgaccaagttcatgcgcgaagtcggcggcaaggcctatttcgaagccctgatggcgcagttcgacaaaaacctgatggaccacatcgccgtctacgggccggacaacgacaagcgcctgaccggcaagcacgagaccgcgccgtggaacaagtttagctatggcgtcgccgaccgtggcgcatcgatccgcgtgccgcactccttcgtcaagaatgactacaagggctatctggaagaccgtcgtccgaactcccagggcgacccctaccagatcgcttcgcaggtgctgaagacgatctcgcaggttgcgaccgacgcgaaggtctcggccgccgcctga

SEQ ID NO: 21290 - protein, 346 aa, Rhizobium loti
MTKYKLEYIWLDGYTPVPNLRGKTQIKEFAEFPTLEQLPLWGFDGSSTMQAEGRSSDCVLKPVALYPDPARTNGILVMCEVMMPDGVTPHESNSRATILDDEDAWFGFEQEYFFYKDGRPLGFPESGYPAPQGPYYTGVGYKNVGDVARKIVEEHLDQCLAAGINHEGINAEVAKGQWEFQIFGKGSKKAADQIWMARYLLLRLTETYGIDIEFHCKPLGDTDWNGSGMHCNFSTKFMREVGGKAYFEALMAQFDKNLMDHIAVYGPDNDKRLTGKHETAPWNKFSYGVADRGASIRVPHSFVKNDYKGYLEDRRPNSQGDPYQIASQVLKTISQVATDAKVSAAA

SEQ ID NO: 21291 - DNA, 1494 bp, Oryza sativa
  CDS (122)..(1234)
aattgatagcctgtgcgtctccaagaagaggcttgccgctgccgccattggagccctctcgtttctgctcgagctctgcatttcttcagtaggaggaggaggaggaagagttggagtcgccatgtcgtcgtccctgctcactgacctcgttaacctcgacctgtcggagagcacggacaaggtcatcgccgagtacatatgggttggtggtactgggatggatgtgaggagcaaagccagaacgttgtctggacctgttgatgacccaagcaagcttccaaagtggaactttgatggctccagcaccggtcaggctaccggtgacgacagtgaagtcatcctccaccctcaagccatcttcagagacccattcaggaaggggaagaacatcctggtcatgtgtgactgttatgcgccgaatggcgagccgattccgacgaacaaccggtacaatgcagcaaggatcttcagtcatcctgatgtcaaggctgaagagccatggtatgggattgagcaggagtacacccttcttcagaagcacatcaactggcctcttggctggccactaggtggctatccaggccctcagggtccgtactactgtgcggcgggagccgataaatcgtacgggcgcgacatcgttgatgcccactacaaggcctgcctgtttgccggcatcaacatcagcgggatcaacgcagaagtcatgccggggcagtgggagttccagattggccctgtcgttggcgtctccgcaggggatcatgtctgggtggcacgctacattcttgagaggatcactgagattgctggcgtcgtcgtgtccttcgaccccaagcccattccgggagactggaatggcgccggtgctcacaccaactacagcaccaagtcgatgaggagcaatggcggctacgaggtgatcaagaaagcgatcaagaagcttggcatgcgccaccgtgagcacatcgccgcctacggcgacggcaacgagcgccgcctcaccggccgccacgagaccgccgacatcaacaacttcgtctggggcgtagcgaaccgcggcgcgtcggtgcgtgtcggccgggacaccgagaaggacggcaaaggttacttcgaggacaggaggccggcgtccaacatggacccgtacctggtgaccgccatgatcgccgagaccaccatcctctgggagcccagccacggccacggccacggccaatccaacggcaagtgaggaggagtcgcctcgcccgggttgatgaactgctttctcgcgttctgggtttcatggaaatctgtgtgtgtgttctctgacgctggtgctgttagaaacttccaataattcagaaataactgcgatgtgctctcaaatttctcatgaggccatcacctgcagcatctcatgaaatagatctattgcaatgacaataccaatggcaacgcaaaattttatggtacctccagataccatctactctcctcaataatgacaat

SEQ ID NO: 21292 - protein, 370 aa, Oryza sativa
MSSSLLTDLVNLDLSESTDKVIAEYIWVGGTGMDVRSKARTLSGPVDDPSKLPKWNFDGSSTGQATGDDSEVILHPQAIFRDPFRKGKNILVMCDCYAPNGEPIPTNNRYNAARIFSHPDVKAEEPWYGIEQEYTLLQKHINWPLGWPLGGYPGPQGPYYCAAGADKSYGRDIVDAHYKACLFAGINISGINAEVMPGQWEFQIGPVVGVSAGDHVWVARYILERITEIAGVVVSFDPKPIPGDWNGAGAHTNYSTKSMRSNGGYEVIKKAIKKLGMRHREHIAAYGDGNERRLTGRHETADINNFVWGVANRGASVRVGRDTEKDGKGYFEDRRPASNMDPYLVTAMIAETTILWEPSHGHGHGQSNGK

SEQ ID NO: 21293 - DNA, 1296 bp, Beta vulgaris subsp
  CDS (1)..(1296)
atggctcaaatacttgcacctaacatgcaatgtcagatgaaactatcaaagagcttgacaaactcaatgataccaaactcttggacctccatattactgaaaggaagtcaaaagggatcaattaagtgctctacgaagtttaaagtatgtgccgctctcaagactgaacatggcactgtgaacaggatggagcaattactcaatttggatgtcactccatttactgacaagattattgcagaatacatttggattggaggatctgggattgatcttcgtagcaaatcgaggacactatcacgacctgttgaggacccatctgagcttcccaagtggaactatgatgggtcaagcacaggacaagcacctggagaagacagtgaagtaatcttatacccccaagcaatttttaaggatccattccgtggtggtaacaatattttggtaatatgtgacgcatacacaccagcaggtgagccgatcccaacgaataaacgacacaaagctgccgagatcttcagcaacccaaaggttgcttctgaggttccatggtttggaatagagcaagaatacacgctgcttcaaccaaatgttcaatggcccttgggatggcctgtcggagcctatcctggtccccagggaccatattactgtggtgttggtgctgataaatcgtttggacgtgacatatctgatgctcattataaagcttgcctgtatgctggaataaacataagtggcaccaacggggaggtcatgcctggccagtgggaatttcaggttggtcctagtgttgggattgaagctggagatcatatctggtgtgccagatatcttcttgagagaatcactgagcaagctggtgtagttttgacacttgatccgaagccaattgagggtgattggaacggcgcaggttgccataccaattacagtacaaagacaatgagagaagacggtggttttgaagtaataaagaaggccattttgaatctatcattacgccataaagaacatatcagtgcatatggagaagggaatgaaagaagactgacagggaagcatgagactgccgacatcgacacattctcttggggtgtcgccaatcgtggttgttcaatccgtgtgggtcgtgatacggagaaggaaggcaaaggttacatggaagacaggcgacctgcttcaaacatggacccttacgtggtaacaggtttgctagcagagtcaacactactttgggaacccacactcgaagctgaggcacttgcagctcaaagactctctctcaatgtgtaa

SEQ ID NO: 21294 - protein, 431 aa, Beta vulgaris subsp
MAQILAPNMQCQMKLSKSLTNSMIPNSWTSILLKGSQKGSIKCSTKFKVCAALKTEHGTVNRMEQLLNLDVTPFTDKIIAEYIWIGGSGIDLRSKSRTLSRPVEDPSELPKWNYDGSSTGQAPGEDSEVILYPQAIFKDPFRGGNNILVICDAYTPAGEPIPTNKRHKAAEIFSNPKVASEVPWFGIEQEYTLLQPNVQWPLGWPVGAYPGPQGPYYCGVGADKSFGRDISDAHYKACLYAGINISGTNGEVMPGQWEFQVGPSVGIEAGDHIWCARYLLERITEQAGVVLTLDPKPIEGDWNGAGCHTNYSTKTMREDGGFEVIKKAILNLSLRHKEHISAYGEGNERRLTGKHETADIDTFSWGVANRGCSIRVGRDTEKEGKGYMEDRRPASNMDPYVVTGLLAESTLLWEPTLEAEALAAQRLSLNV

SEQ ID NO: 21295 - DNA, 1071 bp, Beta vulgaris subsp
  CDS (1)..(1071)
atggctcttcttaacgatctaattaaccttaatctctcagaaacatctgacaagattattgctgagtatatatggatcggaggatctgggttggatatgagaagcaaagcaaggacattaacagggccaataagtgatcctgcaaaattaccaaaatggaattacgatggatcaagtactaatcaagctcctggtgaagatagtgaagtcattttataccctcaggctattttcaaggatccattcagaagaggagacaatatcctagttatgtgtgatgcatacaccccagctggagaaccaattccaacaaacaagaggtacaatgctgagaaaatcttcagccacccagacgttgtcgctgaggagccatggtatggaattgaacaagaatacacacttcttcagaaggatatcaactggcctcttggatggccaactggtggcttccctggtcctcagggaccatactattgtggtgtaggggctgataaatctttcgggcgagacattgtagatgctcactataaggcttgcatctatgctggtgtcaatatcagtggaattaatggtgaagtcatgccaggacagtgggaattccaagttggtcctactgttggaatttcatctggtgatcaagtctgggttgctagatacattcttgagagaattgctgagattgccggagttgttgtgtcttttgaccccaaaccagtgaagggtgattggaatggtgctggtgctcacaccaactacagcactaagtcgatgagggaagatggtgggatcaatgttataaaggctgccatcgagaagttgagtctccgtcacaaggagcacattgctgcctacggggagggcaacgagaggaggctcactggtcgtcatgagacagccgatatcaccactttctcctggggtgttgcaaataggggtgcctctgttcgtgttggccgtgacacagagaaagatggcaaaggttactttgaagacagaaggccagcatcaaacatggatccatatgtggttacctccatgattgctgaaacaactatcctcggaaagccttga

SEQ ID NO: 21296 - protein, 356 aa, Beta vulgaris subsp
MALLNDLINLNLSETSDKIIAEYIWIGGSGLDMRSKARTLTGPISDPAKLPKWNYDGSSTNQAPGEDSEVILYPQAIFKDPFRRGDNILVMCDAYTPAGEPIPTNKRYNAEKIFSHPDVVAEEPWYGIEQEYTLLQKDINWPLGWPTGGFPGPQGPYYCGVGADKSFGRDIVDAHYKACIYAGVNISGINGEVMPGQWEFQVGPTVGISSGDQVWVARYILERIAEIAGVVVSFDPKPVKGDWNGAGAHTNYSTKSMREDGGINVIKAAIEKLSLRHKEHIAAYGEGNERRLTGRHETADITTFSWGVANRGASVRVGRDTEKDGKGYFEDRRPASNMDPYVVTSMIAETTILGKP

SEQ ID NO: 21297 - DNA, 1374 bp, Avicennia marina
  CDS (65)..(1135)
gcccacgcgtccggccgaacacgggaaacacaaggagtgaaagagcagttgaaagttttccataatgtctctgctttcagatctcctcaacctcgacctctctgagaccactgagaagatcattgctgaatatgtttgggttggtggctccggtatggaccttaggagtaaagccaggactatttctggacccgttagcgatccttcaaagctgccaaaatggaactatgatggatctagcacaggccaagcccccggcgaagacagtgaagtgatcctatatccccaagcaattttcagagatcctttcaggaggggaaagaacatcctggtcatgtgtgatacttacaccccagctggcgaaccaattccaaccaacaagaggcacgctgcagccaaaattttcagccatcctgatgttgctgctgaagagccttggtatggaattgagcaagaatacactttgctgcaaaagaatgtcaagtggcccatgggatggcctactggaggttaccctggaccccagggcccatactactgtggagtcggagcagacaaagcttttggacgcgatattgtggatgcacattacaagtcttgcctttatgctggaatcaacatcagcggtattaatggggaagtgatgcctggacagtgggaattccaagttggacctgctgttggcatctcagctggtgatgagttgtggatggctcgttacattttggagaggatcacagaaattgctggggttgtgctgtcctttgatcccaagcctatccagggtgactggaatggggccggcgcccacactaattacagcaccaaatccatgaggaaggagggaggctttgaagttatcaagaaggcaattgagaagctcggacacaggcacaaagaacacattgctgcctatggcgagggcaacgagcgccgtctcactgggagacatgaaactgctgacatcaactccttcaaatggggggttgcgaaccgtggtgcatccgtccgtgttggtcgggacactgagagagaaggcaaggggtactttgaggacaggaggcctgcctcgaacatggacccttacattgtcacttccatgatagccgagaccaccatcttagggaagcactgagcttgtttggtgtcaactggtcttctgtgaagggagaaatggattgttatttagtataagatgaaggttgattgtttgctttagggaagcactgcatttgtttactatttgctggtttacttgttatgctatgacaacctctgcatttctggctgcaaggtttgagcttgtctcaaccttcttgattgagcctgcctaataatattgagatcataaataaaaaaaaaaaaaaaaaaaaa

SEQ ID NO: 21298 - protein, 356 aa, Avicennia marina
MSLLSDLLNLDLSETTEKIIAEYVWVGGSGMDLRSKARTISGPVSDPSKLPKWNYDGSSTGQAPGEDSEVILYPQAIFRDPFRRGKNILVMCDTYTPAGEPIPTNKRHAAAKIFSHPDVAAEEPWYGIEQEYTLLQKNVKWPMGWPTGGYPGPQGPYYCGVGADKAFGRDIVDAHYKSCLYAGINISGINGEVMPGQWEFQVGPAVGISAGDELWMARYILERITEIAGVVLSFDPKPIQGDWNGAGAHTNYSTKSMRKEGGFEVIKKAIEKLGHRHKEHIAAYGEGNERRLTGRHETADINSFKWGVANRGASVRVGRDTEREGKGYFEDRRPASNMDPYIVTSMIAETTILGKH

SEQ ID NO: 21299 - DNA, 1122 bp, Cricetulus griseus
  CDS (1)..(1122)
atggccacctcagcaagttcccacttgaacaaaggcatcaagcaaatgtacatgtccctgccccagggtgagaaagtccaagccatgtatatctgggttgatggtaccggagaaggactgcgctgcaaaacccgcaccctggactgtgagcccaagtgtgtagaagagttacctgagtggaattttgatggctctagtacctttcagtctgagagctccaacagtgacatgtatctcagccctgttgccatgtttcgggaccccttccgcaaagagcccaacaagctggtgttctgtgaagtcttcaagtacaaccagaagcctgcagagaccaatttaagacacacgtgtaaacggataatggacatggtgagcaaccagcacccctggtttggaatggaacaggagtatactctcttgggaacagatgggcacccttttggttggccttccgatggcttccctgggccccaaggtctgtattactgtggtgtgggcgcagacaaagcctatcgcagggatatcatggaggctcactaccgtgcctgcttgtatgctggggtcaagattacaggaacatatgctgaggtcaagcatgcccagtgggaattccaaataggaccctgtgaaggaatccgcatgggagatcatctctgggtggcccgtttcatcttgcatcgagtatgtaaagactttggagtaatagcaacctttgactccaagcccattcctgggaactggaatggtgcaggctgccataccaactttagtaccaagaccatgcgggaggagaatggtctgaagcacatcaaggaggccattgagaaactaagcaagcggcaccggtaccatattcgagcctacgatcccaagggggggctggacaatgcccgtcgtctgactgggttccacaaaacgtccaacatcaacgacttttcagctggcgtcgccgatcgcagtgccagcatccgcattccccggactgtcggccaggagaagaaaggttactttgaagcccgctgcccctctgccaattgtgacccctttgcagtgacagaagccatcgtccgcacatgccttctcaatgagactggcgaccagcccttccaatacaaaaactaa

SEQ ID NO: 21300 - protein, 373 aa, Cricetulus griseus
MATSASSHLNKGIKQMYMSLPQGEKVQAMYIWVDGTGEGLRCKTRTLDCEPKCVEELPEWNFDGSSTFQSESSNSDMYLSPVAMFRDPFRKEPNKLVFCEVFKYNQKPAETNLRHTCKRIMDMVSNQHPWFGMEQEYTLLGTDGHPFGWPSDGFPGPQGLYYCGVGADKAYRRDIMEAHYRACLYAGVKITGTYAEVKHAQWEFQIGPCEGIRMGDHLWVARFILHRVCKDFGVIATFDSKPIPGNWNGAGCHTNFSTKTMREENGLKHIKEAIEKLSKRHRYHIRAYDPKGGLDNARRLTGFHKTSNINDFSAGVADRSASIRIPRTVGQEKKGYFEARCPSANCDPFAVTEAIVRTCLLNETGDQPFQYKN

SEQ ID NO: 21301 - DNA, 1410 bp, Shewanella violacea
  CDS (1)..(1410)
atgtcagctgaatcagttttacaacaactcaaagaattagaagttaagtttgttgatctacgctttaccgatacccgtggtaaagaacagcacgtctcaatcccttcacatcaggtcgatgaagacttttttgaagacggcaagatgtttgatggttcatctattaatggttggaagggaatcaacgaatcagacatggtcttgatgccagatcctgcaagcttcgtactggatcctttcactgcagagacaacggccaacattcgttgtgacatccttaaccctggtactatgacaggttataaccgtgacccacgctctatcgccaagaaagccgaagagtacctacgttctaccggcatagcagatacagttttgctcggccctgaacctgagttcttcctgtttgatgacgttaaatatggcgccgatatgtcaggttgtttctacaaggtcgatgccgaagaagctgcctggaactcaggtaccagctatgaaggcggtaacaagggtcaccgtccaagcgttaaaggtggttacttccctgtagcaccggtcgactcttcacaagacatacgttcagccatgtgtctggttctagaagagatgggtcaggtcgttgaagcacatcaccacgaagtggcaactgccggtcaaaacgagatcgcgactcgcttcaacacactaacactcaaggccgatgaagttcaggtgcttaaatatgtcgttcataacgtagctcacgcttatggtaagacagctacctttatgcctaagcctatcgttggcgacaatggtagcggcatgcacgttcatatttcgctggccaaagatggcaccaacctattcgctggtgacaagtacggcggattgagcgagatggcaatctattttatcggtggagttatcaagcatgctcgcgccatcaacgccttctctaacccagccacaaactcgtacaagcgtctgatcccacatttcgaaacgcctgtaatgttggcatactctgcagctaaccgcagtgcttcgattcgtatacctttggttccaagccctaagggacgtcgtatcgaactaagattcggtgacccaatggctaacccatatttggcattctcggctatgctgatggctggcctagacggtatccagaacaagatccatccgggtgaagccatggacaaagatctatatgacctgcctcctgaagaggctgctgaaatcccaacagtggctacttcacttgagaatgcactggaatgtctggatgcagatcgtgaattcctgactcgcggcgaagtattcagcaacgatttcatcgattcatatatcacgctgaaatctgaagatgttgagcgtgttaatcagactactcaccctgtcgagttcgagctttattacagcttgtaa

SEQ ID NO: 21302 - protein, 469 aa, Shewanella violacea
MSAESVLQQLKELEVKFVDLRFTDTRGKEQHVSIPSHQVDEDFFEDGKMFDGSSINGWKGINESDMVLMPDPASFVLDPFTAETTANIRCDILNPGTMTGYNRDPRSIAKKAEEYLRSTGIADTVLLGPEPEFFLFDDVKYGADMSGCFYKVDAEEAAWNSGTSYEGGNKGHRPSVKGGYFPVAPVDSSQDIRSAMCLVLEEMGQVVEAHHHEVATAGQNEIATRFNTLTLKADEVQVLKYVVHNVAHAYGKTATFMPKPIVGDNGSGMHVHISLAKDGTNLFAGDKYGGLSEMAIYFIGGVIKHARAINAFSNPATNSYKRLIPHFETPVMLAYSAANRSASIRIPLVPSPKGRRIELRFGDPMANPYLAFSAMLMAGLDGIQNKIHPGEAMDKDLYDLPPEEAAEIPTVATSLENALECLDADREFLTRGEVFSNDFIDSYITLKSEDVERVNQTTHPVEFELYYSL

SEQ ID NO: 21303 - DNA, 1387 bp, Arabidopsis thaliana
  CDS (79)..(1149)
aaaatatcaaaacacgagacagatttgattccatttttattactgttactatcatccaaacccttggtatttgtagccatgagtcttgtttcagatctcatcaaccttaacctctcagactccactgacaaaatcattgctgaatacatatgggttggtggttctggaatggacatgagaagcaaagccaggactctacctggaccagtgactgacccttcgcagctaccaaagtggaactatgatggttcaagcacaggccaagctcctggtgaagacagtgaagtcatcttataccctcaagccatattcaaggatcctttccgtagaggaaacaacattcttgtcatgtgcgatgcgtacactcccgcgggtgaaccaatcccgactaacaaaagacacgctgcggctaaggtctttagcaaccctgatgttgcagctgaagtgccatggtatggtattgagcaagaatacactttactccagaaagatgtgaagtggcctgttggttggcctattggtggttatcccggccctcagggaccgtactattgcggtattggagcagacaaatcttttggcagagatgttgttgattctcactacaaggcctgcttatacgctgggatcaacattagtggcatcaatggagaagtcatgccgggtcagtgggagttccaggtcggtccagctgttggtatctcggctgctgatgaaatttgggtcgctcgttacattttggagaggatcacagagattgctggtgtagtggtatcttttgacccgaaaccgattcccggtgactggaacggtgctggtgctcactgcaactacagtaccaagtcaatgagggaagaaggcggttacgagatcatcaagaaagcaatcgataaattgggactgagacacaaagaacacattgctgcttacggtgaaggcaatgagcgtcgtctcacaggacaccacgagactgctgacatcaacactttcctttggggtgttgcgaaccgtggagcatcgatccgagtaggacgtgatacggagaaagaagggaaaggatactttgaggacaggaggccagcttcgaacatggatccttacattgtcacttccatgattgcagagactacaatcctctggaatccttgatgatcatcagatcaagaaaaaatcttgaatgtcactcaaatttgtgtttcttgcaagattcaaagtttgtgttctctatcaagcaatgtcttaggataagtcaaagatttgctctgcttattctgctttttatttacttcacatcctattgaaaacatttctgtgtattatttatgaataaacattatcttaaaagggctgatttatttactaatgcatgcattcaccacttaagatc

SEQ ID NO: 21304 - protein, 356 aa, Arabidopsis thaliana
MSLVSDLINLNLSDSTDKIIAEYIWVGGSGMDMRSKARTLPGPVTDPSQLPKWNYDGSSTGQAPGEDSEVILYPQAIFKDPFRRGNNILVMCDAYTPAGEPIPTNKRHAAAKVFSNPDVAAEVPWYGIEQEYTLLQKDVKWPVGWPIGGYPGPQGPYYCGIGADKSFGRDVVDSHYKACLYAGINISGINGEVMPGQWEFQVGPAVGISAADEIWVARYILERITEIAGVVVSFDPKPIPGDWNGAGAHCNYSTKSMREEGGYEIIKKAIDKLGLRHKEHIAAYGEGNERRLTGHHETADINTFLWGVANRGASIRVGRDTEKEGKGYFEDRRPASNMDPYIVTSMIAETTILWNP

SEQ ID NO: 21305 - DNA, 1269 bp, Arabidopsis thaliana
  CDS (44)..(1114)
accaaaaaaaaaaaggtttattattctttgagattcctaagatatgtcttcacttgcagatttaatcaatctcgatctctccgattccactgaccagatcatcgccgagtacatatggattggtggatcgggcttggatatgagaagcaaagcaaggactttgcctggaccagtgacggatccatcgcagttaccgaaatggaactacgacggttcaagcaccggccaagctccgggcgatgacagtgaagtcatcatctaccctcaagctatcttcaaagaccccttcagaagaggcaacaacatccttgtgatgtgtgacgcatatacaccggcaggagagccgattccgacgaacaaaaggcatgcggcggctaagatctttgaagaccctagtgttgtcgccgaagaaacatggtacggaattgaacaagagtataccttgttgcaaaaggatattaagtggccggtaggttggccggtcggcggtttcccaggtcctcagggaccgtactactgtggagttggagcagacaaagcctttggaagagacatcgttgattctcattacaaagcttgtctttacgccggaatcaatgtcagtgggactaacggcgaagttatgcctggccagtgggagttccaagtcggtcccaccgttggaatcgctgccgccgatcaggtctgggttgctcgttacattcttgagaggatcacagaattggctggagttgttctgtctctagaccctaaaccaattccgggagattggaatggtgcaggggcacacacaaattacagtacgaagtcgatgagagaagatggagggtacgaggtgataaagaaagcaatagagaagcttggattgcgtcacaaggaacacattgctgcttatggtgaaggcaacgagcgtcgtctcaccggaaaacatgaaaccgccgatatcaacactttcttatggggtgtggcaaaccgtggggcatcgattagggttgggcgtgacactgagcaggctggaaaaggatactttgaagatcgtaggccagcttcgaacatggatccttacactgtgacctccatgattgctgaatccacaatcctttggaaaccatgaaagaagaaaccttgagcctcaaggaatctctataatatcagttcatgttcattcttctatggtctctttctcattctgaaacagttctcatgtgttctttgtttattatgtttgatttgaagtcttcaatttgtttctgagaacgatagttcctc

SEQ ID NO: 21306 - protein, 356 aa, Arabidopsis thaliana
MSSLADLINLDLSDSTDQIIAEYIWIGGSGLDMRSKARTLPGPVTDPSQLPKWNYDGSSTGQAPGDDSEVIIYPQAIFKDPFRRGNNILVMCDAYTPAGEPIPTNKRHAAAKIFEDPSVVAEETWYGIEQEYTLLQKDIKWPVGWPVGGFPGPQGPYYCGVGADKAFGRDIVDSHYKACLYAGINVSGTNGEVMPGQWEFQVGPTVGIAAADQVWVARYILERITELAGVVLSLDPKPIPGDWNGAGAHTNYSTKSMREDGGYEVIKKAIEKLGLRHKEHIAAYGEGNERRLTGKHETADINTFLWGVANRGASIRVGRDTEQAGKGYFEDRRPASNMDPYTVTSMIAESTILWKP

SEQ ID NO: 21307 - DNA, 1403 bp, Glycine max
  CDS (60)..(1130)
tctaaaagagatctttttctgctctttgaagaaagaagggtctttgcttgattttggagatgtctctgctctcagatctcatcaaccttaacctctccgataccaccgagaaggtgatcgcagagtacatatggatcggtggatcaggaatggacctgaggagcaaagcaaggactctcccaggaccagttagcgacccttcagagcttcccaagtggaactatgatggttccagcacaggtcaagctcctggtgaagacagtgaagtgattttatacccacaagccattttcagggatccattcagaaggggtaacaatatcttggttatctgtgatgcctacactcctgctggagaacctattcccactaacaagaggcacgctgctgccaaggttttcagccatcctgatgttgttgctgaagtgccatggtacggtattgaacaagaatacaccttgttgcagaaagatatccaatggcctcttgggtggcctgttggtggtttccctggacctcagggtccatactactgtggtgttggcgctgacaaggcttttggccgtgacattgttgacgcacactacaaagcctgtatttatgctggcatcaacatcagtggaattaatggagaagtgatgcccggtcagtgggaattccaagttggaccttcagttggaatctcagctggtgatgagatttgggcagctcgttacatcttggagaggatcactgagattgctggtgtggtggtttcctttgaccccaagccaattaagggtgattggaatggtgctggtgctcacacaaactacagcaccaagtccatgagagaagatggtggctatgaagtgatcaaagcagcaattgacaagttggggaagaagcacaaggagcacattgctgcttatggagaaggcaacgaacgtcgtttgacaggacgccacgaaaccgctgacatcaacaccttcttatggggagttgcaaaccgtggagcttctgttagggttgggagagacacagagaaagcagggaagggatattttgaggacagaaggccagcttccaacatggacccatacgtggttacttccatgattgcagacacaaccattctgtggaagccatgagcaaaacctgcatgttttctccctttggatggaaaggaacagttatgcttttcttagtaggatttggtctctctctctttttaccttttgattggtactatggttggtgccttgttggttggtgcaactaactggcaagggttgttcattgttttcttctattcctttccctcgttttccgattgttacaatgacaataatttaatggttattatcagtcttgaacaaagaaatgctgattgtgaagtataataataatatatgaaattgccg

SEQ ID NO: 21308 - protein, 356 aa, Glycine max
MSLLSDLINLNLSDTTEKVIAEYIWIGGSGMDLRSKARTLPGPVSDPSELPKWNYDGSSTGQAPGEDSEVILYPQAIFRDPFRRGNNILVICDAYTPAGEPIPTNKRHAAAKVFSHPDVVAEVPWYGIEQEYTLLQKDIQWPLGWPVGGFPGPQGPYYCGVGADKAFGRDIVDAHYKACIYAGINISGINGEVMPGQWEFQVGPSVGISAGDEIWAARYILERITEIAGVVVSFDPKPIKGDWNGAGAHTNYSTKSMREDGGYEVIKAAIDKLGKKHKEHIAAYGEGNERRLTGRHETADINTFLWGVANRGASVRVGRDTEKAGKGYFEDRRPASNMDPYVVTSMIADTTILWKP

SEQ ID NO: 21309 - DNA, 1044 bp, Arabidopsis thaliana
  CDS (1)..(1044)
atgacgtctcctctctcagatctcctaaaccttgatctatcagacaccaagaaaatcatcgctgaatacatatggatcggtggctctggaatggatattagaagcaaagccaggacattaccaggaccagtaagtaatccaacaaagcttccaaaatggaactacgatggatctagcaccgatcaagctgccggagatgatagtgaagcaatatttaaggacccattcaggaaggggaacaacattctggtgatgtgtgatgcttacagaccggccggagatccaattccgaccaacaataggcacaaggccgtaaaaatcttcgatcatcccaatgtgaaggctgaagagccttggtttgggatagagcaagaatacacattacttaaaaaagatgtgaagtggccactaggttggcctcttggtggctttcctggtcctcagggaccgtactattgtgcagtaggtgcagacaaagcttttggtcgtgacattgtcgatgctcactataaagcttgtctatactccggtttgagtattggtggtgccaatggtgaagtcatgcctggacaatgggagtttcaaatcagtcctactgttggtattggtgcaggtgatcaattatgggttgctcgttacattcttgagaggattactgagatatgcggtgtgattgtctcattcgatccaaaaccaatccagggtgattggaatggagcagccgctcatacgaacttcagtacaaaatcgatgaggaaagatggaggactggatttgattaaggaagcaataaagaagcttgaagtgaaacacaaacaacacattgctgcttatggtgaaggcaacgagaggcgtctcactgggaagcatgaaactgcagacatcaacactttctcttggggagtggcggatcgtggagcatcggtgagagtaggaagagatacggagaaagaaggtaaagggtattttgaagatcgaaggccttcgtctaatatggatccttacctagttacctccatgattgctgaaaccaccatcctctaa

SEQ ID NO: 21310 - protein, 347 aa, Arabidopsis thaliana
MTSPLSDLLNLDLSDTKKIIAEYIWIGGSGMDIRSKARTLPGPVSNPTKLPKWNYDGSSTDQAAGDDSEAIFKDPFRKGNNILVMCDAYRPAGDPIPTNNRHKAVKIFDHPNVKAEEPWFGIEQEYTLLKKDVKWPLGWPLGGFPGPQGPYYCAVGADKAFGRDIVDAHYKACLYSGLSIGGANGEVMPGQWEFQISPTVGIGAGDQLWVARYILERITEICGVIVSFDPKPIQGDWNGAAAHTNFSTKSMRKDGGLDLIKEAIKKLEVKHKQHIAAYGEGNERRLTGKHETADINTFSWGVADRGASVRVGRDTEKEGKGYFEDRRPSSNMDPYLVTSMIAETTIL

SEQ ID NO: 21311 - DNA, 1122 bp, Acomys cahirinus
  CDS (1)..(1122)
atggccacctcagcaagttcccacttgaacaaaggcatcaagcaaatgtacatgtccctgcctcagggtgagaaagtccaagccatgtatatctgggttgatggtaccggagaaggactgcgctgcaagacccgcacgctggactgtgagcccaagtgtgtagaggagttacctgagtggaattttgacggctcgagcacctttcagtctgaaggatccaacagtgacatgtatctcagccctgtcgccatgtttcgggaccccttccgcaaagaacccaacaagctggtgttctgtgaagttttcaagtataaccggaagcctgcagagaccaatctaaggcacagctgtaagcggataatggacatggtgagcaaccagcacccctggtttggaatggaacaggaatatactctcatgggaacagatgggcacccttttggctggccttccaatggcttccctgggccccaaggtccatattactgtggagtaggagcagacaaagcctatggcagagacatcgtggaggctcactaccgagcctgcttgtatgcaggagtcaagatcacagggacaaacgctgaggtcatgccagcccagtgggagttccaaataggaccctgtgaaggaatccgcatgggagaccatctctgggtggcccgcttcatcttgcatcgtgtgtgtgaagacttcggggtgatagcaacctttgaccccaaacccattcctggcaactggaacggtgctggctgtcataccaacttcagcaccaaggccatgcgtgaggagaacggtctcaagtatattgaggaagccattgacaaactaagcaagaggcaccagtaccacattcgcgcctacgatcccaaggggggcctggacaacgcccggcgtctgactggattccatgaaacctccaacatcaacgacttttctgctggcgttgccaaccgcggtgccagcatccgcattccccggactgtcggccaggagaagaggggttactttgaagaccggcgcccttctgccaattgtgacccctatgcggtgacagaagccatcgtgcgcacgtgtcttctcaacgagaccggcaacgagcccttccagtacaaaaactaa

SEQ ID NO: 21312 - protein, 373 aa, Acomys cahirinus
MATSASSHLNKGIKQMYMSLPQGEKVQAMYIWVDGTGEGLRCKTRTLDCEPKCVEELPEWNFDGSSTFQSEGSNSDMYLSPVAMFRDPFRKEPNKLVFCEVFKYNRKPAETNLRHSCKRIMDMVSNQHPWFGMEQEYTLMGTDGHPFGWPSNGFPGPQGPYYCGVGADKAYGRDIVEAHYRACLYAGVKITGTNAEVMPAQWEFQIGPCEGIRMGDHLWVARFILHRVCEDFGVIATFDPKPIPGNWNGAGCHTNFSTKAMREENGLKYIEEAIDKLSKRHQYHIRAYDPKGGLDNARRLTGFHETSNINDFSAGVANRGASIRIPRTVGQEKRGYFEDRRPSANCDPYAVTEAIVRTCLLNETGNEPFQYKN

SEQ ID NO: 21313 - DNA, 1577 bp, Canavalia lineata
  CDS (91)..(1383)
gacacacacagacacaaccgcattttcacttcaacttctctgctttacccatttttctactctctattgtaaagagcagaagtgcagaacatggcacaaattttggcaccctctacgcaatggcagatgagaatcacgaaaacatcacccaatgcaagtcccgtcacatcaaacatgtggagttctttgttgatgaaacaaaataagaaagctacaagttctgctaaatttagagtgctggcaatcaagtctgaaaatggcaccatcaacaggctggaaaatctacttgatttggacatcaccccatacactgacaagataattgctgagtacatttgggttgggggaacaggaattgatgtgcgcagtaaatcaagaacaatagcgaggccagttgaacatccctctgagctccctaaatggaattatgatggatctagcactggacaggcaccgggtgatgatagtgaagtaatcttatatcctcaagcaattttcaaagatcctttccgtggtggtaacaatattttggtcatttgtgatgcttacacgccagcaggtgagcctatccctacaaacaagcgacacagagctgctgaaattttcagtaacccaaaggtccaagccgaagttccatggtatggaattgaacaagagtacaccttacttcaaacaaatgtgaattggcctttaggttggcctgttggtggctatcctggtcctcagggtccttattactgcagtgctggggcagataagtcattcggacgtgatatatctgatgcacattacaaggcttgcttatatgctggaattaacatcagtggcaccaatggggaggttatgcctgggcagtgggagtttcaagttggtcctagtgtaggcattgaagctggtgatcatatctgggctgcgaggtacattcttgagagaattactgaacaagctggcgttgtgctctcactcgatccaaaaccaattcagggtgattggaatggtgcaggatgccacactaattatagtacaaagagcatgagggaagagggaggctttgaggtaataaagaaggccattttgaatctatcactccgtcactcggatcacattagggcatatggtgaaggaaatgagagaaggttgacaggaaagcatgagacagccgacattaacacattttcttggggagtggctaaccgcggttgctcaatccgtgtgggaagagacacagagaagaatggcaaaggttacttggaagacaggcgtccggcttcaaacatggatccatacgttgtgacatcattactggcggagactacactattgtgggaaccaactctagaggctgaagctcttgcagcacagaagatagcgttgaaggtctaaatctattgattggtggcattctggatggaatcggtagtctgtgggagctgttctttcactttccttttagattatttatattctaaagatcttgtttggactaaagaggttgtcatgcccagttattggttaccatatgaaatgcacatttgatatcagaagtttcgatggttaaaaaaaaaaaaaaaaaaaaa

SEQ ID NO: 21314 - protein, 430 aa, Canavalia lineata
MAQILAPSTQWQMRITKTSPNASPVTSNMWSSLLMKQNKKATSSAKFRVLAIKSENGTINRLENLLDLDITPYTDKIIAEYIWVGGTGIDVRSKSRTIARPVEHPSELPKWNYDGSSTGQAPGDDSEVILYPQAIFKDPFRGGNNILVICDAYTPAGEPIPTNKRHRAAEIFSNPKVQAEVPWYGIEQEYTLLQTNVNWPLGWPVGGYPGPQGPYYCSAGADKSFGRDISDAHYKACLYAGINISGTNGEVMPGQWEFQVGPSVGIEAGDHIWAARYILERITEQAGVVLSLDPKPIQGDWNGAGCHTNYSTKSMREEGGFEVIKKAILNLSLRHSDHIRAYGEGNERRLTGKHETADINTFSWGVANRGCSIRVGRDTEKNGKGYLEDRRPASNMDPYVVTSLLAETTLLWEPTLEAEALAAQKIALKV

SEQ ID NO: 21315 - DNA, 1666 bp, Juglans nigra
  CDS (96)..(1394)
aagaagccaactgggtcatcactctccctctgtatatcttcacccaaggtaattccggcaaaacccaccggccatccgccgttcctgagctgaaaatggcacatatcttgacacccactacgcgatggcagatgagaatcacaaagaattctgcaaatgcgagtcctatgacagcaaagatgtggggttctctgttgttgaaacaaaacaagaaagggtcatctaagagctcagctaagtttcgggtttttgccacgaagtcggagaacagcactgtcaacagaatagaaaaactactaaatttggacctcactccatatactgacaaaatcattgctgaatatatttggattggagggtccggaattgatctgcgtagcaagtcaaggacaatttccaagcctgttgaacatccatctgagcttcctaagtggaattatgatggatcaagtactggtcaagctccgggtgaagatagtgaagtaattctataccctcaagcgatctttaaggacccttttcgtggtggtaacaacatcttggtaatttgtgatacatacacaccagcaggtgagcctatcccaacaaacaaacgccacagggctgctgagatcttcactaacaagaaggtcgcagatgaagttccctggtatggaatagagcaagagtacaccttactacaacaaaatgtgaaatggccattaggttggcctgttggaggctatcctggtcctcagggtccttactactgtggtgctggggcagacaaatcatttggccgtgacatttcagacgcccattacaaagcttgcttatatgccggaattaacatcagtggtacaaatggggaggttatgcctggccagtgggagtatcaagttggacctagtgtgggaattgaagctggagatcatatatggtgttccagatacattcttgagagaattactgaacaagctggtgttgttctctcactcgatccaaaaccaatagagggtgatcggaacggtgcaggatgccacacaaattacagtacaaagagcatgagggaggatggaggctttgaagttataaagaaggcaattttgaatctgtcacttcgccataaagatcatatcagtgcctatggagaaggaaatgagagaaggttgacaggaaagcatgaaacagccagcattaacacattttcttggggagtggctaatcgtggatgctccatccgtgttggacgtgaaactgagaagcaaggcaaagggtacttggaagatcggcgtccagcttcaaacatggacccttatattgtgacctcgctactggctgaaactacaatattatgggaaccaacactggaggctgaagctctagctgctcagaagctggcactgaatgtttaaagttgattggttcaacgtaatctgaaggcattcgggagtggattcacagggaattagttaatcctcatgcagtgaacctttttcccttctagattggttagagcagatttattgtaaattagggatcttggagtgaggggtcgtacatgcccaggcatgtagaattgcagatggaatacttcttatgcaccatcataaatagatttgttagattatatatatgcatgttacttgggatgtatgcttctcaaaaaaaaaaaaaaaaaaaaaaa

SEQ ID NO: 21316 - protein, 432 aa, Juglans nigra
MAHILTPTTRWQMRITKNSANASPMTAKMWGSLLLKQNKKGSSKSSAKFRVFATKSENSTVNRIEKLLNLDLTPYTDKIIAEYIWIGGSGIDLRSKSRTISKPVEHPSELPKWNYDGSSTGQAPGEDSEVILYPQAIFKDPFRGGNNILVICDTYTPAGEPIPTNKRHRAAEIFTNKKVADEVPWYGIEQEYTLLQQNVKWPLGWPVGGYPGPQGPYYCGAGADKSFGRDISDAHYKACLYAGINISGTNGEVMPGQWEYQVGPSVGIEAGDHIWCSRYILERITEQAGVVLSLDPKPIEGDRNGAGCHTNYSTKSMREDGGFEVIKKAILNLSLRHKDHISAYGEGNERRLTGKHETASINTFSWGVANRGCSIRVGRETEKQGKGYLEDRRPASNMDPYIVTSLLAETTILWEPTLEAEALAAQKLALNV

SEQ ID NO: 21317 - DNA, 1590 bp, Nicotiana sylvestris
  CDS (67)..(1365)
ttcatattctctctcttcaacatatttttccagcatagcattaccaagttagttggttaggtgaagatggctcagatcttggctccatcaggagaatggcagatgagaatgacaaagagctcaacagatgctaatcccttgacttcaaagatgtggagttctgtggtgttgaagataataaaagaacttgctgttaaaagctctgccaaatttagattctttgctctggaatctgatagtggcactgtgaaccagagtgaacagctgctaaacttggacgtaactccatacactgacaagatcattgctgaatatatttggatcggaggatcaggaattgacatgcgcagtaaatcaaggactatttcaaagccagtcaagcatgcttctgagctcccaaagtggaactacgatggatcaagtactggacaagcacctggagaagacagtgaagtcattctataccctcaggcaatatttaaagaccctttccgtggtggtaacaacatcttggttatctgtgatgcctacacaccagctggagagccaattccatcaaacaaacgccataaagctgctcagatttttagcgactcaaaagttgtatctgaagttccatggttcgaaatagaacaagagtacaccttactccaacaaaatgtgaagtggcctttaggttggcctgttggaggctatcctggtactcagggtccttactacttgtgtgctggagcggataagtcatttggccttgatatatcagatgctcactacaaggcttgtctgtatgctggaattaacattagtggtactaacggagaggttatgccaggacagtgggaatttcaggtaggtcctagtgttgggattgaagctggagatcacatctggtgcgccagatacatccttgagagaattactggacaagcaggagttgttctctcacttgatccaaaaccaattgagggcgactggaatggtgccggatgccacactaactacagtacactaagtatgagagaagatggaggatttgaagtaataaagaaagcaaatctgaatctctcccttcgccacaaggagcatataaatgcatatggagagggaatcctcgagaagttgactggaaaccatgaaactgcaagcattgacaaattttcatggggagttgcattccgtggtgcctcaatccgtgtgggcgctgacactgagaagcaaggcaaaggttatttggaagaccgccgtccagcttcaaacatggacccctatgttgtgactggattacttgccgaaactactattctgtgggagccaaccaatgaggctgaagctcttgctgctcaaaagctcgcactgaaggtatgatgttttaattatttaagggcagattgatccataatcttcttagagttcatgatctgctaagtgaagaaacttgtaccttgtttagattgggttttagggaaaatcttgtaaaggaaccacaatttatcagttattcctataaaagaggttccttaagacaatgagactgtaattgttggaactactttgaacatatttatctttctttctccagatgaaaaaaaa

SEQ ID NO: 21318 - protein, 432 aa, Nicotiana sylvestris
MAQILAPSGEWQMRMTKSSTDANPLTSKMWSSVVLKIIKELAVKSSAKFRFFALESDSGTVNQSEQLLNLDVTPYTDKIIAEYIWIGGSGIDMRSKSRTISKPVKHASELPKWNYDGSSTGQAPGEDSEVILYPQAIFKDPFRGGNNILVICDAYTPAGEPIPSNKRHKAAQIFSDSKVVSEVPWFEIEQEYTLLQQNVKWPLGWPVGGYPGTQGPYYLCAGADKSFGLDISDAHYKACLYAGINISGTNGEVMPGQWEFQVGPSVGIEAGDHIWCARYILERITGQAGVVLSLDPKPIEGDWNGAGCHTNYSTLSMREDGGFEVIKKANLNLSLRHKEHINAYGEGILEKLTGNHETASIDKFSWGVAFRGASIRVGADTEKQGKGYLEDRRPASNMDPYVVTGLLAETTILWEPTNEAEALAAQKLALKV

SEQ ID NO: 21319 - DNA, 1345 bp, Canavalia lineata
  CDS (83)..(1150)
gctaaaccctgcttattactctatactctccatcatcatttgcttctctcaccacagtgttcttcttcagcacaaccagtccatgtctttagtctcagatctcatcaacctcaatctttcagaatctactgagaagattattgctgagtacatatgggttggtggatctggtatggacctaagaagtaaagccaggactcttcctggaccagtgagtgatccttctaaacttccaaagtggaactatgatgggtcaagcacagatcaagctcctggggatgacagtgaagtcattttatatccacaagctattttcaaggacccatttaggagaggcaataatattcttgtgatttgtgatgtttacaccccagctggagaaccacttccaacaaacaagaggcatgatgctgccaaaatcttcactcaccctgatgttgttgctgaggagccatggtatggtattgagcaagagtataccttgttgcagaaagatgtgaattggccacttgggtggccacttggtgggtatcctgggccacagggaccctactactgtggagttggtgctgataaagcctatggtcgtgatattgtagatgcacattacaaagcttgtgtttatgcaggaattaacatcagtggcatcaatggagaggttatgcctggccagtgggaattccaagtgggtccttctgttggaatctctgctggagatgagctatgggctgctcgttacattttggagaggattactgagatagctggagcagttgtttcatttgatcctaaaccaattccgggagattggaatggagctggtgctcacacaaactatagcaccaagtctatgagagatgagggaggttatgaggttattaagaaagccattgaaaaacttggattgaagcacaaagagcacattgcagcatatggaaaaggcaatagacgtctcactggaagacatgaaacagcagacatcaacaccttctcttggggtgtggcaaaccgtggaagctccattagagttggaagagacacagaaaaggagggtaaaggttactttgaggacagaaggcctgcttctaatatggatccctatgtggtaacctccatgattgcagagaccaccatcctctggaagccatgaaatcatagaccaccaccatcaattatgtgtgttccattgcattttaatcaacaacttatatctccaaggtgttattttgctgagtggtcttttcaaccaaagtatttccctatgtcctttgtatggttcaacactaattttctcattaataataataataataataattgcttcttgaaaaaaaaaaaaaaaaaa

SEQ ID NO: 21320 - protein, 355 aa, Canavalia lineata
MSLVSDLINLNLSESTEKIIAEYIWVGGSGMDLRSKARTLPGPVSDPSKLPKWNYDGSSTDQAPGDDSEVILYPQAIFKDPFRRGNNILVICDVYTPAGEPLPTNKRHDAAKIFTHPDVVAEEPWYGIEQEYTLLQKDVNWPLGWPLGGYPGPQGPYYCGVGADKAYGRDIVDAHYKACVYAGINISGINGEVMPGQWEFQVGPSVGISAGDELWAARYILERITEIAGAVVSFDPKPIPGDWNGAGAHTNYSTKSMRDEGGYEVIKKAIEKLGLKHKEHIAAYGKGNRRLTGRHETADINTFSWGVANRGSSIRVGRDTEKEGKGYFEDRRPASNMDPYVVTSMIAETTILWKP

SEQ ID NO: 21321 - DNA, 1668 bp, Opsanus beta
  CDS (1)..(1185)
atgagagtcagggttggaagactctttctacaacttcctcgtttgtccaggtgtgttacagcagcaaaaatggccacatcagccagcgccagcttgagtaaagctgtcaagaagcattacatgggactccctcagggggataaagtccaagctatgtacatttggattgatggaacaggggagggactcagatgtaaaaccagaacgctggattctgaacccaaaagcattgaagatcttccggaatggaactttgacggttccagcacgtaccaggctgagggctccaacagcgacatgtacttggttcccgctgccatgttccgtgatccctttcgcgaagatcccaacaagcttgtcctttgtgaagtgctgaagtacaaccgcaaaccatcagaatccaatcttcggttgaactgtaacaaggtgatgaacatggtcaaggaccagcatccttggtttggcatggagcaagagtacaccattcttggcacagatggacatcctttcggctggccatctaatggatttcccggaccacaaggtccatattactgtggtgtgggagcagacaaggcctacggcagagacatagtggaggcccattacagagcctgtctctatgctggagtccagatttgtggcacaaatgcagaagtaatgcctgcacagtgggagtttcaggtaggaccttgtgagggtatcaacatgggcgatcatttctgggcggcacgtttcatcctgcaccgtgtctgtgaggatttgggcgtggtcgcttcatttgaccctaagcccatccccggaaactggaacggtgctggctgccatacaaacttcagcacgaaagagatgagggaagacggcggattaaaagccattgaagatgcgattgagaagctcgggaagaggcaccactaccacattcgtgcctatgaccccaaaggggggctggacaacgcccgccgtctcaccggccaccacgaaacctcaaacatccacgagttctctgcaggtgtggccaaccgcggcgccagcattcgcattccccgtagtgtcggccaggagaagaagggctactttgaggaccgccgaccgtctgccaactgtgacccgtacggcgtaacggaggccctgatccgcacgtgtttgctgagcgaggaaggagatgaacctttagcttactgaatcccactcccctcctgacattcttttctttaaactagtacattgtttctgttctcctactgagatgatttaacctgcattttaatggtttaaaagttggctggtcaacttaaaacaaggcggtcttgtccttggtagtggtgagctggtaatagcagggtatgttccgcttgccttctgacgggactggccttttgtaacactgtatatagtctgtgtcctggcatttccttttttgttttttttggtctgtcggtgactaaaatgagctgatgcgtagcggtgctaaggctggacagtaactttaaaaacaaacaaaaagaaaatcatgatgtacaggttaatttctaaacttgccttttcatctctccagtcttcagtgttactaattcgttgatcacgactttatgttttttaaatggcaatgtttgtattccgattttgacacactgggtcatcttgtttggtggacatttgtaccca

SEQ ID NO: 21322 - protein, 394 aa, Opsanus beta
MRVRVGRLFLQLPRLSRCVTAAKMATSASASLSKAVKKHYMGLPQGDKVQAMYIWIDGTGEGLRCKTRTLDSEPKSIEDLPEWNFDGSSTYQAEGSNSDMYLVPAAMFRDPFREDPNKLVLCEVLKYNRKPSESNLRLNCNKVMNMVKDQHPWFGMEQEYTILGTDGHPFGWPSNGFPGPQGPYYCGVGADKAYGRDIVEAHYRACLYAGVQICGTNAEVMPAQWEFQVGPCEGINMGDHFWAARFILHRVCEDLGVVASFDPKPIPGNWNGAGCHTNFSTKEMREDGGLKAIEDAIEKLGKRHHYHIRAYDPKGGLDNARRLTGHHETSNIHEFSAGVANRGASIRIPRSVGQEKKGYFEDRRPSANCDPYGVTEALIRTCLLSEEGDEPLAY

SEQ ID NO: 21323 - DNA, 1032 bp, Streptomyces coelicolor
  CDS (1)..(1032)
atgaccttcaaggccgagtacatctggatcgacggcaccgagccgacggccaagctccgttccaagacgaagatcatcacggctgcccccgcgggtctggacgccctgccggtctggggcttcgacggctcctccaccaaccaggccgagggcagctcctcggactgcgtgctcaagccggtcttctcctgccccgacccgatccgcggaggcgaggacatcctggtgctgtgcgaggtcctggacacggacatgacgccgcacccgagcaacacccgtgccgcgctggccgagctgtccgagcgcttcgccgcgcaggagccggtcttcggcatcgagcaggagtacaccttcttcaagggcacccgcccgctcggcttccccgagggcggcttcccggccgcgcagggcggctactactgcggcgtgggctcggacgagatcttcggccgcgacgtcgtcgaggcgcacctggagaactgcctgaaggccggactcggcatctccggcatcaacgccgaggtcatgcccggccagtgggagttccaggtcggcccgctggcgccgctggaggtctccgaccagctgtgggtggcccgctggctgctctaccgcaccgcggaggacttcgaggtctccgccaccctcgaccccaagccggtcaagggcgactggaacggcgcgggcgcgcacaccaacttctccaccaaggcgatgcgcgagggttacgacgcgatcatcacggccgccgagtccctcggtgagggctccaagccgatggaccacgtcaagaactacggcgccggcatcgacgaccgactcaccggcctgcacgagaccgccccgtggaacgagtactcctacggcgtctccgaccgcggcgcctcggtgcgcatcccgtggcaggtcgagaaggacggcaagggctacatcgaggaccgccgtcccaacgccaacgtggacccgtacgtcgtgacgcgcctgctcgtcgacacctgctgcacggcgctggagaaggccggccaggtctga

SEQ ID NO: 21324 - protein, 343 aa, Streptomyces coelicolor
MTFKAEYIWIDGTEPTAKLRSKTKIITAAPAGLDALPVWGFDGSSTNQAEGSSSDCVLKPVFSCPDPIRGGEDILVLCEVLDTDMTPHPSNTRAALAELSERFAAQEPVFGIEQEYTFFKGTRPLGFPEGGFPAAQGGYYCGVGSDEIFGRDVVEAHLENCLKAGLGISGINAEVMPGQWEFQVGPLAPLEVSDQLWVARWLLYRTAEDFEVSATLDPKPVKGDWNGAGAHTNFSTKAMREGYDAIITAAESLGEGSKPMDHVKNYGAGIDDRLTGLHETAPWNEYSYGVSDRGASVRIPWQVEKDGKGYIEDRRPNANVDPYVVTRLLVDTCCTALEKAGQV

SEQ ID NO: 21325 - DNA, 1579 bp, Mesembryanthemum crystallinum
  misc_feature (1405)..(1405): n is a, c, g, or t
  CDS (88)..(1389)
ctctctttctctctcctcctcttcttcagttccgcagctttgtcttcaacggctccgatccggcaacagagaaacaagtagccaaacatggcgcaaatacttgcaccaagcttgcaagtgaagatgagcatcacaaaaagctcaacccctgcaagctcaatgttgccaaacacatggacctctgtagtgttgaagcagagccgaaaaggatcgatcaagaactcgaccaaatttaaagtctgtgcttctattaagccagatgtaagtgttcagaacagggtggagcagctactcaatttggatgtcactcctttcactgacaagatcattgctgaatacatttggatcggaggagctggcattgatctccgtagcaaatcaaggacactctcgaaacctgttgagcacccatctgagcttcccaagtggaattatgatgggtctagcacagggcaggctccaggagaagacagtgaagtcatcttatacccacaagcaatttttaaggacccgttccgtggtggtaacaatatcttggtaatttgtgatgcatacacgccagcaggcgagccaattccgactaacaaaagacacaaggctgccgagatctttagcaatccaaaggtcgtttctgaggttccatggtatgggatagagcaagagtacacgttgatgcaaccgaatgtcaagtggcccttgggttggcctgttggagcctatcctggtcctcagggtccatactactgtggtgttggtgctgataaatcctttgggcgtgacatatccgatgcccattacaaagcatgcttgtatgctggaattaacataagtggcaccaatggggaggttatgcctggccagtgggaattccaagtgggtccaagtgtcggaattgaagctggagatcacgtctggtgtgccagatatattcttgagagaatcactgagcaagttggtgtagttctcacccttgatccaaaaccaattgagggtgattggaacggtgcagggtgtcataccaattacagtacaaagagcatgagagaagaaggtggtttcgaagtaattaagaaggcaattttaaacctttcattgcgccacaaagatcatatcagcgcatatggagaagggaatgaaagaaggttgacagggaagcatgaaactgccagtatcgactctttctcttggggagtcgctaatcgtggttgctcaatccgtgtgggtcgtgatacagagaaggcaggaaaaggatacttggaagataggcgaccggcttcaaacatggacccatacgtggtaacaggcttgctagcagagaccacattactttgggagccaacattagaggctgaggcacttgcagctcagaaaattgcaatgaaagtttaaaaattcttgtagatcnaacctgaaaacattggaaagggcctatatggcacttactgttgacttaacaattttatgttctgtccttagtattatgcatttgggacttgggagtgtggactgcatttttttttttgttttccaattgttggttatgaatattttgaaataaaagaattagttacttcaagcc

SEQ ID NO: 21326 - protein, 433 aa, Mesembryanthemum crystallinum
MAQILAPSLQVKMSITKSSTPASSMLPNTWTSVVLKQSRKGSIKNSTKFKVCASIKPDVSVQNRVEQLLNLDVTPFTDKIIAEYIWIGGAGIDLRSKSRTLSKPVEHPSELPKWNYDGSSTGQAPGEDSEVILYPQAIFKDPFRGGNNILVICDAYTPAGEPIPTNKRHKAAEIFSNPKVVSEVPWYGIEQEYTLMQPNVKWPLGWPVGAYPGPQGPYYCGVGADKSFGRDISDAHYKACLYAGINISGTNGEVMPGQWEFQVGPSVGIEAGDHVWCARYILERITEQVGVVLTLDPKPIEGDWNGAGCHTNYSTKSMREEGGFEVIKKAILNLSLRHKDHISAYGEGNERRLTGKHETASIDSFSWGVANRGCSIRVGRDTEKAGKGYLEDRRPASNMDPYVVTGLLAETTLLWEPTLEAEALAAQKIAMKV

SEQ ID NO: 21327 - DNA, 1410 bp, Enterobacter gergoviae
  CDS (1)..(1410)
atgtccgctgaacacgttttgacgatgctgaacgagcacgaagtgaagtttgtcgatctgcgcttcaccgataccaaaggtaaagaacagcacgtcacgattccgtctcatcaggtaaatgccgaattcttcgaagaaggcaaaatgtttgatggctcctcgatcggtggctggaaaggtatcaacgaatctgacatggtcctgatgccggacgcttccaccgcggtcattgacccgttctacgaagaaccgaccctgatcatccgctgcgatatcctcgagccaggcaccctgcagggctatgaccgtgacccgcgctccatcgcgaaacgcgctgaagagtacctgcgcgccaccggcatcgctgacaccgtcctgttcgggccagaaacagaattcttcctgttcgacgacatccgttttggcgcctctatctccggctcccatgtcgcgatcgatgacatcgaaggtgcgtggaactcctccaccaaatacgaaggcggtaacaaaggtcaccgtccgggcgtgaaagggggttacttcccggttccgccagtagactcttctcaggatatccgttccaccatgtgtatgatcatggaagagatgggcctggttgttgaagctcaccaccacgaagtggctaccgcaggtcagaacgaagtggcaacccgcttcaacaccatgaccaaaaaagcggacgaaattcagatttacaaatacgttgttcacaacgtcgctcaccgcttcggtaaaaccgcgacctttatgccgaaaccaatgttcggcgataacggttccggcatgcactgccatatgtctctggcgaaaaacgggactaacctgttctccggcgacaaatacgcaggtctgtctgagcaggcgctgttctacatcggcggcgtaatcaaacacgctaaagctatcaacgccctggcgaacccgaccaccaactcctacaagcgtctggtcccgggttacgaagcgccggttatgctggcttactctgcgcgtaaccgctctgcctccatccgtattccggtggtgacctctccgaaagcgcgtcgtatcgaagtgcgcttcccggacccggctgccaacccgtacctgtgctttgcggcgctgctgatggctggccttgatggtatcaagaacaaaatccatccgggcgaagcaatggacaaaaacctgtatgacctgccgccggaagaagcgaaagagatcccgcaggttgcaggctctctggaagaagccctgcaggctctggatgctgaccgtgagttcctgacggctggcggcgtgttcaccaatgacgctatcgatgcttatatcgccctgcgtctggaagagaacgaccgcgtacgcatgactccgcatccggttgagttcgaactgtactacagcgtctaa

SEQ ID NO: 21328 - protein, 469 aa, Enterobacter gergoviae
MSAEHVLTMLNEHEVKFVDLRFTDTKGKEQHVTIPSHQVNAEFFEEGKMFDGSSIGGWKGINESDMVLMPDASTAVIDPFYEEPTLIIRCDILEPGTLQGYDRDPRSIAKRAEEYLRATGIADTVLFGPETEFFLFDDIRFGASISGSHVAIDDIEGAWNSSTKYEGGNKGHRPGVKGGYFPVPPVDSSQDIRSTMCMIMEEMGLVVEAHHHEVATAGQNEVATRFNTMTKKADEIQIYKYVVHNVAHRFGKTATFMPKPMFGDNGSGMHCHMSLAKNGTNLFSGDKYAGLSEQALFYIGGVIKHAKAINALANPTTNSYKRLVPGYEAPVMLAYSARNRSASIRIPVVTSPKARRIEVRFPDPAANPYLCFAALLMAGLDGIKNKIHPGEAMDKNLYDLPPEEAKEIPQVAGSLEEALQALDADREFLTAGGVFTNDAIDAYIALRLEENDRVRMTPHPVEFELYYSV

SEQ ID NO: 21329 - DNA, 1451 bp, Pinus sylvestris
  CDS (78)..(1145)
ggaattcggcacgagggccttcactgcttgcgaaattatacttgtgcgggagtctgtgattttgttgtacatccaagatgtctctactgacggatttgatcaacttggacctctctgatatcactgagaagataatcgctgagtacatatggatcggaggctctggcatggatatccgcagcaaggccaggaccttatctcacccagttacggaccccaaagatctacccaagttgaattatgatggatccagtactggacaggctcctggaaaggacagtgaagtcatcctttaccctcaggctatcttcagggatccattccgcagggggaacaacatcttggtgatttgtgatacatataccccagctggagaacctattcctactaacaagagagcaaatgcgcaaaaatatttagccatccagatgttgtttgccgaggaaccatggtatgggattgaacaagaatacactcttctgcaaaaggatgtgaattggcctcttggatggcccgtaggtggttaccctggtcctcagggtccttattattgtggaacgggagcagacaaagcctacggccgtgatatcgtcgatgcccactataaggcttgcctgtatgcaggaatcaacattagtggcatcaatggagaagtcatgcccggtcaatgggaatttcaagttggcccgacggttggtatttcatctggtgatcaagtctgggctgcacgttaccttcttgagagaatcacagaagtggctggtgttgtcctctcatttgaccccaaacccattcagggtgattggaatggtgctggtgctcacactaactacagtacgaaatcaatgagggaagaagggggaattaaagtgataaaaaaggccattgaaaagttagggttgaggcataaggaacacattgctgcctatggagagggcaacgagaggcgtttgactggccgacatgagacagcagacataaacacattttcatggggagttgcaaatcgtggagcttctattcgagttggccgtgacacggaacgtgaaggcaaagggtacttcgaagaccgcaggccagcttccaacatggacccctatattgtaacatctatgattgctgagaccaaccatcctttgaagtgagagtaacattgattactcaatgaataaagatgccgatacgattgaagtgttcttgatgctagtcaaattgcgaggggatccccaattgtttgtgggggatattctcatttgaatctctctgtgcctaaagtatttcccctatttctgttaataagaacattctagaaataggacttgagatttagggtgcattatattcagtgtctagtttgtcattcagatttgcattattccatgactctgatatgattggtgtgcaattgaatttaatgaattcagaagttcttttattgcttgcgaaaaaaa

SEQ ID NO: 21330 - protein, 355 aa, Pinus sylvestris
MSLLTDLINLDLSDITEKIIAEYIWIGGSGMDIRSKARTLSHPVTDPKDLPKLNYDGSSTGQAPGKDSEVILYPQAIFRDPFRRGNNILVICDTYTPAGEPIPTNKRANAQKYLAIQMLFAEEPWYGIEQEYTLLQKDVNWPLGWPVGGYPGPQGPYYCGTGADKAYGRDIVDAHYKACLYAGINISGINGEVMPGQWEFQVGPTVGISSGDQVWAARYLLERITEVAGVVLSFDPKPIQGDWNGAGAHTNYSTKSMREEGGIKVIKKAIEKLGLRHKEHIAAYGEGNERRLTGRHETADINTFSWGVANRGASIRVGRDTEREGKGYFEDRRPASNMDPYIVTSMIAETNHPLK

SEQ ID NO: 21331 - DNA, 1346 bp, Alnus glutinosa
  CDS (50)..(1120)
ccgagattcacttcaaagtctctgctttgtgtttgtgtttcttctcaacatgtcgctgctttcagatctcatcaaccttaacctctcggacgctactgataaagtgattgcagagtacatatggatcggtggatctggtacggacctcagaagcaaagctaggacgcttactggaccagtcaatcatccttcaaagcttcccaagtggaattatgatggttccagtacaggtcaagctcctggtgaagacagtgaagtgatctatatcctcaggcaatttttcaaggatccattcaggagaggcaacaatattctagtcatctgtgatacttacactccggcgggagagccaattccaacaaacaagagacatggtgctgcaaagatattcagccatcctgaagttgttgctgaagtaccctggtacggtattgagcaggagtacaccttgttgcagaaagatgtcaaatggcctcttgggtggcctgttggtggttatcctggtcctcagggaccatactactgtggtattggtgctgacaaagcctggggccgtgatatagttgatgctcattacaaggcttgtctatatgcaggcatcaacattagtggcatcaatggagaagtgatgccaggccagtgggaattccaagttggtccttctgttggcatctctgctggagatgaggtgtgggctgctcgatacattttggagaggattacagagattgctggggtggtgctcagccttgatcccaagccaatccagggtgattggaatggagctggtgctcacacaaactacagtaccaagtccatgagaaacaatggaggctatgagatcatcaagaaagcaattgagaagctagggctgaggcacaaagagcacattgcagcatatggggaaggcaatgagcgccgtctcactggccgacatgaaacagctgacatcaacactttcaaatggggtgttgccaaccgtggggcatctatccgtgttggcagagacacagaaaaagaaggcaaaggctattttgaggacaggaggcctgcttctaacatggatccatatgtggtcacttccatgatcgcggaaaccaccctcctgtggaagccatgagtgccagctacgcccgcctttgggaacattgtcattgtcttttcatgaagataaaagcaacgtgtcatttgtgtaaccattgtgctttccattagagtagctttgtcctgttatttctgtctcatttgccctttttatatgaggtggtagcaattcatgatactgcctcatgtgttaaataatgggttttgtataaactacaaaatgaaagggttggctattttgt

SEQ ID NO: 21332 - protein, 356 aa, Alnus glutinosa
MSLLSDLINLNLSDATDKVIAEYIWIGGSGTDLRSKARTLTGPVNHPSKLPKWNYDGSSTGQAPGEDSEVIYILRQFFKDPFRRGNNILVICDTYTPAGEPIPTNKRHGAAKIFSHPEVVAEVPWYGIEQEYTLLQKDVKWPLGWPVGGYPGPQGPYYCGIGADKAWGRDIVDAHYKACLYAGINISGINGEVMPGQWEFQVGPSVGISAGDEVWAARYILERITEIAGVVLSLDPKPIQGDWNGAGAHTNYSTKSMRNNGGYEIIKKAIEKLGLRHKEHIAAYGEGNERRLTGRHETADINTFKWGVANRGASIRVGRDTEKEGKGYFEDRRPASNMDPYVVTSMIAETTLLWKP

SEQ ID NO: 21333 - DNA, 1821 bp, Drosophila melanogaster
  CDS (148)..(1257)
gcttagtcgtgttccagtaacgcttccgcgcacaccaaatccaattcagtaccaaaatcggaatcagcgccaggacacagcacacagccgtcgtcccgccatcaattacatcgtcagtccaatcagaagtgcattgaaaaaatcagtatgtccgctaggatcctggaggactcgcccaacgcgcgcatcaacaagacgatcctcgatcgctatctttcactgccgctgcaggagaacatcgttcaggccacctacgtgtggatcgatggcaccggcgaggatttgcgctgcaaggatcgcaccctcgacttcattccccagagtcccaaggagctacccgtttggaactacgatggaagctcgtgctaccaggccgagggatccaactcggacacctacctgtatccggtggccatctacaaggacccgttccggcgcggcaacaacatcctggtgatgtgcgacacctacaagttcgacggcacccccacggacaccaacaagcgcaagacctgcctggaggtggccaacaagtgcgccgcagaggagccctggttcggtattgagcaggagtacaccttcctcgactttgatggccatccattgggctggcccaagaacggtttccccggaccccagggaccctactattgcggcgttggtgccaacaaggtctacgcccgcgacattgtggatgcccactatcgcgcctgtctgtacgccggcatcaaggtgtccggcaccaatgccgaggtgatgcccgcccagtgggagttccaggtgggaccctgcgagggcatctccattggtgatgatctctggatggcccgtttcctcttgcatcgcatctccgaggagtttggcattgtgtccactctggatcccaagccgatgcctggcgattggaacggtgctggtgcccacaccaatgtgtcgacgaaggcaatgcgcgaagatggcggcattcgggacattgagaaggcggtggccaagctgtccaagtgccacgagaggcacattcgcgcctacgatcccaagcagggacaggacaatgcccgtcgtctgaccggaaagcacgagacgagctccatcaacgatttcagtgccggcgtggccaatcgcggatgcagcatacgcattcctcgcggcgtcaatgatgatggcaagggctatttcgaggatcgccgccccagctccaactgcgatccctactccgtggtggaggccatcttgcgcaccatctgcctggacgaataggacgggatgggatatgcctatctcccgaattgttgttatcgatttatagcttgttgttaaaccaccttttgatccactgatccaatgacccacgaacaacccgatcaactgaacaccgaacgcgaagttatttgcataacgtaggcttagtttttacctaacgtatttcccataaaccagaactagaaacctaaggcagccccctcctcttgctgatattttcaaagttttttttttcttttttttgtagctgctgttacttaggttttagtatgagttttttttttttgtttgttgaccaatcaaatatatagtaatgtggtcagcgtaatgacgatgaaatgaagaggagcaagaacccaaaaaagacatccccacgaagaagaagaaaaaaaaagataacataaagctctagtatcaaacaattccttgagaccccgcaaaaaaaagaaaacccagccccctacttgttaatgatattaaataattaactttaatcctaaactacatacatatactctctagttaagtaaatgcactaaaaaataaaaaaaaatacacaat

SEQ ID NO: 21334 - protein, 369 aa, Drosophila melanogaster
MSARILEDSPNARINKTILDRYLSLPLQENIVQATYVWIDGTGEDLRCKDRTLDFIPQSPKELPVWNYDGSSCYQAEGSNSDTYLYPVAIYKDPFRRGNNILVMCDTYKFDGTPTDTNKRKTCLEVANKCAAEEPWFGIEQEYTFLDFDGHPLGWPKNGFPGPQGPYYCGVGANKVYARDIVDAHYRACLYAGIKVSGTNAEVMPAQWEFQVGPCEGISIGDDLWMARFLLHRISEEFGIVSTLDPKPMPGDWNGAGAHTNVSTKAMREDGGIRDIEKAVAKLSKCHERHIRAYDPKQGQDNARRLTGKHETSSINDFSAGVANRGCSIRIPRGVNDDGKGYFEDRRPSSNCDPYSVVEAILRTICLDE

SEQ ID NO: 21335 - DNA, 1595 bp, Medicago sativa
  CDS (88)..(1374)
gttcagtgacacaaggctcattttcattcacttgaacccatttccaaagtttgcagctttttgccatttttcaactctgtattgaacatggcacagattttggctccttctatacaatgtcagacaagaatcacaaaaacatctccccttgcaactccgatctcatcaaagatgtggagttctttggttatgaaacaaaacaagaaagttgcacgttctgctaaattcagagtaatggcaatcaactctggcaccatcaacagggttgaggatttacttaatttggacatcactccattcactgacagcataattgctgagtacatctggattggtggaacaggaatcgatgtgcgcagtaaatcaagaaccatatcaaagcctgttgagcatccctctgagcttcctaagtggaactatgacggatctagcactggacaagcccctggtgaagatagtgaagtgatcctctatcctcaagccattttcaaagatcctttccgcggtggtaacaacattttggtcatttgcgatgcttatacaccacaaggtgagcctatccctacaaataagagacataaagctgctgaaatcttcagtaacccaaaggttgaggctgaaattccgtggtatggaatcgaacaagagtacaccttacttcaaacagatgtgaaatggccattaggttggcctgttggtggctatcctggtcctcagggtccttattactgcgccgccggggcagataagtcatttggtcgtgatatatctgatgctcattacaaggcttgcttatatgctggaattaacatcagtggtaccaatggagaggttatgcctggccagtgggagtatcaagttggtcctagtgtaggtattgaagctggtgatcatatctgggcttcaaggtacatccttgagagaattactgaacaagctggtgttgtgctcacccttgatccaaaaccaattgagggtgattggaatggtgcaggatgtcacaccaattacagtacaaagagcatgagggaagatggaggatttgaggtaataaagaaggcaattttgaacctttcccttcgccacaaggttcacattgaagcatatggagaaggaaatgagagaaggttgacaggaaagcatgagactgccagcatcaacacattttcttggggagtggctaaccgtggatgctcaatccgtgtgggaagagacaccgagaagaatggcaaaggttacttggaagacaggcgtccggcttcaaacatggatccatatgtggtgacagccttattggcagagagtacattattgtgggaaccaactctagaggctgaagctcttgcagctcagaagattgcattgaaagtctaaatctattgattaatggaatcagcactgctgcagtttgtgaggtgctgggaagctctttcattttccatttagatttattatattatgaagatattgtttggacaaatgaggctgccatgcctagtcattggttatgagatgaatgcacattgtatatcagatatttcgttggctgtgtttgcatgtggtatggacagagttgcattgatgctttttttgtt

SEQ ID NO: 21336 - protein, 428 aa, Medicago sativa
MAQILAPSIQCQTRITKTSPLATPISSKMWSSLVMKQNKKVARSAKFRVMAINSGTINRVEDLLNLDITPFTDSIIAEYIWIGGTGIDVRSKSRTISKPVEHPSELPKWNYDGSSTGQAPGEDSEVILYPQAIFKDPFRGGNNILVICDAYTPQGEPIPTNKRHKAAEIFSNPKVEAEIPWYGIEQEYTLLQTDVKWPLGWPVGGYPGPQGPYYCAAGADKSFGRDISDAHYKACLYAGINISGTNGEVMPGQWEYQVGPSVGIEAGDHIWASRYILERITEQAGVVLTLDPKPIEGDWNGAGCHTNYSTKSMREDGGFEVIKKAILNLSLRHKVHIEAYGEGNERRLTGKHETASINTFSWGVANRGCSIRVGRDTEKNGKGYLEDRRPASNMDPYVVTALLAESTLLWEPTLEAEALAAQKIALKV

SEQ ID NO: 21337 - DNA, 1071 bp, Glycine max
  CDS (1)..(1071)
atgtcgttgctctccgatcttatcaaccttaacctctccgacatcaccgataaagtgatcgccgagtacatatgggtaggtggatctggcatggatatgaggagcaaagcaaggacactctcaggaccggttaaagacccttcgaagcttcccaagtggaactatgatggttccagcactggtcaagctcctgggcaagatagtgaagtgatcttatatccacaagcaattttcaaggatccattcaggaggggtagcaatatcctggttatgtgtgatgcttacactcctgctggggaacccattcctacaaacaagagaaataatgctgcaaagatattcggccatcctgatgttgctgctgaagaaccctggtatggcctagagcaagaatacaccttgttgcaaaaagatgtccaatggcctctaggatggcctcttggtggttttcctgggccacaaggaccatattattgtggtactggtgctaacaaggctttcgggcgtgatattgttgactcacattacaaagcatgtatttatgcgggcattaacatcagtggaatcaatggagaagtgatgcctggtcagtgggaattccaagttggtccatcaattggcatctctgctgctgacgaattgtgggttgctcgttatattttggagaggatcaccgagattgcaggagtggtgctttcctttgaccctaaaccaattcagggtgattggaatggtgctggtgctcacacaaattacagtaccaagtccatgagaaacgatggtggctatgaagtcatcaaaaaagcaattgctaagttggaaaagagacacaaggagcacattgcagcttacggagagggcaacgaacgccgtttgactggacgacacgagacagctgacatgaacacctttgtatggggtgttgcaaaccgtggtgcttctattagagtagggagggacactgagaaggcagggaaggggtattttgaggataggaggcctgcctctaatatggacccttatgtggtcacttccatgattgctgagacaaccattctttggaaaccataa

SEQ ID NO: 21338 - protein, 356 aa, Glycine max
MSLLSDLINLNLSDITDKVIAEYIWVGGSGMDMRSKARTLSGPVKDPSKLPKWNYDGSSTGQAPGQDSEVILYPQAIFKDPFRRGSNILVMCDAYTPAGEPIPTNKRNNAAKIFGHPDVAAEEPWYGLEQEYTLLQKDVQWPLGWPLGGFPGPQGPYYCGTGANKAFGRDIVDSHYKACIYAGINISGINGEVMPGQWEFQVGPSIGISAADELWVARYILERITEIAGVVLSFDPKPIQGDWNGAGAHTNYSTKSMRNDGGYEVIKKAIAKLEKRHKEHIAAYGEGNERRLTGRHETADMNTFVWGVANRGASIRVGRDTEKAGKGYFEDRRPASNMDPYVVTSMIAETTILWKP

SEQ ID NO: 21339 - DNA, 1372 bp, Medicago sativa
  CDS (92)..(1162)
ggcacgagtagagattcctgtgtagctatttgtctattacttgcttttcacacactgtgtttttcttcttcttccttcactgttcatcgtcatgtctttgctttcagatctcatcaacctcaatctctcagaatcctccgaaaagattattgctgaatacatatgggttggtggatctggtatggaccttagaagcaaagccaggactcttcctggtccagtgagtgaccctgcaaaactgcctaagtggaactatgatggatcaagcacaaatcaagctccaggacaagatagtgaagttatcttatatccacaagctattttcaaggatccatttagacaaggcaacaatattcttgtgatttgtgatgtttacaccccagctggtgaaccactcccaacaaacaagaggcacaatgctgccaaaattttcagtcaccctgatgttgctgctgaggtaccatggtatggtattgagcaagagtatacattattgcagaaagatactaattggccactaggatggcctattggtggctttccaggaccacaaggtccatattattgtgggattggtgctgataaagcatatggtcgtgatattgttgatgcacattacaaagcttgtctttatgctggcattaacattagtggcatcaatggagaggttatgcctggccagtgggagttccaagttggcccttctgttggtatttctgctggagatgaaatatgggctgctcgttacattctagagaggatcacagagatagctggagtggttgtttcatttgaccctaagccaattccgggtgattggaatggagctggtgctcacacaaactatagcaccaagtcaatgagagaggatggaggctatgaaatcatcaagaaggccattgaaaagcttggattgaggcataaggagcacattgctgcttatggggaaggaaatgagagacgtctcactggaaaacatgaaacaacagacatcaacaccttttcttggggtgtggcaaaccgtggtgcctcagttagggttggaagagacacagaaaaagatggcaaaggttactttgaggacagaaggccttcttctaatatggatccctatgtggtcacttccatgattgctgaaaccacccttctatggaaaccatgaagtcacaaccacttgtctttggatttggaccacatcacattatgtgttcaataaatagtctagtttatatctattattatcctgcaaagtgttgcttcattagtagtaattgtccaagtggtctttaagcacaaagcatttagtccatgtatttggatgacaataattttatcattaataacatggttgcttcttgattttactctaata

SEQ ID NO: 21340 - protein, 356 aa, Medicago sativa
MSLLSDLINLNLSESSEKIIAEYIWVGGSGMDLRSKARTLPGPVSDPAKLPKWNYDGSSTNQAPGQDSEVILYPQAIFKDPFRQGNNILVICDVYTPAGEPLPTNKRHNAAKIFSHPDVAAEVPWYGIEQEYTLLQKDTNWPLGWPIGGFPGPQGPYYCGIGADKAYGRDIVDAHYKACLYAGINISGINGEVMPGQWEFQVGPSVGISAGDEIWAARYILERITEIAGVVVSFDPKPIPGDWNGAGAHTNYSTKSMREDGGYEIIKKAIEKLGLRHKEHIAAYGEGNERRLTGKHETTDINTFSWGVANRGASVRVGRDTEKDGKGYFEDRRPSSNMDPYVVTSMIAETTLLWKP

SEQ ID NO: 21341 - DNA, 1065 bp, Agaricus bisporus
  CDS (1)..(1065)
atggccaacacctaccacaacgaccttcttgccccctacctcagcctcgatcaaggcgacaagatccaagcagagtacgtctggatcgacggtgacggtggcctccgctgcaagaccactaccgttagcaagaaggttaccgacatcggccaactccgcatttgggacttcgatggttcttccacaaatcaagcccccggtcacgattccgatgtctacctccgtcccgccgccatcttcaaagaccctttccgtggcggcgacaacatccttgttctcgcagagacctacaacaacgacggcactccaaaccgcaccaaccatcgccatcatgccaagaaggtctttgatgaagccaaggaacacgagccatggtttggtctcgaacaggaatatacccttttcgatgccgacgatcaaccatacggttggccaaaaggcggtttccccggccctcaaggtccctactactgcggtgctggcaccggcaaagtctttgcgcgtgacctcattgaggcacactatcgtgcctgcctctatgctggtatcaacatcagcggtatcaatgctgaagtgatgccttctcaatgggagttccaagtgggaccgtgtgaaggcatttctatgggcgaccacctttggatggcccggtatcttcttgttcgcatcgctgagcagtggggcgtcaaggtttccttccaccccaaacctctcaagggcgaatggaacggtgctggctgccacaccaacttctctaccaaggccatgcgggaagccggaggtatgaagttcatcgaagacgctatcgaaaaactcgccaaacgacatgatgaacatattgctgtttacggggaggacaatgacctccgactcactggtcgccacgagaccggtcacatcagcaatttcagctccggtgtagctaaccgcggtgcttcaattcgtgttccacgacatgttgcctctcagggctatggttatctcgaggatcgtcgccccgcgtccaatattgatccctatcgcgtcacgagcatcatcgccgaaaccaccatcctcgataaataa

SEQ ID NO: 21342 - protein, 354 aa, Agaricus bisporus
MANTYHNDLLAPYLSLDQGDKIQAEYVWIDGDGGLRCKTTTVSKKVTDIGQLRIWDFDGSSTNQAPGHDSDVYLRPAAIFKDPFRGGDNILVLAETYNNDGTPNRTNHRHHAKKVFDEAKEHEPWFGLEQEYTLFDADDQPYGWPKGGFPGPQGPYYCGAGTGKVFARDLIEAHYRACLYAGINISGINAEVMPSQWEFQVGPCEGISMGDHLWMARYLLVRIAEQWGVKVSFHPKPLKGEWNGAGCHTNFSTKAMREAGGMKFIEDAIEKLAKRHDEHIAVYGEDNDLRLTGRHETGHISNFSSGVANRGASIRVPRHVASQGYGYLEDRRPASNIDPYRVTSIIAETTILDK

SEQ ID NO: 21343 - DNA, 1245 bp, Amanita muscaria
  CDS (96)..(1160)
atatttgcgctccttatcgtccaatgagattcgttcaaatagatgtcaacattcttcctttatctattttactcggcgcttccaacttgtccgtcatggctaaccagtaccacaacgatctcctcgctccctacctcgctctcgaccaaggcggcaaattccacgctgaatatgtctggattgacggcgatggtggtctccgttcaaagactactactgtcgaccagaaggtgacagatatcagccaacttcgtgtttgggatttcgatggctcttccacaaaccaagccccttctggtaattccgatgtatatctccgcccgtctgccatctttaaagaccccttccggggcggagaaaacatcctcgttctttccgaaacctacaacaacgacggtactcctaacaggacaaaccaccgccaccacactgccaaggttatggagctggccaaggacgagataccatggtttggtattgagcaggaatatacccttttcgacgcagacggttcaccttacggatggccaaaaggcggtttccctggaccccagggtccctactactgcggtgcaggcaccggtaaagtctttgctcgtgacctcatcgaggctcattatcgcgcatgtctatatgcgggtgtcaacatcagcggcatcaacgcagaggttatgccatcacaatgggagttccaggtcgggccatgtgagggtatttccatgggcgaccatctgtggatggctcgttacttgcttatccgcgtcgcggagcaatggggcgtcaaggtttctttccaccctaaaccccttcaaggagattggaacggtgctggtgctcacaccaactactctacattagctatgcgcgagcctggtggtatgaagtacatcgaggctgcgattgaaaagttggccaagagacacgacgaacacatcgcggtttatggtgaagataacgaaatgcgtctcaccggccgccacgagacaggccacattggcactttctcgtctggcgtagccaaccgtggtgcttccattcgtgtaccaaggcatgttgctaacaaaggatatggatacctcgaagatagacgccctgcttccaacattgacccttaccgtgtaaccggcatcatcatagagacgactatccttgacaaatagattaaatccagtgtgtatctgtagattgatatgtaggcaaaattaaaggacggacttgttgaatcacaaaaaaaaaaaaaaaaaa

SEQ ID NO: 21344 - protein, 354 aa, Amanita muscaria
MANQYHNDLLAPYLALDQGGKFHAEYVWIDGDGGLRSKTTTVDQKVTDISQLRVWDFDGSSTNQAPSGNSDVYLRPSAIFKDPFRGGENILVLSETYNNDGTPNRTNHRHHTAKVMELAKDEIPWFGIEQEYTLFDADGSPYGWPKGGFPGPQGPYYCGAGTGKVFARDLIEAHYRACLYAGVNISGINAEVMPSQWEFQVGPCEGISMGDHLWMARYLLIRVAEQWGVKVSFHPKPLQGDWNGAGAHTNYSTLAMREPGGMKYIEAAIEKLAKRHDEHIAVYGEDNEMRLTGRHETGHIGTFSSGVANRGASIRVPRHVANKGYGYLEDRRPASNIDPYRVTGIIIETTILDK

SEQ ID NO: 21345 - DNA, 1110 bp, Ashbya gossypii
  CDS (1)..(1110)
atgagcgagctagtagagaagacatcgacgttgctgaaatacctcgatttggaccagcgcggggcggtgatcgcggagtacatctgggtcgactcggccgggcacttgcggtcgaaggggcgcacgttgcagcggcgcgtggagagcgtggacgagttgccggagtggaacttcgacgggtcgtcgacggggcaggcgcctgggcacgactcggacgtgtacttgaagccggtggccttctacccggacccgttccggcgcggggacaacatcatcgtgttggcggagtgctggaacaacgacggcacgccgaacaagtacaaccaccggcacgaggcggcgaagctctttgaggcgcacagggcggcggacatctggtttgggctcgagcaggagtacacgttgttcgaccacaacgacaacgtgtacgggtggcccaagggcggcttccccgcgccgcagggcccctactactgcggcgtgggcgcgggcaaggtgtacgcgcgcgacgtggtcgaggcgcactaccgcgcgtgcctctacgcgggccttcgcatctcgggcatcaacgccgaggtgatgccctcgcagtgggagttccaggtcgggccgtgcacgggcatcaccatgggcgacgagctctgggtggggcgctacttgctccaccgcgtcgccgaggagttcggcgtgaaggtctccttccaccccaagcccttgaagggcgattggaacggcgcgggctgccacaccaacgtgtccacgagggagatgcgccagcccggcggcatgcgctacatcgaggaggccatcgacaagttgtccaagcgccacaaggagcacatcaagctctacggctccgacaacgagctccgcctcaccggccgccacgagaccgcctccatggccaccttctcgtccggcgtggccaaccgcggcgcgtccatccgcattccgcgctccgtcagcaaggagggcttcggctacttcgaggatcgccggcccgcctccaacatcgacccttacttggttaccggcataatatgcgagaccatctgcggtgccattgagaatgcagatatgtccaaggagttcgagcgtgaatcttcttga

SEQ ID NO: 21346 - protein, 369 aa, Ashbya gossypii
MSELVEKTSTLLKYLDLDQRGAVIAEYIWVDSAGHLRSKGRTLQRRVESVDELPEWNFDGSSTGQAPGHDSDVYLKPVAFYPDPFRRGDNIIVLAECWNNDGTPNKYNHRHEAAKLFEAHRAADIWFGLEQEYTLFDHNDNVYGWPKGGFPAPQGPYYCGVGAGKVYARDVVEAHYRACLYAGLRISGINAEVMPSQWEFQVGPCTGITMGDELWVGRYLLHRVAEEFGVKVSFHPKPLKGDWNGAGCHTNVSTREMRQPGGMRYIEEAIDKLSKRHKEHIKLYGSDNELRLTGRHETASMATFSSGVANRGASIRIPRSVSKEGFGYFEDRRPASNIDPYLVTGIICETICGAIENADMSKEFERESS

SEQ ID NO: 21347 - DNA, 1119 bp, Candida glabrata
  CDS (1)..(1119)
atgcatgaacacagtgttgaaaagactcaaatcttacaaaaataccttgagttgccccaaaacggtaaggtcatcgccgagtacgtctgggttgacggtactggtaacctacgttccaaggctagaactttgaacaaagtcataacgtctattgagcaactgccggagtggaactttgacggttcttctactaaccaagccccaggctacgactcagacatctacttgaagccagtggcgttctaccctgatccattcagaagaggtgacaacatcactgtcttggctgaatgtttcaacagtgacggtactccaaacaagttcaaccacagacatgaggctaacaagttgttccaagcacacaaggacgaagagatctggttcggtatcgagcaagaatacactttgttcgacatgtacgacaacgtctacgcttggccaaagggtggttacccagccccacaaggtccatactactgtggtgttggtgccggtaaggtctacgccagagatgtgatcgaagcccactacagagcctgtctatacgctggtatcaacatctcaggtatcaacgccgaagtgatgccttcccaatgggaattccaagttggtccatgtgagggtatctccatgggtgaccaattgtggatggccagatacttcttgcacagagtggcagaagaattcggtgtcaagatttccttccatccaaagcctttgaagggtgactggaatggtgctggttgccatactaacgtctctacaaaggacatgagagtgccaggtggtatgaagtacatcgaacaagccatcgaaaaactttcaaagagacacaacgaacacatcaagctatatggtgccgacaacgaacaaagactaacgggtagacacgaaaccgcctccatgacatccttctccagtggtgtcgctaacagaggtgcttccatcagaatacctagaccagtcgccaaggaaggattcggttacttcgaagaccgtagaccagcctccaacatagatccatacttggtcaccggtatcatgtgtgagactgtttgtggtgccatcgaaaacgccaacatgtccaaggaatacgaaagagaaactaacgaacaataa

SEQ ID NO: 21348 - protein, 372 aa, Candida glabrata
MHEHSVEKTQILQKYLELPQNGKVIAEYVWVDGTGNLRSKARTLNKVITSIEQLPEWNFDGSSTNQAPGYDSDIYLKPVAFYPDPFRRGDNITVLAECFNSDGTPNKFNHRHEANKLFQAHKDEEIWFGIEQEYTLFDMYDNVYAWPKGGYPAPQGPYYCGVGAGKVYARDVIEAHYRACLYAGINISGINAEVMPSQWEFQVGPCEGISMGDQLWMARYFLHRVAEEFGVKISFHPKPLKGDWNGAGCHTNVSTKDMRVPGGMKYIEQAIEKLSKRHNEHIKLYGADNEQRLTGRHETASMTSFSSGVANRGASIRIPRPVAKEGFGYFEDRRPASNIDPYLVTGIMCETVCGAIENANMSKEYERETNEQ

SEQ ID NO: 21349 - DNA, 1083 bp, Colletotrichum gloeosporioides
  CDS (1)..(1083)
atggcgacagaagctgccgtggtttccaaccccaacaccctggccaagtacctgaagcttgaccagaagggctcgatcatggccgagtacatctggatcgatgctgatggcgagacccgctccaagtcaaggacactcaaggagaaggagtacactcccgaagaccttcctatgtggaacttcgacggttcctccaccggccaggcccccggtgacaactctgacgtctacctgaagcccgttgccgtcttccccgaccccttccgtggatcccccaacattctcgtcctctccgagtgctggaacgccgacggcacccccaacaagtacaactacagacatgagtgcgctaagctcatggaggctcacgccgcccacgagccctggttcggtctcgagcaggagtacaccctcctcgacctcagcaaccgccccttcggctggcctgctaacggtttccccgcccctcagggcccttactactgcggtgttggtaccggcaaggttgtccagcgtgatatcgttgacgcccactacaaggcctgcttgtactctggcgtcaagatctctggtaccaacgccgaggtcatgcccgcccagtgggagttccaggtcggcccttgcgtcggcattgagatgggtgaccacctgtggctcgctcgcttcctgctcgcccgtattgcggaagagttcggcgccaaggtttccgttgaccctaagcccatccccggtgactggaacggtgccggtctgcacagcaatttctccaccaaggagatgcgtgttgagggtggtatgaagcacattgaggccgccatcaagaagcttgagggccgccacaaggagcacatcgccgtttacggcgagggcaacgagaagcgccttactggccgccacgagacgggagccatcgaccagttctcttacggagttgccaaccgtggtgcttccattcgtatccccagagagtacaccgccaagggctacggttacttcgaggaccgtcgtcccgcttccaacgccgacccctacaggattactggtattctgatggagaccatttacggttccgtcgacaactaa

SEQ ID NO: 21350 - protein, 360 aa, Colletotrichum gloeosporioides
MATEAAVVSNPNTLAKYLKLDQKGSIMAEYIWIDADGETRSKSRTLKEKEYTPEDLPMWNFDGSSTGQAPGDNSDVYLKPVAVFPDPFRGSPNILVLSECWNADGTPNKYNYRHECAKLMEAHAAHEPWFGLEQEYTLLDLSNRPFGWPANGFPAPQGPYYCGVGTGKVVQRDIVDAHYKACLYSGVKISGTNAEVMPAQWEFQVGPCVGIEMGDHLWLARFLLARIAEEFGAKVSVDPKPIPGDWNGAGLHSNFSTKEMRVEGGMKHIEAAIKKLEGRHKEHIAVYGEGNEKRLTGRHETGAIDQFSYGVANRGASIRIPREYTAKGYGYFEDRRPASNADPYRITGILMETIYGSVDN

SEQ ID NO: 21351 - DNA, 1077 bp, Cryptococcus neoformans
  CDS (1)..(1077)
atgtctcaactaattgccaccaagcgagttgatcttcttgccccttacctcgcccttgatcagggttctcgtgttcaggccgagtacatctggattgacgctgagggaggtatccgaagtaagaccatgactctcgataaggctccttcatctgttgccgatctcaaggagtggaatttcgacggttcttctaccaaccaggcccctgctgataactctgatgtcttcctccgtcctgttgccatcttcaaggaccccttccgaggtggcgccaacattctcgttctctgcgaatgttacgacaacgacggtacccctaacaagtccaactaccgagctcactgcaagaaggtgatggacgccgccaaggacactgagccttggttcggtctcgagcaggagtacactctttttgacgccgatggtcaagtctttggctggcccaagaatggtttccccggtcctcagggtccttactactgtggtgtcggtgccggcaaggtgtttgctcgtgatttcatcgaggctcactacagggcttgtctctacgccggtatcaagatttccggtatcaacgccgaggtcatgccatctcagtgggagttccaggttggtccttgtactggtatcgagatgggtgaccatctctggatgccccgattcctccttcttaggattggtgaggagtggggtatcactccttctctccatcctaagcctctgaagggtgattggaacggtgccggttgccactccaactactccaccaaggacatgcgaacacccggtaagggtatggctgctatcgaagatgccatcaagaagctagaaaagaagcacctcgaacacatcgcggtttacggtgaagataatgacttgcggttgaccggcaagcatgagaccgcatcaatgaccaccttctctgctggtgttgccaacaggggtgcctctattcgaattcccaggcatgtcggtgcgcagggttacggttaccttgaagatcgtcgacccgcctctaacgttgacccttatcgagtcacagccatcctcgtcgagaccaccgttcttaacaactaa

SEQ ID NO: 21352 - protein, 358 aa, Cryptococcus neoformans
MSQLIATKRVDLLAPYLALDQGSRVQAEYIWIDAEGGIRSKTMTLDKAPSSVADLKEWNFDGSSTNQAPADNSDVFLRPVAIFKDPFRGGANILVLCECYDNDGTPNKSNYRAHCKKVMDAAKDTEPWFGLEQEYTLFDADGQVFGWPKNGFPGPQGPYYCGVGAGKVFARDFIEAHYRACLYAGIKISGINAEVMPSQWEFQVGPCTGIEMGDHLWMPRFLLLRIGEEWGITPSLHPKPLKGDWNGAGCHSNYSTKDMRTPGKGMAAIEDAIKKLEKKHLEHIAVYGEDNDLRLTGKHETASMTTFSAGVANRGASIRIPRHVGAQGYGYLEDRRPASNVDPYRVTAILVETTVLNN

SEQ ID NO: 21353 - DNA, 1113 bp, Debaryomyces hansenii
  CDS (1)..(1113)
atggtgtcgattacagaacaaactgctattttagccaaatatttggatctttctcaaaacggtaaggtgttagccgaatacgtgtggattgatgctgatggtaactctagatctaagtgtaaaacattagacaagaagccaagctcagttgaagatttaccagaatggaactttgacggttcttctaccggtcaagctcctggtcatgattccgatgtgtatttaagaccagtcgcattctacgcagatcctttcagaaagggtgacaacatcattgttttaaccgaatgttggaacaacgacggtactccaaacaagttcaaccacagacacgaatctgctaagttaatgaaggcccatgctgatgaagaagtctggttcggtttagagcaagaatacaccttattcgaccaatttgaccaaccatacgcatggccaaagggtggtttcccagctccacaaggtccttactactgtggtgtcggaaccggtaaggtttacgccagagacttaattgaagctcactacagagcttgtcttcacgccggtgtcgatatttctggtatcaacgctgaagtcatgccatcacaatgggaattccaagtcggtccttgtgaaggtatccaaatgggtgacgagttatggattgctcgttacttgttacaaagagtcgccgaagaattcggtgttaaggtttctttccatccaaagcctttgaaaggtgaatggaacggtgctggttgtcacactaatgtttctaccaagtctatgagattaccaggtggtatgaagagtatagaagttgctttatctaaattagcaaagagacataaggaacatatgttgttatacggtgctgataatgatcaaagattaacaggtcgtcatgagactgcttctatcgaaggtttctcatctggtgttgctaacagaggtgcttctgttagaatcccaagatctgttgccaaggaaggctatggttatttcgaagatagaagacctgcttccaatatagatccttacttggttactggtattatggttgaaaccatttgtggttccattccagatgctgatatgttcaaagaatatgctagagaatcttctgattaa

SEQ ID NO: 21354 - protein, 370 aa, Debaryomyces hansenii
MVSITEQTAILAKYLDLSQNGKVLAEYVWIDADGNSRSKCKTLDKKPSSVEDLPEWNFDGSSTGQAPGHDSDVYLRPVAFYADPFRKGDNIIVLTECWNNDGTPNKFNHRHESAKLMKAHADEEVWFGLEQEYTLFDQFDQPYAWPKGGFPAPQGPYYCGVGTGKVYARDLIEAHYRACLHAGVDISGINAEVMPSQWEFQVGPCEGIQMGDELWIARYLLQRVAEEFGVKVSFHPKPLKGEWNGAGCHTNVSTKSMRLPGGMKSIEVALSKLAKRHKEHMLLYGADNDQRLTGRHETASIEGFSSGVANRGASVRIPRSVAKEGYGYFEDRRPASNIDPYLVTGIMVETICGSIPDADMFKEYARESSD

SEQ ID NO: 21355 - DNA, 1038 bp, Emericella nidulans
  CDS (1)..(1038)
atgaagtacatgagcctcgaccagcgagggtcggtcatggctgagtacatttggatcgacgcccacggcggtactcgaagtaagacaaagactctttctaaggccccttctagcgttgatgagctccccgaatggaatttcgacggttcatcaacagctcaggcccccggtgacaactcagatgtctaccttcgccctgtcgctatgtaccccgatcctttccgtcgcggcgataacatcctcgttctctgtgagacatgggactctgatggaagccccaacaagttcaactaccgtcacgactgcgcccgtctgatggaaacgcatgccaaggaggagttctggtttggtcttgagcaagagtacacccttctcggccctgacggctggccttacggttggcccaagggcggtttccccggtgcccagggaccgtactactgtggtgtcggtaccggcaaggtctactgccgtgacatcgttgaggcgcactaccgcgcctgtctctacgccggtgttaagatctctggtatcaacgcggaggtcatgccctctcaatgggagtaccaggttggtccttgccatggcatcgaaatgggtgaccacctctggatctctcgtttccttctccaccgcgtcgccgaagagttcggtgtgaagatctccaacgatcctaagcccatcaagggtgactggaacggtgccggtctgcacactaacgtctcaacgacgtcaacacgtgccgagggtggcatcaaggccattgagtcgtacatgaagaaacttgaagcccgccatgtcgagcacattgccgtctacggtgagggtaacgaggagcgtctcactggtcgtcacgagactggtaacatcgacaagttctcatacggtgttgctgaccgtggtggctccatccgaattccccggcaagtcgccaaggatggtaagggttacttcgaagaccgccgccccgcttccaacgcggacccttaccagattactggtatcattgctgaaactgtaagtttttctaatcgatga

SEQ ID NO: 21356 - protein, 345 aa, Emericella nidulans
MKYMSLDQRGSVMAEYIWIDAHGGTRSKTKTLSKAPSSVDELPEWNFDGSSTAQAPGDNSDVYLRPVAMYPDPFRRGDNILVLCETWDSDGSPNKFNYRHDCARLMETHAKEEFWFGLEQEYTLLGPDGWPYGWPKGGFPGAQGPYYCGVGTGKVYCRDIVEAHYRACLYAGVKISGINAEVMPSQWEYQVGPCHGIEMGDHLWISRFLLHRVAEEFGVKISNDPKPIKGDWNGAGLHTNVSTTSTRAEGGIKAIESYMKKLEARHVEHIAVYGEGNEERLTGRHETGNIDKFSYGVADRGGSIRIPRQVAKDGKGYFEDRRPASNADPYQITGIIAETVSFSNR

SEQ ID NO: 21357 - DNA, 1335 bp, Fusarium solani
  CDS (91)..(1161)
gatacgtttagtatcaattcactttctttcttccggatctcgcttggaattaatctctcttcacctcacaaacccaaaaaacctttcacaatggcgacttcagctcccgtcacctcgaggaccgagaccctcgcaaaatatctcaagctcgaccagaagggccagatcatggccgagtacgtctgggttgatgctgctggcgagacccgatcaaagtcccgaactctccctgagaaggactacaaggccgaggacctccccgtctggaacttcgatggttcctctaccaaccaggcccccggcgacaactccgatgtctacctccgcccctgcgccgtctaccccgatcccttccgtggctctcccaacatcatcgttctcgctgagtgctggaacgccggtggcactcccaacaagttcaacttccgacatgactgcgtgaaggtcatggacacctacgccgaagacgagccctggttcggtctcgagcaggagtacaccctgctcggtcctgacaaccgaccctacggctggcccactggcggtttccccgctcctcagggcgagtactactgcggtgttggcaccggcaaggttgtccagcgcgacatcgtcgaggctcactacaaggcctgcttgtacgctggcatccagatttccggcaccaacgctgaggttatgcctgctcagtgggagtaccaagtcggcccttgcctgggtattgagatgggcgaccaactttgggtttcacgattcttcctcgcccgcatcactgaagagttcggcgccaaggtctccctgcaccccaagccaatcgcgggagactggaacggagctggcctgcattccaatttctctacgaaggcgatgcgcgaggagggtggaatgaaggtgatcgaggaggcgctgaagaaactcgagcctcaccacgccgagtgtatcgcggagtatggcgaggacaacgaactccgccttactggccgtcatgagactggctcgatcgactcgttctcctggggcgtcgccaaccgcggaacaagtatccgcgcccctcgtgaaaccgcagccaagggctacggttacttcgaggatcgccgccctgcctctaacgctgacccttaccgggtcaccaaggctctccttcagttctctctggcttaagcgtgtgaaaagatttttgttcagacgagttcgtctttcatggttaccggcgtgagggtttgggacactattacatagatagcatgacaactggtccagcgagatccagtaattacaatgatcactgatgcaaaaaaaaaaaaaaaaaaaaaaaaaaaagcggccgctgaattc

SEQ ID NO: 21358 - protein, 356 aa, Fusarium solani
MATSAPVTSRTETLAKYLKLDQKGQIMAEYVWVDAAGETRSKSRTLPEKDYKAEDLPVWNFDGSSTNQAPGDNSDVYLRPCAVYPDPFRGSPNIIVLAECWNAGGTPNKFNFRHDCVKVMDTYAEDEPWFGLEQEYTLLGPDNRPYGWPTGGFPAPQGEYYCGVGTGKVVQRDIVEAHYKACLYAGIQISGTNAEVMPAQWEYQVGPCLGIEMGDQLWVSRFFLARITEEFGAKVSLHPKPIAGDWNGAGLHSNFSTKAMREEGGMKVIEEALKKLEPHHAECIAEYGEDNELRLTGRHETGSIDSFSWGVANRGTSIRAPRETAAKGYGYFEDRRPASNADPYRVTKALLQFSLA

SEQ ID NO: 21359 - DNA, 1062 bp, Gibberella fujikuroi
  CDS (1)..(1062)
atggctactcctatcacctcacggacggagactctccagaagtatctcaagcttgatcagaagggtatgatcatggctgagtacgtctgggttgatgccgatggtggcactcgttccaagtctcgcacattgcccgagaaagaatacaagcccgaggatcttcccgtttggaacttcgatggttcttccactaaccaggcccctggtgacaactccgatgtctacctccgtccctgcgccgtctaccctgatcccttccgcggctctcccaacatcattgttcttgctgagtgctggaacgccgatggcactcccaacaaatacaacttccgtcacgattgcgtgaaggtcatggacacctacgccgacgacgagccyttgtttggcctcgagcaggagtataccctcctcggctctgacaaccgaccctatggctggcccgccggtggtttccctgctccccaaggcgagtactactgtggtgtgggcactggaaaggttgtccagcgcgatatcgtcgaggcccattataaagcctgtttgtacgccggcatccagatctctggaacgaacgccgaggtcatgcctgctcagtgggaatatcaggtcggcccctgcactggcattgcaatgggcgaccaactctggatttcgcgattctttttacatcgagtcgctgaggaattcggtgcaaaggtttctttgcaccccaagcccattgctggcgattggaacggaggtttgcactccaacttctccacgaaagcaatgcgcgaggagggtggtatgaaggttattgaggaggccctgaagaagcttgaacctcaccacgtcgagtgtatcgcagagtatggtgaggataacgaattgcgtttgaccggccgtcacgagactggatccatcgacagcttttcttggggtgtcgccaaccgtggcacaagcatccgcgtgccacgcgaaacggctgctaagggctatggctactttgaggaccgccgtcctgcttccaacgccgatccctaccgcgttaccaaggttctcctccaattttctatggcttag

SEQ ID NO: 21360 - protein, 353 aa, Gibberella fujikuroi
MATPITSRTETLQKYLKLDQKGMIMAEYVWVDADGGTRSKSRTLPEKEYKPEDLPVWNFDGSSTNQAPGDNSDVYLRPCAVYPDPFRGSPNIIVLAECWNADGTPNKYNFRHDCVKVMDTYADDEPLFGLEQEYTLLGSDNRPYGWPAGGFPAPQGEYYCGVGTGKVVQRDIVEAHYKACLYAGIQISGTNAEVMPAQWEYQVGPCTGIAMGDQLWISRFFLHRVAEEFGAKVSLHPKPIAGDWNGGLHSNFSTKAMREEGGMKVIEEALKKLEPHHVECIAEYGEDNELRLTGRHETGSIDSFSWGVANRGTSIRVPRETAAKGYGYFEDRRPASNADPYRVTKVLLQFSMA

SEQ ID NO: 21361 - DNA, 1119 bp, Kluyveromyces lactis
  CDS (1)..(1119)
atggctgctactagtgatattgtcgaaaagactcacattttacaaaaatatttggaattagaccaaagaggtgctatcatcgccgaatacgtttggattgattccgaaggtggtttgagatccaagggtagaaccttgaacaagaaggtcacatccgttgattctttgccagagtggaactttgatggttcttctaccggccaagctccaggtcatgactccgatatctacttgaagcctgttgccttctacccagatccatttagaagaggtgacaacattgttgttttggctgaatgttggaacaacgatggtactccaaataagttcaaccacagacatgaagctgctaagttgttcgaagctcacaaggatgctgagatgtggttcggtttggaacaagaatacactttgttcgaccaatacgatcaagtatatggctggccaaagggtggtttcccagctccacaaggtccatactactgtggtgttggtgccggtaaggtctttgctcgtgacgtcatcgaagctcattacagagcctgtttgtatgccggtgtgaacatctctggtatcaacgctgaagtcatgccatctcaatgggaattccaagtcggtccatgtgaaggtatcgccatggctgatcaattgtggatcgccagatacttcctgcatagagtagccgaagaattcggtgttaaggtttctctacatccaaagccattgaagggtgactggaacggtgctggttgtcacaccaacgtttctaccaagctaatgagagctccaggtggtatgaagtacatcgaagatgctatcgaaaagttgtccaagagacataacgaacacatcaagctatatggtgctgacaacgaacaaagattgactggtagacatgaaaccgcatccatgtccaccttctcttctggtgtcgccaaccgtggtgcttccattagaatcccaagatctgtcaacaaagagggatacggatatttcgaagacagaagacctgcctccaacattgacccttacttggttactggtatcatgtgtgaaactgtctgtggtgctattgaaaacgccaacatgactaaggaatacgaaagagaatctttataa

SEQ ID NO: 21362 - protein, 372 aa, Kluyveromyces lactis
MAATSDIVEKTHILQKYLELDQRGAIIAEYVWIDSEGGLRSKGRTLNKKVTSVDSLPEWNFDGSSTGQAPGHDSDIYLKPVAFYPDPFRRGDNIVVLAECWNNDGTPNKFNHRHEAAKLFEAHKDAEMWFGLEQEYTLFDQYDQVYGWPKGGFPAPQGPYYCGVGAGKVFARDVIEAHYRACLYAGVNISGINAEVMPSQWEFQVGPCEGIAMADQLWIARYFLHRVAEEFGVKVSLHPKPLKGDWNGAGCHTNVSTKLMRAPGGMKYIEDAIEKLSKRHNEHIKLYGADNEQRLTGRHETASMSTFSSGVANRGASIRIPRSVNKEGYGYFEDRRPASNIDPYLVTGIMCETVCGAIENANMTKEYERESL

SEQ ID NO: 21363 - DNA, 1429 bp, Lactuca sativa
  CDS (16)..(1092)
catcacttcgatctcatggctctgctttcggatctcgtcaacctcgacctctctagtatcaccgataagattatcgccgagtatatatggatcggcggatcgggtatggatcttagaagcaaagcaagaacactttcagggcctgtgtcggatcccagtgagcttccgaagtggaactacgatggctctagcacagggcaagctcccggagaagacagtgaagtcatcatataccctcaagcaatcttcaaagatccattcaggagaggcaaccatatcttggtgatgtgtgatgcttacactcccgccggcgaaccaatccccaccaacaagagggccgccgccgccaaaatcttcagcaacccagaagtcgaaaaggaggttacatggtacggaattgagcaagaatacaccttgttgcagaaggacaccaactggccattgggttggcctctaggtggtttccctggtccacagggcccatactactgtggaattggcgctgataaagcttttggacgtgatattgttgatgcacactacaaagcttgcctttacgctggcgtcaacattagcggcatcaatggcgaagttatgcctggacaatgggaatttcaagtaggaccttccgtaggcatagctgcagctgatcaaatctgggtcgctcgttacattcttgagaggatcactgagatttatggggtggtggtttcatttgaccccaagcctattccgggtgactggaatggagctggtgctcacacaaattacagtacaaaaaccatgagggaagagggaggatatgaggtgatcaagaaagctatcgagaagttgggattgaggcacaaggaacacattgctgcatatggtgaaggcaatgaacgtaggctcactggtcgacatgaaacagctgatatcaacacctttttatggggtgttgcaaaccgtggagcttctattcgtgttggaagagacacagagaaagaagggaaaggttactttgaggacagaaggccagcttcaaacatggatccatatgtcgtgacttccatgattgctgagactaccattctgtgggacaacaaatcttgaaaagagatcgaaaattatgaagcctgattgggagggagatttgaaaaaatgaaattagaattgggaacaaacaaaacaacccttcttgtttattttcttgaaaattagatattgttcttgtttgtttgtgttgcatgttgatcgttatggttattatggtaatggtagttttgtgtttcatgtttcttgtagcaaagcattttgagtccaaaatgcatgtaaagctactacttgatttgagatttctcccatggtgattcatgggaatattgtcgatattgtctatgataataacaaatatgaagggttgatttttatccaaaaaaaaaaaaaaaaa

SEQ ID NO: 21364 - protein, 358 aa, Lactuca sativa
MALLSDLVNLDLSSITDKIIAEYIWIGGSGMDLRSKARTLSGPVSDPSELPKWNYDGSSTGQAPGEDSEVIIYPQAIFKDPFRRGNHILVMCDAYTPAGEPIPTNKRAAAAKIFSNPEVEKEVTWYGIEQEYTLLQKDTNWPLGWPLGGFPGPQGPYYCGIGADKAFGRDIVDAHYKACLYAGVNISGINGEVMPGQWEFQVGPSVGIAAADQIWVARYILERITEIYGVVVSFDPKPIPGDWNGAGAHTNYSTKTMREEGGYEVIKKAIEKLGLRHKEHIAAYGEGNERRLTGRHETADINTFLWGVANRGASIRVGRDTEKEGKGYFEDRRPASNMDPYVVTSMIAETTILWDNKS

SEQ ID NO: 21365 - DNA, 1062 bp, Lupinus luteus
  CDS (1)..(1062)
atgtctgtactctcagatttaataaaccttaacctctctgacaccacagagaagattatcgccgagtacatatgggtgggtggatctggtgtggacctcaggagtaaagcaaggaccctgtcaggacctgttaatgacccttcaaagcttcccaagtggaactatgatggctccagtactggccaagctccaggaaaagatagtgaagtgatcttatggccacaagcaattttcaaggatccatttaggaggggtaacaatatcctggttatgtgtgatacttacactcctgctggagaacctattccaacaaacaagagacatgctgctgcaaagatattcagccaccctgatgttgttgctgaagaaccctggtttggtattgagcaggaatacaccttgttacagaaagatatccattggcctattggatggccacttggtggttttcctggacctcagggaccatactattgtggtaccggtgctgaaaaagctttcggtcgtgatattgttgactcacattacaaagcatgtctttatgctggcatcaacattagtggcattaatgcagaagtgatgcctggccagtgggaattccaagttggtccaagtgttggtatctctgctggtgatgagttgtgggttgctcgttacattttggagaggatcactgagattgctggggtggtcctttccttagaccccaaaccgattccgggtgattggaatggtgctggtgctcacactaattacagtaccaagtccatgagaaatgatggtggctatgaagtcataaaaaaagcaattgagaagttggggaagagacacaatgagcacattgctgcttatggtgaaggtaacgaacgtcgtctgaccggaagacacgaaactgctgacattagtactttcttttggggtgttgcaaaccgtggagcttctattagggtgggcagggacactgagaaagaaggcaagggatattttgaggacagaaggcctgcttctaacatggacccatatgtggtcacttctatgattgcagagacaacccttctctag

SEQ ID NO: 21366 - protein, 353 aa, Lupinus luteus
MSVLSDLINLNLSDTTEKIIAEYIWVGGSGVDLRSKARTLSGPVNDPSKLPKWNYDGSSTGQAPGKDSEVILWPQAIFKDPFRRGNNILVMCDTYTPAGEPIPTNKRHAAAKIFSHPDVVAEEPWFGIEQEYTLLQKDIHWPIGWPLGGFPGPQGPYYCGTGAEKAFGRDIVDSHYKACLYAGINISGINAEVMPGQWEFQVGPSVGISAGDELWVARYILERITEIAGVVLSLDPKPIPGDWNGAGAHTNYSTKSMRNDGGYEVIKKAIEKLGKRHNEHIAAYGEGNERRLTGRHETADISTFFWGVANRGASIRVGRDTEKEGKGYFEDRRPASNMDPYVVTSMIAETTLL

SEQ ID NO: 21367 - DNA, 1813 bp, Neisseria gonorrhoeae
  CDS (123)..(1541)
tcggcttggaatttgacgcaaaaccggtttcagacggcatcggcgtggtaaaatcgtgccgactttgcgtcaagccgccgcgttccgcgtattttgccatttccctttttcaggagctgaagatgtccattaaaaacgccgtaaaattgattgaaaaaagcaaagcccgctttgtcgatttgcgcttcaccgataccaaaggcaagcagcaccactttaccgtgcctgcgcgcatcgtgttggaaggccccgaagagtggttcgaaaacggtcaggcgtttgacggttcgtccatcggcggctggaaaggcattcaggcttccgatatgcagctgcgtcccgatgcgtccacagccttcgtcgatcctttttatgatgatgttaccgtcgtcattacctgcgacgtcatcgaccctgccgacggtcagggttacgaccgcgacccgcgctccatcgcacgccgcgccgaagcctatttgaaatcttccggtatcggcgacaccgcctatttcggtcccgaacccgaattcttcgtcttcgacggcgtagaatttgaaaccgacatgcacaaaacccgttacgaaatcacgtccgaaagcggcgcgtgggcaagcggcctgcatatggacggtcaaaacaccggccaccgccccgccgtcaaaggcggctacgcgcccgtcgcgccgattgactgcggtcaagatttgcgctccgccatggtgaacattttggaaggactcggcatcgaagtcgaagtccaccacagcgaagtcggtaccggcagccaaatggaaatcggcacccgtttcgccactttggtcaaacgcgccgaccaaacccaagatatgaaatacgtcatccaaaacgttgcccacaatttcggcaaaaccgccacctttatgcccaaaccgattatgggcgacaacggcagcggtatgcacgtccaccaatccatttggaaagacggtcaaaacctgttcgcaggcgacggctatgccggtttgtccgataccgcgctctactacatcggcggcatcatcaaacacgccaaagccctgaacgcgattaccaatccgtccaccaactcctacaaacgcctcgtgccgcactttgaagcaccgaccaaattggcctattccgccaaaaaccgttccgcttccatccgtatcccgtctgtgaacagcagcaaggcgcgccgcatcgaagcgcgtttccccgacccgaccgccaacccgtatttggcatttgccgccctgctgatggcgggtttggacggcattcaaaacaaaatccatccgggcgaccctgccgataaaaacctgtacgacctgccgccggaagaagacgcgctcgtcccgaccgtctgcgcttctttggaagaagcacttgccgccctcaaggccgaccacgaattcctgctgcgcggcggcgtgttcagcaaagactggatcgacagctacatcgcctttaaagaggaagatgtccgccgcatccgtatggcgccgcacccgctggaatttgaaatgtattacagcctgtaaaccgtcgggtttcagtagcaatgccgtctgaacacagtttcagacggcattttgcattggaacggcaaaccggcggcgcgtggcggcatttttcagcaggcgggcgatatttgctacaataggcttttgttttttggctgtacgaacgatgactgcatcgaaatcaggttttatcgggcaaatcttttcccgcaatatgcttgtctgtatttttacggggtttgcctcggggctgccgctgtacttctgattaacctgattccggcgtggtt

SEQ ID NO: 21368 - protein, 472 aa, Neisseria gonorrhoeae
MSIKNAVKLIEKSKARFVDLRFTDTKGKQHHFTVPARIVLEGPEEWFENGQAFDGSSIGGWKGIQASDMQLRPDASTAFVDPFYDDVTVVITCDVIDPADGQGYDRDPRSIARRAEAYLKSSGIGDTAYFGPEPEFFVFDGVEFETDMHKTRYEITSESGAWASGLHMDGQNTGHRPAVKGGYAPVAPIDCGQDLRSAMVNILEGLGIEVEVHHSEVGTGSQMEIGTRFATLVKRADQTQDMKYVIQNVAHNFGKTATFMPKPIMGDNGSGMHVHQSIWKDGQNLFAGDGYAGLSDTALYYIGGIIKHAKALNAITNPSTNSYKRLVPHFEAPTKLAYSAKNRSASIRIPSVNSSKARRIEARFPDPTANPYLAFAALLMAGLDGIQNKIHPGDPADKNLYDLPPEEDALVPTVCASLEEALAALKADHEFLLRGGVFSKDWIDSYIAFKEEDVRRIRMAPHPLEFEMYYSL

SEQ ID NO: 21369 - DNA, 1089 bp, Neurospora crassa
  CDS (1)..(1089)
atggcgtcagaatcaacaatcctctccaatgccgagaacctcaagaagttcttgcgtcttccccagaacggccagctcattgccgagtacatctggatcgacagcgaaggcggcaccaggtcaaagtcgaggactcttcccgagaaggagagccaatatctccctgaggagcttcccatctggaacttcgatggttcctcgactggccaggcccccggcgagaactccgatgtctacctcaagcccgtagccgtcttccctgacccgttccgtggtagccccaacattctcgtcctctccgagtgctggaacgccgatggcacccccaacaagttcaaccacagacatgaagccgccaagttgatggaggctcatgccgaccaggttccctggttcggtctcgagcaggagtacactctcctcgacatcaacgacaggccctatggttggcccagaaacggtttccccgctccccagggcccctactactgcggtgtcggcactggcaaggttgtccagcgtgacattgtcgaggcgcactacaagtgctgcttgtacgccggcgtcaagatctctggcaccaacgccgaggtcatgcctgctcagtgggagttccaggtcggcccttgcgacggcatcgagatgggtgaccacctctggctcgctcgcttcctcctccaccgcgtgtcggaagagttcggcgccaaggtctccttcgaccccaagcccattcccggtgactggaacggcgcgggcctccacaccaacttctctaccgagaacatgcgcaaggagggtggcatgaagtacattgaggatgccatcaagaagctcgaggcccgtcataaggagcacattgccgtctatggcgagggcaatgataagcgtcttaccggccgtcacgagaccggctctatcgactctttcacatacggcgttgccaaccgcggcgcctctatccgtattcctagggaatgcggcgccaagggctacggttacttcgaggaccgtcgccctgcgtccaacgccgacccttaccagattacgggtattatcatggagacttgctttggcgctgtttcggagtaa

SEQ ID NO: 21370 - protein, 362 aa, Neurospora crassa
MASESTILSNAENLKKFLRLPQNGQLIAEYIWIDSEGGTRSKSRTLPEKESQYLPEELPIWNFDGSSTGQAPGENSDVYLKPVAVFPDPFRGSPNILVLSECWNADGTPNKFNHRHEAAKLMEAHADQVPWFGLEQEYTLLDINDRPYGWPRNGFPAPQGPYYCGVGTGKVVQRDIVEAHYKCCLYAGVKISGTNAEVMPAQWEFQVGPCDGIEMGDHLWLARFLLHRVSEEFGAKVSFDPKPIPGDWNGAGLHTNFSTENMRKEGGMKYIEDAIKKLEARHKEHIAVYGEGNDKRLTGRHETGSIDSFTYGVANRGASIRIPRECGAKGYGYFEDRRPASNADPYQITGIIMETCFGAVSE

SEQ ID NO: 21371 - DNA, 1065 bp, Suillus bovinus
  CDS (1)..(1065)
atggcctaccagtaccacaacgacctccttgctccttaccttgcgttgtcccagggtgacaaagtgcaagccgagtacgtttggattgatggcgatggcggccttcgttcaaagaccatgactatgaccaagaagaccactgatattggccagctccgcatctgggatttcgatggttcatccacaaaccaagctccaggcggtgactcagatgtctatctccgtcccgccgctattttcaaagatcctttccgaggcggcgacaacattctcgtccttgccgagaccttcaacaatgacggcacacccaatagaacaaaccaccgtcaccacaccaagaaggtcatggatctcgcaaaggactccgttccttggttcggtcttgagcaagaatatacccttttcgatgcagatggcacgccattcggctggccgaagggtggcttccccggaccccagggcccttactactgcggagcaggaactggcaaagtttttgctcgtgacctcatcgaggctcactaccgtgcctgcctatacgccggcgtgaacatcagcggtatcaacgctgaagtcatgccctcccaatgggagttccaagtcggcccttgcgagggtatttccatgggtgatcacctctggatggctcgttaccttctcgttcgcatcgctgaacagtggggcatcaaggtctccttccaccccaagcctcttgcgggtgactggaacggtgctggttgccacaccaactacagcaccaaggtcatgcgtgagcctggaggtatgaagtacatcgatgaggccatcgagaaactttcaaagagacatgctgaacacatcgctgtttacggagaggacaatgatctccgtctcactggacgtcatgagactggccacatcggagacttcagttctggcgttgctaaccgcggagcttccatccgggtgccaaggcacgttgctgcccagggttacggatacctggaggaccgtcgtccggcttccaacattgacccataccgtgtgactggaataatcgtggagaccactgttcttgacaagtag

SEQ ID NO: 21372 - protein, 354 aa, Suillus bovinus
MAYQYHNDLLAPYLALSQGDKVQAEYVWIDGDGGLRSKTMTMTKKTTDIGQLRIWDFDGSSTNQAPGGDSDVYLRPAAIFKDPFRGGDNILVLAETFNNDGTPNRTNHRHHTKKVMDLAKDSVPWFGLEQEYTLFDADGTPFGWPKGGFPGPQGPYYCGAGTGKVFARDLIEAHYRACLYAGVNISGINAEVMPSQWEFQVGPCEGISMGDHLWMARYLLVRIAEQWGIKVSFHPKPLAGDWNGAGCHTNYSTKVMREPGGMKYIDEAIEKLSKRHAEHIAVYGEDNDLRLTGRHETGHIGDFSSGVANRGASIRVPRHVAAQGYGYLEDRRPASNIDPYRVTGIIVETTVLDK

SEQ ID NO: 21373 - DNA, 1300 bp, Tuber borchii
  CDS (45)..(1121)
tttactcaacacaacttgttttttagaccaaatagtcaatcacgatgagcgaaaactctactatcgtctccaatacggcgaatctcgtcaaatttctcaacctagatcagaaagggtcgattttggcggagtatatctggattgacggtgcgaacggcgtcagatctaagaccaagactctcttcaagaagccatcctctgtcgaagacttgcctgaatggaactttgacggttcctccactggtcaagctcctggtgaggattcggacatctatctccgtcctgtcgccatatttccagatccgttcagaatgggtgacaacattcttgtgttggctgagtgctggaatgcggacgggtctcctaacaagtttaatcatcggcacgaatgtgctaagattatggaggcccacaaggatcagaagccttggtttggattggagcaagagtatactctcttcgatctttatgggaacccgtacgggtggcccaagggaggtttcccaggccctcaggggccatactactgtggtgtcggaactggcaaggtttattgtcgcgacattgtcgaggcacattacaaggcctgcttgtttgccggaatcaagatctccggaatcaacgccgaggttcttccctcccaatgggagttccaagtcggtccgtgtgtcggtatcgagatgggcgaccatctctggatttccagataccttctgcaccgtgttgccgaagaatttggggttaagatttcgttccaccccaagcccatccctggtgattggaatggctccggtctccataccaacgtgtcgacccaagctatgcgcgatgagggaggcatgaaggctattgaggaggccatccagaagctttcaacccgccatgctgagcacatcgccgtctacggcgatgacaacaccctccgtctcactggcagacatgaaactggaaacattgatgccttctcctatggtgtcgcggacagaggatcttctattagaatccctaggtcttgcgcaaaggaagggaaggggtactttgaagataggcgccctgcatctaatgcttgtccataccagattacgggcatcatgatggagacgatttgtggtggtatttagattatgggtttcctttcctggcggagtttgtttctcttgggttgttttgtattttttccttctttcgtctttttattttagacacgaacgttagcgagaccccatcgaatgaaaagggttcacggaagtctaactattaatgcaaaaatgaaattatggttaaaaaaaaaaaaaaaaaa

SEQ ID NO: 21374 - protein, 358 aa, Tuber borchii
MSENSTIVSNTANLVKFLNLDQKGSILAEYIWIDGANGVRSKTKTLFKKPSSVEDLPEWNFDGSSTGQAPGEDSDIYLRPVAIFPDPFRMGDNILVLAECWNADGSPNKFNHRHECAKIMEAHKDQKPWFGLEQEYTLFDLYGNPYGWPKGGFPGPQGPYYCGVGTGKVYCRDIVEAHYKACLFAGIKISGINAEVLPSQWEFQVGPCVGIEMGDHLWISRYLLHRVAEEFGVKISFHPKPIPGDWNGSGLHTNVSTQAMRDEGGMKAIEEAIQKLSTRHAEHIAVYGDDNTLRLTGRHETGNIDAFSYGVADRGSSIRIPRSCAKEGKGYFEDRRPASNACPYQITGIMMETICGGI

SEQ ID NO: 21375 - DNA, 1407 bp, Vigna aconitifolia
  CDS (78)..(1148)
attcagaaaaaggagaaagagagatctttttgtgctgtgaagaagggtctttccttgtttcttcgtgtcttacttacatgtcgctgctatcagatctcatcaacctcaacctctccgacaccaccgagaagatcatcgcagagtacatatggatcggtggatcaggactggacctaaggagcaaagcaaggactctcccaggaccagttagcgacccttcaaagctgcctaagtggaactatgacggctccagcactggtcaagcccctggagaagacagtgaagtgattatatacccacaagctattttcaaggatccattcagaaggggtaacaatatcttggttatgtgtgatgcttacactccagctggagaacccattcccactaacaagaggcacaatgctgccaagatattcagccatcctgatgttgttgccgaagagccctggtacggtatcgagcaggaatacaccttgttgcagaaggatgtcaactggccacttgggtggcctgttggcggtttccctggacctcagggaccttactactgtggtgctggtgctgataaggcttttgggcgtgacattgttgacgcacattacaaagcctgtctttatgctggcatcaacatcagtggaattaatggagaggttatgccgggtcagtgggaattccaagttggacctgcggttgggatatcagctggtgacgagttgtgggtagctcgttacatcttggagaggatcactgagattgctggtgtggtgctttcctttgaccctaagccaatcaagggtgattggaatggtgccggtgctcacaccaactacagcacgaagacaatgagaaacgatggtggctatgaagtaattaaatcagcaattgaaaaattggggaagaggcacaaggagcatatcgctgcttatggagaaggcaatgaacgccgtctgacaggacgacacgaaactgcagacatcaacaccttcttatggggagttgcaaaccgtggagcttctattagagttgggagggacacggagaaagcagggaagggatactttgaggacagaaggccagcttctaacatggacccgtatgttgttacttccatgattgcagacacaaccattctgtggaagccatgagcaacaacacctgcactttgtctctttctttggggatgggaggaaagggaacattaagtagggatttgctcctttatttcatacctcttactttttaggatttggatttctggtaattgttgtggttcgcttgcttggggccttgctggttggtacaaccaactaccaaggattcttcattgccttccatttctttcccatgttttccgattgttataataatatcattaataatcatatatatatgaaacgtatcctc

SEQ ID NO: 21376 - protein, 356 aa, Vigna aconitifolia
MSLLSDLINLNLSDTTEKIIAEYIWIGGSGLDLRSKARTLPGPVSDPSKLPKWNYDGSSTGQAPGEDSEVIIYPQAIFKDPFRRGNNILVMCDAYTPAGEPIPTNKRHNAAKIFSHPDVVAEEPWYGIEQEYTLLQKDVNWPLGWPVGGFPGPQGPYYCGAGADKAFGRDIVDAHYKACLYAGINISGINGEVMPGQWEFQVGPAVGISAGDELWVARYILERITEIAGVVLSFDPKPIKGDWNGAGAHTNYSTKTMRNDGGYEVIKSAIEKLGKRHKEHIAAYGEGNERRLTGRHETADINTFLWGVANRGASIRVGRDTEKAGKGYFEDRRPASNMDPYVVTSMIADTTILWKP

SEQ ID NO: 21377 - DNA, 1095 bp, Yarrowia lipolytica
  CDS (1)..(1095)
atggttttgtcaaaatacctggacctcccccagcacggagctgtcctggccgagtacatctggatcgatgcccatttcaacatccgatccaagtgcaagactctagacaagaagcccacttccatcgaagacctccccgagtggaactttgacggctcctccacagatcaggctcccggccacgactcggatatctatctccgacccgccgccatctaccccgatcctttccgacgaggcgacaacattattgttctggccgagtgctggaacaacgacggaacccccaacaagttcaaccaccgacacgagtgcgccaagctcatgagcgcccacgagaaggaggtcatctggttcggaatcgagcaggagtacaccatgttcgacgagagcgataaccccgtcggatggcctaagggcggtttccccgctccccagggcccctactactgtggtgtcggaaccggcaaggtctttgctcgagacgttgttgaggcccactaccgagcctgtctctactccggaatcaacatctccggtatcaacgccgaggtcatgccttcccagtgggagtaccaggttggtccctgcgagggtatctccatggccgatgagctgtggatgtcccgatacctgctgcaccgagttgccgaggagtttggcatcaagatctccttccaccccaagcccctgcagggagactggaacggagccggctgtcacaccaacgtgtccaccaagtcgatgcgagagcccggtggaatgaagcacattgaggctgccatcgagaagcttgctgcccgacacaaggagcacattgccgtctacggcgaggacaacgacatgcgactcaccggccgacacgagaccggctccatcggctctttctcttccggagttgccaaccgaggctgctccatccgaattcctcgatctgtggccaaggagggctacggctactttgaggaccgacgacccgcctccaacattgacccctaccttgttaccggtatcatgaccgagaccatctgtggctccattcctgatgccgacatggttgaggagaccaagcgaggtgaggaggagggcttttaa

SEQ ID NO: 21378 - protein, 364 aa, Yarrowia lipolytica
MVLSKYLDLPQHGAVLAEYIWIDAHFNIRSKCKTLDKKPTSIEDLPEWNFDGSSTDQAPGHDSDIYLRPAAIYPDPFRRGDNIIVLAECWNNDGTPNKFNHRHECAKLMSAHEKEVIWFGIEQEYTMFDESDNPVGWPKGGFPAPQGPYYCGVGTGKVFARDVVEAHYRACLYSGINISGINAEVMPSQWEYQVGPCEGISMADELWMSRYLLHRVAEEFGIKISFHPKPLQGDWNGAGCHTNVSTKSMREPGGMKHIEAAIEKLAARHKEHIAVYGEDNDMRLTGRHETGSIGSFSSGVANRGCSIRIPRSVAKEGYGYFEDRRPASNIDPYLVTGIMTETICGSIPDADMVEETKRGEEEGF

SEQ ID NO: 21379 - DNA, 24 bp, Artificial sequence
  Primer sequence
atggctgaagcaagcatcgaaaag

SEQ ID NO: 21380 - DNA, 27 bp, Artificial sequence
  Primer sequence
ttatgaagattctctttcaaattcctt

SEQ ID NO: 21381 - protein, 448 aa, Artificial sequence
  Consensus
  Variant (2)..(2): Xaa in position 2 is any amino acid
  Variant (4)..(12): Xaa in position 4 to 12 is any amino acid
  Variant (13)..(13): Xaa in position 13 is any or no amino acid
  Variant (18)..(18): Xaa in position 18 is any amino acid
  Variant (20)..(20): Xaa in position 20 is any amino acid
  Variant (22)..(22): Xaa in position 22 is any amino acid
  Variant (23)..(33): Xaa in position 23 to 33 is any or no amino acid
  Variant (35)..(35): Xaa in position 35 is any or no amino acid
  Variant (37)..(37): Xaa in position 37 is any or no amino acid
  Variant (39)..(39): Xaa in position 39 is any amino acid
  Variant (41)..(45): Xaa in position 41 to 45 is any amino acid
  Variant (46)..(51): Xaa in position 46 to 51 is any or no amino acid
  Variant (53)..(53): Xaa in position 53 is any amino acid
  Variant (54)..(54): Xaa in position 54 is any or no amino acid
  Variant (56)..(56): Xaa in position 56 is any amino acid
  Variant (63)..(63): Xaa in position 63 is any amino acid
  Variant (64)..(64): Xaa in position 64 is any or no amino acid
  Variant (67)..(67): Xaa in position 67 is any amino acid
  Variant (69)..(69): Xaa in position 69 is any amino acid
  Variant (70)..(70): Xaa in position 70 is any or no amino acid
  Variant (74)..(74): Xaa in position 74 is any or no amino acid
  Variant (76)..(76): Xaa in position 76 is any or no amino acid
  Variant (78)..(79): Xaa in position 78 to 79 is any amino acid
  Variant (80)..(88): Xaa in position 80 to 88 is any or no amino acid
  Variant (90)..(90): Xaa in position 90 is any amino acid
  Variant (95)..(98): Xaa in position 95 to 98 is any amino acid
  Variant (99)..(103): Xaa in position 99 to 103 is any or no amino acid
  Variant (109)..(114): Xaa in position 109 to 114 is any amino acid
  Variant (115)..(125): Xaa in position 115 to 125 is any or no amino acid
  Variant (127)..(129): Xaa in position 127 to 129 is any amino acid
  Variant (131)..(131): Xaa in position 131 is any amino acid
  Variant (133)..(141): Xaa in position 133 to 141 is any amino acid
  Variant (142)..(149): Xaa in position 142 to 149 is any or no amino acid
  Variant (152)..(153): Xaa in position 152 to 153 is any or no amino acid
  Variant (155)..(155): Xaa in position 155 is any amino acid
  Variant (162)..(165): Xaa in position 162 to 165 is any amino acid
  Variant (166)..(174): Xaa in position 166 to 174 is any or no amino acid
  Variant (176)..(176): Xaa in position 176 is any or no amino acid
  Variant (180)..(180): Xaa in position 180 is any amino acid
  Variant (181)..(183): Xaa in position 181 to 183 is any or no amino acid
  Variant (194)..(194): Xaa in position 194 is any amino acid
  Variant (196)..(196): Xaa in position 196 is any amino acid
  Variant (198)..(201): Xaa in position 198 to 201 is any amino acid
  Variant (202)..(222): Xaa in position 202 to 222 is any or no amino acid
  Variant (227)..(227): Xaa in position 227 is any amino acid
  Variant (231)..(233): Xaa in position 231 to 233 is any amino acid
  Variant (236)..(236): Xaa in position 236 is any amino acid
  Variant (240)..(240): Xaa in position 240 is any amino acid
  Variant (242)..(242): Xaa in position 242 is any amino acid
  Variant (244)..(244): Xaa in position 244 is any amino acid
  Variant (249)..(249): Xaa in position 249 is any amino acid
  Variant (252)..(252): Xaa in position 252 is any or no amino acid
  Variant (260)..(261): Xaa in position 260 to 261 is any amino acid
  Variant (262)..(269): Xaa in position 262 to 269 is any or no amino acid
  Variant (272)..(273): Xaa in position 272 to 273 is any amino acid
  Variant (276)..(276): Xaa in position 276 is any amino acid
  Variant (279)..(279): Xaa in position 279 is any amino acid
  Variant (285)..(285): Xaa in position 285 is any amino acid
  Variant (288)..(288): Xaa in position 288 is any amino acid
  Variant (290)..(291): Xaa in position 290 to 291 is any amino acid
  Variant (294)..(295): Xaa in position 294 to 295 is any amino acid
  Variant (297)..(298): Xaa in position 297 to 298 is any amino acid
  Variant (303)..(303): Xaa in position 303 is any amino acid
  Variant (304)..(304): Xaa in position 304 is any or no amino acid
  Variant (306)..(306): Xaa in position 306 is any amino acid
  Variant (311)..(314): Xaa in position 311 to 314 is any or no amino acid
  Variant (316)..(316): Xaa in position 316 is any amino acid
  Variant (318)..(318): Xaa in position 318 is any amino acid
  Variant (320)..(320): Xaa in position 320 is any amino acid
  Variant (321)..(322): Xaa in position 321 to 322 is any or no amino acid
  Variant (325)..(326): Xaa in position 325 to 326 is any amino acid
  Variant (329)..(331): Xaa in position 329 to 331 is any amino acid
  Variant (332)..(333): Xaa in position 332 to 333 is any or no amino acid
  Variant (335)..(336): Xaa in position 335 to 336 is any amino acid
  Variant (337)..(337): Xaa in position 337 is any or no amino acid
  Variant (339)..(341): Xaa in position 339 to 341 is any amino acid
  Variant (343)..(346): Xaa in position 343 to 346 is any amino acid
  Variant (347)..(347): Xaa in position 347 is any or no amino acid
  Variant (350)..(351): Xaa in position 350 to 351 is any amino acid
  Variant (354)..(354): Xaa in position 354 is any amino acid
  Variant (355)..(355): Xaa in position 355 is any or no amino acid
  Variant (357)..(360): Xaa in position 357 to 360 is any amino acid
  Variant (361)..(383): Xaa in position 361 to 383 is any or no amino acid
  Variant (389)..(389): Xaa in position 389 is any amino acid
  Variant (393)..(394): Xaa in position 393 to 394 is any amino acid
  Variant (396)..(397): Xaa in position 396 to 397 is any amino acid
  Variant (399)..(400): Xaa in position 399 to 400 is any amino acid
  Variant (412)..(417): Xaa in position 412 to 417 is any amino acid
  Variant (418)..(421): Xaa in position 418 to 421 is any or no amino acid
  Variant (424)..(424): Xaa in position 424 is any amino acid
  Variant (430)..(430): Xaa in position 430 is any amino acid
  Variant (431)..(431): Xaa in position 431 is any or no amino acid
  Variant (434)..(434): Xaa in position 434 is any amino acid
  Variant (438)..(438): Xaa in position 438 is any amino acid
  Variant (440)..(442): Xaa in position 440 to 442 is any amino acid
  Variant (444)..(445): Xaa in position 444 to 445 is any amino acid
  Variant (447)..(447): Xaa in position 447 is any amino acid
LXLXXXXXXXXXXYIWIXGXGXXXXXXXXXXXXRXKXRXLXXXXXXXXXXXLXXWXFDGSSTXXQAXGXXSDVXLXPXXXXXXXXXXXFXDPFRXXXXXXXXXLVMCDXXXXXXXXXXXXXXXXXPXXXNXRXXXXXXXXXXXXXXXXXWFXXGXEQEYTLXXXXXXXXXXXXXPXGWPXXXXGFPGPQGPYYXGXGXXXXXXXXXXXXXXXXXXXXXXXXXGRDIXDAHXXXCLXAGIXIXGXNGEVXPGXQWEFQVGXXXXXXXXXXGIXXGDXLWXARYILXRIXEXXGVXXSXXPKPIXXGXWNGAXXXXGXHXNXXXSTXXMRXXXXXGXXXIXXXIXXXXXRHXXHIXXYXXXXXXXXXXXXXXXXXXXXXXXXXXXRRLTGXHETXXIXXFXXGVANRGASIRVXXXXXXXXXXGYXEDRRPXXSNXDPYXVXXXIXXTXI

SEQ ID NO: 21382 - protein, 17 aa, Artificial sequence
  Consensus
  Variant (2)..(2): Xaa in position 2 is Asp, Gly, Asn, Gln or Ser
  Variant (3)..(3): Xaa in position 3 is Phe or Tyr
  Variant (9)..(9): Xaa in position 9 is any amino acid
  Variant (11)..(12): Xaa in position 11 to 12 is any amino acid
  Variant (13)..(13): Xaa in position 13 is any or no amino acid
  Variant (15)..(16): Xaa in position 15 to 16 is any or no amino acid
WXXDGSSTXQXXXGXXS

SEQ ID NO: 21383 - protein, 51 aa, Artificial sequence
  Consensus
  Variant (2)..(6): Xaa in position 2 to 6 is any amino acid
  Variant (8)..(23): Xaa in position 8 to 23 is any amino acid
  Variant (24)..(26): Xaa in position 24 to 26 is any or no amino acid
  Variant (28)..(28): Xaa in position 28 is any amino acid
  Variant (30)..(30): Xaa in position 30 is Asn, Pro, Gln or Thr
  Variant (32)..(32): Xaa in position 32 is Phe or Tyr
  Variant (33)..(33): Xaa in position 33 is any amino acid
  Variant (34)..(34): Xaa in position 34 is Phe, Ile, Leu, Met or Val
  Variant (35)..(35): Xaa in position 35 is Phe, Ile, Leu or Met
  Variant (36)..(50): Xaa in position 36 to 50 is any amino acid
  Variant (51)..(51): Xaa in position 51 is Ala, Gly, Ile, Leu or Pro
PXXXXXRXXXXXXXXXXXXXXXXXXXGXEXEXXXXXXXXXXXXXXXXXXXX

SEQ ID NO: 21384 - protein, 34 aa, Artificial sequence
  Consensus
  Variant (2)..(2): Xaa in position 2 is any amino acid
  Variant (3)..(3): Xaa in position 3 is Phe, Ile, Leu or Val
  Variant (4)..(4): Xaa in position 4 is any amino acid
  Variant (5)..(5): Xaa in position 5 is Asp, Glu or His
  Variant (6)..(11): Xaa in position 6 to 11 is any amino acid
  Variant (12)..(12): Xaa in position 12 is Ile, Leu, Met or Val
  Variant (13)..(13): Xaa in position 13 is any amino acid
  Variant (14)..(14): Xaa in position 14 is Ala or Ser
  Variant (15)..(15): Xaa in position 15 is Glu or Gly
  Variant (16)..(16): Xaa in position 16 is Phe, Ile, Leu or Val
  Variant (17)..(19): Xaa in position 17 to 19 is any amino acid
  Variant (21)..(21): Xaa in position 21 is any amino acid
  Variant (23)..(23): Xaa in position 23 is Ala, Gly or Pro
  Variant (26)..(27): Xaa in position 26 to 27 is any amino acid
  Variant (28)..(28): Xaa in position 28 is Ala, Gly or Ser
  Variant (32)..(32): Xaa in position 32 is Phe or Tyr
  Variant (34)..(34): Xaa in position 34 is Ile or Val
RXXXXXXXXXXXXXXXXXXGXNXEVXXXQWEXQX

SEQ ID NO: 21385 - protein, 33 aa, Artificial sequence
  Consensus
  Variant (2)..(2): Xaa in position 2 is any amino acid
  Variant (3)..(3): Xaa in position 3 is Ala, Gly or Ser
  Variant (5)..(5): Xaa in position 5 is Phe, Trp or Tyr
  Variant (6)..(6): Xaa in position 6 is Phe, Ile or Leu
  Variant (7)..(7): Xaa in position 7 is Leu or Met
  Variant (8)..(8): Xaa in position 8 is any amino acid
  Variant (10)..(10): Xaa in position 10 is any amino acid
  Variant (11)..(11): Xaa in position 11 is Ala, Cys, Gly, Ser or Thr
  Variant (12)..(14): Xaa in position 12 to 14 is any amino acid
  Variant (15)..(15): Xaa in position 15 is Ala, Asp, Glu, Gly or Asn
  Variant (16)..(18): Xaa in position 16 to 18 is any amino acid
  Variant (19)..(19): Xaa in position 19 is Glu, Asn, Ser or Thr
  Variant (20)..(22): Xaa in position 20 to 22 is any amino acid
  Variant (25)..(25): Xaa in position 25 is any amino acid
  Variant (26)..(26): Xaa in position 26 is any or no amino acid
  Variant (28)..(28): Xaa in position 28 is any amino acid
  Variant (29)..(30): Xaa in position 29 to 30 is any or no amino acid
WXXRXXXXRXXXXXXXXXXXXXKPXXGXXXWNG

SEQ ID NO: 21386 - protein, 51 aa, Artificial sequence
  Consensus
  Variant (4)..(4): Xaa in position 4 is any or no amino acid
  Variant (6)..(6): Xaa in position 6 is any or no amino acid
  Variant (9)..(16): Xaa in position 9 to 16 is any amino acid
  Variant (18)..(18): Xaa in position 18 is Ala, Ile or Val
  Variant (19)..(19): Xaa in position 19 is Ala, Gly, Pro or Ser
  Variant (20)..(20): Xaa in position 20 is any amino acid
  Variant (22)..(22): Xaa in position 22 is Ala, Gly or Ser
  Variant (23)..(23): Xaa in position 23 is Ala, Cys, Gly, Ser or Thr
  Variant (25)..(25): Xaa in position 25 is any amino acid
  Variant (27)..(36): Xaa in position 27 to 36 is any amino acid
  Variant (37)..(37): Xaa in position 37 is any or no amino acid
  Variant (39)..(39): Xaa in position 39 is Trp or Tyr
  Variant (40)..(40): Xaa in position 40 is any amino acid
  Variant (45)..(45): Xaa in position 45 is Pro or Thr
  Variant (46)..(46): Xaa in position 46 is Ala, Gly, Asn, Ser or Thr
  Variant (47)..(47): Xaa in position 47 is Ala, Gly, Ser or Val
  Variant (48)..(48): Xaa in position 48 is Asn, Gln or Ser
  Variant (49)..(50): Xaa in position 49 to 50 is any amino acid
  Variant (51)..(51): Xaa in position 51 is Ala or Pro
LTGXHXETXXXXXXXXGXXXRXXSXRXXXXXXXXXXXGXXEDRRXXXXXXX

SEQ ID NO: 21387 - DNA, 393 bp, Escherichia coli
  CDS (1)..(393)
atgcatggccttaacaaagacatcatctttccgttgcagatcttcgccctttcaaataacgtactttacaactttcccgaacaaggagttgtgcccgtgttgtatgttatttacgctcaagacaaagctgatagcctcgaaaaacgcctttccgttcgtccggcacatttagcacgtttacagttactgcatgatgaaggtcgtttgttgacagctggtccaatgccagcggtagacagtaacgatccaggggctgcgggatttactggctcaaccgttattgctgaatttgaatcgctggaagcagctcaggcctgggccgatgctgacccgtacgtagcggcaggagtctatgaacacgtttcagtgaaaccatttaagaaagtgttctga

SEQ ID NO: 21388 - protein, 130 aa, Escherichia coli
MHGLNKDIIFPLQIFALSNNVLYNFPEQGVVPVLYVIYAQDKADSLEKRLSVRPAHLARLQLLHDEGRLLTAGPMPAVDSNDPGAAGFTGSTVIAEFESLEAAQAWADADPYVAAGVYEHVSVKPFKKVF

SEQ ID NO: 21389 - DNA, 297 bp, Mesorhizobium loti MAFF303099
  CDS (1)..(297): transl_table=11
atgctgtttgcttttgtttgcaaggacaagccgggaagcctgcaggtgcgcctcgacacgcggcccgagcatgtcgcctttctcgaagggctgaatgcggacaagaaactggccttcgccggtccgttcctcgatgccgatggcaagcccaatggcagtctcgtggtcgttgaggcgccggatctggccgcggcgcaggccttgtcggccgccgacccctatgccaaggcgggcctgttcgaaagcgtcgaaattcgccagtggaactggacgttcaacaagccggcggctagttaa

SEQ ID NO: 21390 - protein, 98 aa, Mesorhizobium loti MAFF303099
MLFAFVCKDKPGSLQVRLDTRPEHVAFLEGLNADKKLAFAGPFLDADGKPNGSLVVVEAPDLAAAQALSAADPYAKAGLFESVEIRQWNWTFNKPAAS

SEQ ID NO: 21391 - DNA, 297 bp, Vibrio cholerae O1 biovar eltor str. N16961
  CDS (1)..(297): transl_table=11
atgtggtatgtgatttttgcgcaggatgtcgagaactcattagaaaaacgtctgagcgtgcgcccaaaacatctggagcgtttacaacaactgcaagatgaaggccgtctgctcactgcaggccccatgccagccatcgattccgaaaatccgggacaggcaggctttactggctcaaccgtgatcgcggagttcgcctccttagttgaagcacaagcttgggcggatgccgatccttatgtcgcggcgggtgtttatgccaacgtcattgttaaacctttcaaaaaagtattctga

SEQ ID NO: 21392 - protein, 98 aa, Vibrio cholerae O1 biovar eltor str. N16961
MWYVIFAQDVENSLEKRLSVRPKHLERLQQLQDEGRLLTAGPMPAIDSENPGQAGFTGSTVIAEFASLVEAQAWADADPYVAAGVYANVIVKPFKKVF

SEQ ID NO: 21393 - DNA, 300 bp, Pasteurella multocida subsp. multocida str. Pm70
  CDS (1)..(300): transl_table=11
atgatgtactatgttatttttgcacaggataaccctaacaccttagcacaacgtttagccgtgcgtgaaaaacacctcgcccgcttaactcagctccaagcagaagatcgtctattggtcgcgggtcctaatcccgccattgacagtgaaaatccgggtgaggctgggtttactggttcaaccgtgattgctcaatttgccagcttagcggatgcacaacaatgggcgagtgaagatccctatgtggaagcaggcgtatatgcggatgtcatcatcaagccctttaaacgcgttttttaa

SEQ ID NO: 21394 - protein, 99 aa, Pasteurella multocida subsp. multocida str. Pm70
MMYYVIFAQDNPNTLAQRLAVREKHLARLTQLQAEDRLLVAGPNPAIDSENPGEAGFTGSTVIAQFASLADAQQWASEDPYVEAGVYADVIIKPFKRVF

SEQ ID NO: 21395 - DNA, 300 bp, Pseudomonas aeruginosa PAO1
  CDS (1)..(300): transl_table=11
atgctctacgcgatcatcgcccgtgacatccccgcttcccaggaacgccgcctggccagccgcccggcccacctggcccgtctcgaacagctgaaggaagaaggccgcctggtactcgccggcccgcacccggcgatcgacagcaacgacccgggcgccgccggcttcaccggcagcctgatcgtcgccgaattcgattcgctggccgcggcgcagagctgggccgaggccgatccctaccgggccgccggggtgtacgccgaggtggtggtcaagccgttcaagaaagtcctgccctga

SEQ ID NO: 21396 - protein, 99 aa, Pseudomonas aeruginosa PAO1
MLYAIIARDIPASQERRLASRPAHLARLEQLKEEGRLVLAGPHPAIDSNDPGAAGFTGSLIVAEFDSLAAAQSWAEADPYRAAGVYAEVVVKPFKKVLP

SEQ ID NO: 21397 - DNA, 279 bp, Neisseria meningitidis MC58
  CDS (1)..(279): transl_table=11
atgttgctggcaacagacggggaggatgtgcacgaggcgcgtatggcggcacgtcccgaacacctcaaacggctggagacgctgaagtcggaaggccggctgttgacggcaggcccgaatcctttgccggaggactccaaccgcgtttcgggcagtttgattgtggcgcagttcgagtctttggatgcggcgcaggcttgggcggaagacgatccctatgttcatgcaggcgtgtacagcgaagtgctgatcaagccgtttaaagcggtgttcaaataa

SEQ ID NO: 21398 - protein, 92 aa, Neisseria meningitidis MC58
MLLATDGEDVHEARMAARPEHLKRLETLKSEGRLLTAGPNPLPEDSNRVSGSLIVAQFESLDAAQAWAEDDPYVHAGVYSEVLIKPFKAVFK

SEQ ID NO: 21399 - DNA, 291 bp, Neisseria meningitidis Z2491
  CDS (1)..(291): transl_table=11
gtggaatattttatgttgctggcaacagacggggagaatgtgtatgaagcgcgtatggcggcacgtcccgaacacctcaaacggctggagacgctgaagtcggaaggccggctgttgacggcaggcccgaatcctttgccggaggactccaaccgcgtttcgggcagtttgattgtggcgcagttcgagtctttggatgcggcagaggcgtgggcggaagacgatccctatgttcatgcaggcgtgtacagcgaagtgctgatcaagccgtttaaagcggtgttcaaataa

SEQ ID NO: 21400 - protein, 96 aa, Neisseria meningitidis Z2491
MEYFMLLATDGENVYEARMAARPEHLKRLETLKSEGRLLTAGPNPLPEDSNRVSGSLIVAQFESLDAAEAWAEDDPYVHAGVYSEVLIKPFKAVFK

SEQ ID NO: 21401 - DNA, 294 bp, Sinorhizobium meliloti 1021
  CDS (1)..(294): transl_table=11
atgctcttcgcactgctctgcacggacaagcccggcgcgctgcaactcaggctcgacacgcggcccgaccatgtcgcctatctcaacgacctcaatgcccggggcatcctgaagatcgcggggcctttcctcggcgccgacggcaagccgacggggagcctcgtgatcgtcaaggccgatacgctcgaagaggccagggcgctcgccgaggccgatccctatgcgaaggtgggtctcttcgccaatgtcgagatcaaggcctacaactgggtcttcaacaatccggaggcttga

SEQ ID NO: 21402 - protein, 97 aa, Sinorhizobium meliloti 1021
MLFALLCTDKPGALQLRLDTRPDHVAYLNDLNARGILKIAGPFLGADGKPTGSLVIVKADTLEEARALAEADPYAKVGLFANVEIKAYNWVFNNPEA

SEQ ID NO: 21403 - DNA, 282 bp, Caulobacter crescentus CB15
  CDS (1)..(282): transl_table=11
atggccctcttcgccatcctctgcaaggacaagcccggcgcgctggacacccgcctggccacccgccccacccacctcgactatctgaaccagtcgacgggcctgaagctggccggcgcgctgctgggcgatgacggcaatccgatcggctcgctgctgatcgtcgaagccgaggatttggccgccgcccaggcccaggccgacaacgacccgttcaccaccgctggggtgttcgaaagcgtcgaggtgcgtccctggcgcgtggcgatcggcgcgctctga

SEQ ID NO: 21404 - protein, 93 aa, Caulobacter crescentus CB15
MALFAILCKDKPGALDTRLATRPTHLDYLNQSTGLKLAGALLGDDGNPIGSLLIVEAEDLAAAQAQADNDPFTTAGVFESVEVRPWRVAIGAL

SEQ ID NO: 21405 - DNA, 339 bp, Agrobacterium tumefaciens str. C58
  CDS (1)..(339): transl_table=11
atgaacggcggcagcgatcaatcccggctttacgtgcggtttgccgaaagcgatcccaatgcgacggagcagcgggtggcgcagttggaggcgcacaaggcccatttgcgcaatggcgaagcgaagcccgaggggtttcgtatcctggtgtccggtccgatgagcgctggtgacggtggtccgcccgcggcgctcatcatcgccgaggcgcattctcttgaggatgtcatcgccttcagcgacgccgatcccttcgttgttcacggggtctataatcgcattcgtattttgaactggacgccgacgttatcgatgatttccgggctggaatcccgctga

SEQ ID NO: 21406 - protein, 112 aa, Agrobacterium tumefaciens str. C58
MNGGSDQSRLYVRFAESDPNATEQRVAQLEAHKAHLRNGEAKPEGFRILVSGPMSAGDGGPPAALIIAEAHSLEDVIAFSDADPFVVHGVYNRIRILNWTPTLSMISGLESR

SEQ ID NO: 21407 - DNA, 294 bp, Agrobacterium tumefaciens str. C58
  CDS (1)..(294): transl_table=11
atgctgtttgcctttatctgcaaggacaagcccggccatctgaacgtgcgcatggaaacgcgccccgctcatctggagcatctgaacaggctgaacgccgagggcacgctgaagatcgccggcccgtttctggatgccgaaggcaagccgaatggcagccttgtgatcgtggaggcgtccgatatcgatgcggcgaaggctctcgccgatgccgatccctatgccaaggccggcctgttcgagagcgtggatgtgaagccctataactgggtcttcaacaatccgggagcgtga

SEQ ID NO: 21408 - protein, 97 aa, Agrobacterium tumefaciens str. C58
MLFAFICKDKPGHLNVRMETRPAHLEHLNRLNAEGTLKIAGPFLDAEGKPNGSLVIVEASDIDAAKALADADPYAKAGLFESVDVKPYNWVFNNPGA

SEQ ID NO: 21409 - DNA, 300 bp, Xanthomonas axonopodis pv. citri str. 306
  CDS (1)..(300): transl_table=11
gtgtggtacgtaatcgaggggtatgaccggccggacgcattggcggcacggcagcaggcgcggccggcgcatctggcgcgtctgcaggaacttgcggccgccgggcgattgctggtggcgggcccgtgcccggccatcgacgccgaagatccgggtccggccggtttcagcggcagcgtcgtaattgccgagttcgacgctctggacgaggcgcgcgcctgggcagatgccgacccctatgtggaagcgggtgtgtacacgcgcaccgaggtccggccgttccgccgggtattgccatga

SEQ ID NO: 21410 - protein, 99 aa, Xanthomonas axonopodis pv. citri str. 306
MWYVIEGYDRPDALAARQQARPAHLARLQELAAAGRLLVAGPCPAIDAEDPGPAGFSGSVVIAEFDALDEARAWADADPYVEAGVYTRTEVRPFRRVLP

SEQ ID NO: 21411 - DNA, 300 bp, Shewanella oneidensis MR-1
  CDS (1)..(300): transl_table=11
atgtggtatatgatttcagctcaagatgttgaaaacagcttagaaaaacgtttagcagcgcgtcctgcgcatttagcacgcttacaggaactggccgatgaaggtcgcttgctggttgcaggtccacaccccgctatcgatagtgaaaacccaggtgatgcgggttttagcggctcattagtcgtcgcggatttcgattcgttagccacagctcaagcctgggcggatgctgacccttacttcgccgcaggtgtatatcaaagcgttgtggtaaaaccctttaaacgagttctaccctaa

SEQ ID NO: 21412 - protein, 99 aa, Shewanella oneidensis MR-1
MWYMISAQDVENSLEKRLAARPAHLARLQELADEGRLLVAGPHPAIDSENPGDAGFSGSLVVADFDSLATAQAWADADPYFAAGVYQSVVVKPFKRVLP

SEQ ID NO: 21413 - DNA, 333 bp, Pseudomonas putida KT2440
  CDS (1)..(333): transl_table=11
atgacccttctacctccaaacccaaggattgacatgctctacgccattatcgccagcgacgtcgcaaactccctggaaaagcgcctggccgcccgcccggcgcacatcgaacgcctgcagcagctcaaggccgaaggccgcgtggtgttggccggcccgcacccggccatcgacagcaacgacccgggcgaagcgggtttcagcggtagcctgatcgttgccgaattcgaatcgctggcggcggcgcagacctgggccgatgccgacccgtacatcgctgccggcgtgtacgacaaggttgtggtcaagccgttcaagcaagtactgccttga

SEQ ID NO: 21414 - protein, 110 aa, Pseudomonas putida KT2440
MTLLPPNPRIDMLYAIIASDVANSLEKRLAARPAHIERLQQLKAEGRVVLAGPHPAIDSNDPGEAGFSGSLIVAEFESLAAAQTWADADPYIAAGVYDKVVVKPFKQVLP

SEQ ID NO: 21415 - DNA, 300 bp, Pseudomonas syringae pv. tomato str. DC3000
  CDS (1)..(300): transl_table=11
atgctctacgcaatcatcgccactgacgtcgaaaactcgctggaaaagcgcttgagtgtacgccctgcacaccttgaacgcctgaacacgctcaaggatgccggccgcttggtactggccggcccacacccggcggtcgagagcaacgatccgggcgctgccggtttcagcggcagcctggttgtcgccgagttcgaatccttgagcgcagcgaaaacctgggccgaagccgacccgtacgtctcagctggcgtctacgccaacgtcgtggtcaagccgttcaagcaagtcctgccctga

SEQ ID NO: 21416 - protein, 99 aa, Pseudomonas syringae pv. tomato str. DC3000
MLYAIIATDVENSLEKRLSVRPAHLERLNTLKDAGRLVLAGPHPAVESNDPGAAGFSGSLVVAEFESLSAAKTWAEADPYVSAGVYANVVVKPFKQVLP

SEQ ID NO: 21417 - DNA, 297 bp, Vibrio parahaemolyticus RIMD 2210633
  CDS (1)..(297): transl_table=11
atgtggtacgtcatcttttctcaggacgtcgagaactcattggaaaaacgtatgggcgttcgtcctcaacatttagaacgcttgcaacagcttcaagatgaaggtcgtttacttaccgcaggtccaatgccagcgatcgactctgataacccaggagaagccggctttactggttcgacagtcattgctgaattttcctctttggaagatgccaaaacatgggctgacgccgatccttatgtggcggcgggcgtttacgaaaacgtgatcgtaaaaccgttcaaaaaagtgttttaa

SEQ ID NO: 21418 - protein, 98 aa, Vibrio parahaemolyticus RIMD 2210633
MWYVIFSQDVENSLEKRMGVRPQHLERLQQLQDEGRLLTAGPMPAIDSDNPGEAGFTGSTVIAEFSSLEDAKTWADADPYVAAGVYENVIVKPFKKVF

SEQ ID NO: 21419 - DNA, 579 bp, Coxiella burnetii RSA 493
  CDS (1)..(579): transl_table=11
atgtactacgccatttattgtgaagattgcgaggacagttttgaacgccgccgaagcgttcgagaggctcatttacaacgattaaaagaattacacgaaaaaaaccgacttttactcgccggcccactcttaaatgaagacaatgaaaatcctatcgtcggtggggtcaaaggctcgcttatcgtggcagaattcgaaaatattgacgttgctagggaatgggcggcagccgacccttatgttacagctaatgtctattctcgcgttaccatttgtccctttaaaaaagtcttgcctttacacctcatgaaccatcaacaacaagccaaccgcattaaaaaacgactcacggaagtttttaatcctcaaaaattaatcgtaaccgatgaaagtggtaatcacatcggccaccccggcgcccaagaaggcaaaggccattttaaagtagaaatcacagcaaaggcgtttaaaaataaaaatcctatcgaacgccatcgattaatttacgaagccttgagcgatttgatggagacagatattcatgctttacgaatacacgcaacggcagccgaaagttaa

SEQ ID NO: 21420 - protein, 192 aa, Coxiella burnetii RSA 493
MYYAIYCEDCEDSFERRRSVREAHLQRLKELHEKNRLLLAGPLLNEDNENPIVGGVKGSLIVAEFENIDVAREWAAADPYVTANVYSRVTICPFKKVLPLHLMNHQQQANRIKKRLTEVFNPQKLIVTDESGNHIGHPGAQEGKGHFKVEITAKAFKNKNPIERHRLIYEALSDLMETDIHALRIHATAAES

SEQ ID NO: 21421 - DNA, 303 bp, Nitrosomonas europaea ATCC 19718
  CDS (1)..(303): transl_table=11
atgctttatttgatatatggtgaggatgttcccgatagcttggcacagcgggttgccagccgccctgcacatctggccagaattcgtgaattgcaggagcagggaaggctgttactggctggcccatgtccggcgatagatagcattgacccggggccggccgggtttaccggaagtctgatagtggctgagtttgcatcactggatgctgcccgggaatgggcagacgcagacccgtatctgctgtctggcgtgtatgcaaaagtaaccgtcaagccattcaggaaggttctgcctgaatag

SEQ ID NO: 21422 - protein, 100 aa, Nitrosomonas europaea ATCC 19718
MLYLIYGEDVPDSLAQRVASRPAHLARIRELQEQGRLLLAGPCPAIDSIDPGPAGFTGSLIVAEFASLDAAREWADADPYLLSGVYAKVTVKPFRKVLPE

SEQ ID NO: 21423 - DNA, 282 bp, Haemophilus ducreyi 35000HP
  CDS (1)..(282): transl_table=11
atgtattatgttatttttgcacaagataaaccaaatatgttagctactcgtttggctgttcgctcggcacatttagctcgcctaaccgaattacaaactgcgggcaggttattaaccgcggggcctaatcctagtgaagaaggggataatataaccggttcgacagtgattgcggaatttgattcattagcggccgcacaagcttgggctgaacaagatccttatgtcagcgcgggtgtttatcaaaatattatcatcaaaccatttaataacgtgttttaa

SEQ ID NO: 21424 - protein, 93 aa, Haemophilus ducreyi 35000HP
MYYVIFAQDKPNMLATRLAVRSAHLARLTELQTAGRLLTAGPNPSEEGDNITGSTVIAEFDSLAAAQAWAEQDPYVSAGVYQNIIIKPFNNVF

SEQ ID NO: 21425 - DNA, 270 bp, Synechococcus sp. WH 8102
  CDS (1)..(270): transl_table=11
atgtctcgttttgttctctgggggacatacagcgctgatgcgcttgaaaaacgggtgccatttcgccaggaacacctgacacgtctgcagtcattgaaagacgatggtgtcctcatcacccttggaccaactgaggggagtacccacgtgttcggtatttttgaggctgacgcgattggtaccgtccggcagcttgtggaggacgatatctattggaaacaaggaatctggacagcccttgaggtctatccctgggtccaggcattctga

SEQ ID NO: 21426 - protein, 89 aa, Synechococcus sp. WH 8102
MSRFVLWGTYSADALEKRVPFRQEHLTRLQSLKDDGVLITLGPTEGSTHVFGIFEADAIGTVRQLVEDDIYWKQGIWTALEVYPWVQAF

SEQ ID NO: 21427 - DNA, 303 bp, Chromobacterium violaceum ATCC 12472
  CDS (1)..(303): transl_table=11
atgctgtacgccatcatcgcgcgcgaccatcccggcagcctcgagcgccgcatcgcgctgcgcgccgaacaccgcgcgcggctggccgcgctgcaggaccagggccggatgaagctgtccggcccgctgcccgccatcgacagcgccgatcccggcccggccggctactgcggcagcctggtggtggccgagttcgcgtcgctggaagacgcgcgcgcctgggccgcggccgatccgtaccaggcaggcggcgtctacgccagcgtcgacgtccagcccttcgtgcaggttttccccgcatga

SEQ ID NO: 21428 - protein, 100 aa, Chromobacterium violaceum ATCC 12472
MLYAIIARDHPGSLERRIALRAEHRARLAALQDQGRMKLSGPLPAIDSADPGPAGYCGSLVVAEFASLEDARAWAAADPYQAGGVYASVDVQPFVQVFPA

SEQ ID NO: 21429 - DNA, 297 bp, Vibrio vulnificus YJ016
  CDS (1)..(297): transl_table=11
atgtggtatgtcattttttctcaggacgttgagaattcgttggaaaaacgccttagtgtacgcccacaacacctagagagattgcaagcattgcaagacgaaggacgtctattaactgcaggcccgatgccagccatcgactctgacaaccctggtgaagcaggtttcacaggttctaccgtgatcgctgagtttccttctttgcaagaagctcaagcctgggcggatgccgatccttatatcgcagcgggtgtttatgccaatgtgatcgttaaacctttcaagaaagtgttctaa

SEQ ID NO: 21430 - protein, 98 aa, Vibrio vulnificus YJ016
MWYVIFSQDVENSLEKRLSVRPQHLERLQALQDEGRLLTAGPMPAIDSDNPGEAGFTGSTVIAEFPSLQEAQAWADADPYIAAGVYANVIVKPFKKVF

SEQ ID NO: 21431 - DNA, 354 bp, Gibberella zeae PH-1
  CDS (1)..(354)
atggcttcaggcgcagttaccgttcctcctggaaaatacgagtttctcgtcgttgttcatgacaagcccggtatgcttgagaagcgacttgaagttcgaggacagcatttcgataacatgaaacccaatgttgagagcggaaactggaagatgggaggtgccatcctcaactctgttcccaaagacgatagtcccagtagcttggatttcgccggaagcacacttgtctgcattgctgattccgcagaacaagtgcgagagaacttgagcaaggatatctatgccacttctggtgtttgggatatggacaaggtccaaatctaccctttcaaggctgcattcagattcaactaa

SEQ ID NO: 21432 - protein, 117 aa, Gibberella zeae PH-1
MASGAVTVPPGKYEFLVVVHDKPGMLEKRLEVRGQHFDNMKPNVESGNWKMGGAILNSVPKDDSPSSLDFAGSTLVCIADSAEQVRENLSKDIYATSGVWDMDKVQIYPFKAAFRFN

SEQ ID NO: 21433 - DNA, 333 bp, Yarrowia lipolytica CLIB99
  CDS (1)..(333)
atgcaattctttctcgtccaggtcgccgacaagcccggtatgctcgaaaagcgaatgtctctgcgacccgcccatctggaggctctgcagaacaagtctgccggcaacaacttcatcatttgcggcggaggcgttgccgacaagcatcctggcgccggcgaaaccccccaggtgactgggtccacgctgattgtgcagactgacgaccgtgacagcattgtggagaagctcaagggagacgtgtacgccaaggagggcgtttgggatttgaccaatgtcaagattcaggccatgttcatgccccccttctactttaaccgactgctggactag

SEQ ID NO: 21434 - protein, 110 aa, Yarrowia lipolytica CLIB99
MQFFLVQVADKPGMLEKRMSLRPAHLEALQNKSAGNNFIICGGGVADKHPGAGETPQVTGSTLIVQTDDRDSIVEKLKGDVYAKEGVWDLTNVKIQAMFMPPFYFNRLLD

SEQ ID NO: 21435 - DNA, 321 bp, Cryptococcus neoformans var. neoformans JEC21
  CDS (1)..(321)
atgccccgattcctcgtgtacgcccctgatcaccctgactatctggagaagcgactcgctgttaggactgagcaccttgcaagggctaaaattgacgataatgctggtattgtcctttacagcggtcctatccttcctcgcccgggcacgaaagcccgagaagcttctctccctgaaggcaccccaaacatcgcaggaagctttatggtatataagatggacactcttgagcaggtttgggctaggctcaaggaggatgtatactggcgagcagacatttgggacaaggagagaattattgttgaagagttgcttaattga

SEQ ID NO: 21436 - protein, 106 aa, Cryptococcus neoformans var. neoformans JEC21
MPRFLVYAPDHPDYLEKRLAVRTEHLARAKIDDNAGIVLYSGPILPRPGTKAREASLPEGTPNIAGSFMVYKMDTLEQVWARLKEDVYWRADIWDKERIIVEELLN

SEQ ID NO: 21437 - DNA, 303 bp, Acinetobacter sp. ADP1
  CDS (1)..(303): transl_table=11
atgcctttatttgtagtgacctgtaccgataacgaaggtactgttgaaaaacgtttagccactcgtccaaaacatgtcgagcgcttacaaaagctggacgatgaaggcaaactgattgttgcaggcgcaatgccaaaagagtttggtaatccacaagctggtttttacggcagtacaattattgtcgatttcgaaagtcgtgaagctttagatgcatggttacaagaggagccttttctaattgaaggcatttatgcacatattgatgtcaagccattcaataaagcatttccgaaagagtga

SEQ ID NO: 21438 - protein, 100 aa, Acinetobacter sp. ADP1
MPLFVVTCTDNEGTVEKRLATRPKHVERLQKLDDEGKLIVAGAMPKEFGNPQAGFYGSTIIVDFESREALDAWLQEEPFLIEGIYAHIDVKPFNKAFPKE

SEQ ID NO: 21439 - DNA, 297 bp, Erwinia carotovora subsp. atroseptica SCRI1043
  CDS (1)..(297): transl_table=11
atgctctatgtcatttatgctgaagataatgttgattcattagcaaaacgcctgtcggtaagaccagaccatcttgcccgtttacaggcattacgcgatcagggccgactgattaccgctggcccgttacctgctatcgacagcgaagatcccggtcaggctggttttagcggttccgtgatcatcgctgaattcgcatcgctggatgaggcaacagcatgggccaacgccgacccctacatcgcagccggtgtctatcaacgcgtcagtgtgaaacccttcaaaaaagtgttttaa

SEQ ID NO: 21440 - protein, 98 aa, Erwinia carotovora subsp. atroseptica SCRI1043
MLYVIYAEDNVDSLAKRLSVRPDHLARLQALRDQGRLITAGPLPAIDSEDPGQAGFSGSVIIAEFASLDEATAWANADPYIAAGVYQRVSVKPFKKVF

SEQ ID NO: 21441 - DNA, 297 bp, Yersinia pseudotuberculosis IP 32953
  CDS (1)..(297): transl_table=11
atgttttacgtcatatttgctacagatgtacctaactcattggagaagcgaatgtctgtgcgtcctgcgcatttggctcgcttacaggctttacaggatcaaggccgtttactgaccgctggacctaacccagccatcgacagtgccgatcccggtaatgccggctttactggctcgacagtgattgctgacttttcctcattgcaagaagctgagatatgggctgaacaagatccttatgttgccgcaggtgtttaccagtcggtaattattaaaccctttaaacgggtgttttga

SEQ ID NO: 21442 - protein, 98 aa, Yersinia pseudotuberculosis IP 32953
MFYVIFATDVPNSLEKRMSVRPAHLARLQALQDQGRLLTAGPNPAIDSADPGNAGFTGSTVIADFSSLQEAEIWAEQDPYVAAGVYQSVIIKPFKRVF

SEQ ID NO: 21443 - DNA, 285 bp, Mannheimia succiniciproducens MBEL55E
  CDS (1)..(285): transl_table=11
atgatgtactacgttatttttgcacaagataaaccaaacacacttgaaaaacgtctggaagttcgcccgcaacatttagcccgtttagaacaattaaaaacggaaggccgtttgctcaccgccggtccgaatcccagcgaagacggcaaaagcgtaacaggttccaccgttatcgctcaattcgactcattagccgaggctcaagcctgggcacaacaagatccttatgttgatgccggcgtttatggcgaggttatcattaaaccttttaacaaagtgttctag

SEQ ID NO: 21444 - protein, 94 aa, Mannheimia succiniciproducens MBEL55E
MMYYVIFAQDKPNTLEKRLEVRPQHLARLEQLKTEGRLLTAGPNPSEDGKSVTGSTVIAQFDSLAEAQAWAQQDPYVDAGVYGEVIIKPFNKVF

SEQ ID NO: 21445 - DNA, 303 bp, Methylococcus capsulatus str. Bath
  CDS (1)..(303): transl_table=11
gtgctgtatgccatactttgcgaagatcgccccggcagtctcgagatgcggaagggagcccgcccggctcatttgcagcggctcgaccggttgcaggacgaaggccggctggtgctggcggggccgcatccggcgatcgactgcgaggatccgggtgaggccgggttcaccggcagcctgatcgtcgcggaatttccgagcctggaagacgcgcaacgctgggcagacgaagatccttacggtcgcgctggcgtctatgcccgcgtggtggtcaaaccttttcggcaggtatacccgaaatga

SEQ ID NO: 21446 - protein, 100 aa, Methylococcus capsulatus str. Bath
MLYAILCEDRPGSLEMRKGARPAHLQRLDRLQDEGRLVLAGPHPAIDCEDPGEAGFTGSLIVAEFPSLEDAQRWADEDPYGRAGVYARVVVKPFRQVYPK

SEQ ID NO: 21447 - DNA, 300 bp, Photobacterium profundum SS9
  CDS (1)..(300): transl_table=11
atgtggtatgtgattttttctcaggatgtagaaaatagtttagagcgccgtctaagtgttcgtgaaaaacatcttgcgcgcctacaagcactacaagctgaaggacgtcttcttgttgcaggcccaatgccagccattgatagcgagaaccctgatgaagcgggctttacaggttctaccgttatcgctgaattcaattcattagaagatgcaaaaacatgggcagatgcagacccatacattgcagctggtgtttacgctaatgtgattgtaaaaccattcaaaaaagtactgccttaa

SEQ ID NO: 21448 - protein, 99 aa, Photobacterium profundum SS9
MWYVIFSQDVENSLERRLSVREKHLARLQALQAEGRLLVAGPMPAIDSENPDEAGFTGSTVIAEFNSLEDAKTWADADPYIAAGVYANVIVKPFKKVLP

SEQ ID NO: 21449 - DNA, 297 bp, Salmonella enterica subsp. enterica serovar Paratyphi A str. ATCC
  CDS (1)..(297): transl_table=11
gtgctgtatgttatttacgctcaggataatgccaactcgcttgaaaaacgcctctcggtacggcccgcgcatctggcgcgcctgcaacttctgcatgatgaagggcgattattaactgccgggccgatgcccgcagtggacagtaacgatcctggggtagccggatttaccgggtcaacggtgattgctgaatttgaatctttagaagcagcgcaatcctgggctgatgcggatccctacgtcgcagcgggcgtctatgcgcaggtttcggtcaaaccgtataagaagatcttttga

SEQ ID NO: 21450 - protein, 98 aa, Salmonella enterica subsp. enterica serovar Paratyphi A str. ATCC
MLYVIYAQDNANSLEKRLSVRPAHLARLQLLHDEGRLLTAGPMPAVDSNDPGVAGFTGSTVIAEFESLEAAQSWADADPYVAAGVYAQVSVKPYKKIF

SEQ ID NO: 21451 - DNA, 303 bp, Idiomarina loihiensis L2TR
  CDS (1)..(303): transl_table=11
atgtggtttgttattttcgcagaagatcatgagaactctctggaaggtcgtaagcaggcgcgtcctgctcatcttgaacgcttaaaagcgttgcaaaatgacggccgtctgctcgtcgcgggcccctgtccggccatcgcggaactagacccgggcgtgcttggttttaccggctctgtggtcatcgctgaatttgagactctggaagaagcagagcaatgggctaacgacgacccatactggcaagccggtgtctataaaaaagcaacggttaagccatttaacgccgttttaccgaactaa

SEQ ID NO: 21452 - protein, 100 aa, Idiomarina loihiensis L2TR
MWFVIFAEDHENSLEGRKQARPAHLERLKALQNDGRLLVAGPCPAIAELDPGVLGFTGSVVIAEFETLEEAEQWANDDPYWQAGVYKKATVKPFNAVLPN

SEQ ID NO: 21453 - DNA, 300 bp, Azoarcus sp. EbN1
  CDS (1)..(300): transl_table=11
atgctttacgtactcctcggcgaagatgcgccgggttcgcttgaagcgcgcacgagcgcccgtccggcccatctggcccgcctggagggattgcgcgatgaaggacgcctgctgatggcaggcccgctcccggcgatagattccccggatcccggcccggccggtttcttcggcagcctcgtcgtcgccgagttcgcgtcccaaggcgaggccgagcgctggctggccgacgatccctatgtcaaacagggcgtgttcgcgcggatcaccgtgaaacccttcaagaaggtgctgccttga

SEQ ID NO: 21454 - protein, 99 aa, Azoarcus sp. EbN1
MLYVLLGEDAPGSLEARTSARPAHLARLEGLRDEGRLLMAGPLPAIDSPDPGPAGFFGSLVVAEFASQGEAERWLADDPYVKQGVFARITVKPFKKVLP

SEQ ID NO: 21455 - DNA, 270 bp, Silicibacter pomeroyi DSS-3
  CDS (1)..(270): transl_table=11
atgctggttgccctgatcgcccgcgacaaggacggcgccctgcaaacccggctcgacaaccgcgccgcgcatctggcctatatcgaggaaaccggcgttgtctcgcaggccggccccttgctggacggcgacgcgatgatcggctctctggtcatcctcgatgtaagcgacctggccgccgccgaggactgggccgccaacgacccctatgccaaggccgggctgttccagtcggtgcagctgatcccgtggaaaaaggtgatcggctga

SEQ ID NO: 21456 - protein, 89 aa, Silicibacter pomeroyi DSS-3
MLVALIARDKDGALQTRLDNRAAHLAYIEETGVVSQAGPLLDGDAMIGSLVILDVSDLAAAEDWAANDPYAKAGLFQSVQLIPWKKVIG

SEQ ID NO: 21457 - DNA, 513 bp, Xanthomonas oryzae pv. oryzae KACC10331
  CDS (1)..(513): transl_table=11
atgcggcgacggaacagcgaggaggtcgtctacgcgaaccggcggtgggcagcgaatcggtcgtcgagaagaggggtgagcctgggccgacgggccgctgcgtccggttgcgtgtgcagtggtgccaagggtaatgcgtgcgcgggggcggtgtccagcggccaggcggctagaatcggcaggtggatcttcaagtccgaggcgaggtggcgtgtgtggtacttaatcgaagggtatgaccgggccgacgcattggctgcacggcagcaggcgcggccggcgcatctggcgcgtttgcaggcgcttgcggccgccggtcggttgctggtggcgggcccgtgcccggccatcgatgccgaagatccgggcccgtccggtttcagcggcagcgtggtgattgccgaattcgacgcgctggaagatgcgcgcgcctgggccaatgccgacccgtacgtggaagcgggtgtgtatgcgcgcaccgaggtccgcccgttccgccgggtgttgccatga

SEQ ID NO: 21458 - protein, 170 aa, Xanthomonas oryzae pv. oryzae KACC10331
MRRRNSEEVVYANRRWAANRSSRRGVSLGRRAAASGCVCSGAKGNACAGAVSSGQAARIGRWIFKSEARWRVWYLIEGYDRADALAARQQARPAHLARLQALAAAGRLLVAGPCPAIDAEDPGPSGFSGSVVIAEFDALEDARAWANADPYVEAGVYARTEVRPFRRVLP

SEQ ID NO: 21459 - DNA, 303 bp, Vibrio fischeri ES114
  CDS (1)..(303): transl_table=11
atgtggtatgtgattttttctcaagatgttgaaaacagcttagaacgtcgtttaagtgttcgtgaaaaacatctagagcgccttgctcaactacagaatgaaggccgtttattagtagcaggacctatgcctgcaattgattctgaaaatccaggagaagcaggcttcactggttcaacagttattgctgattttgcttcattagaagcagctcaaacttgggctgataatgacccttatattgatgctggtgtttacgcaaaagtaattgttaagccatttaaaaaagtgcttccagcttaa

SEQ ID NO: 21460 - protein, 100 aa, Vibrio fischeri ES114
MWYVIFSQDVENSLERRLSVREKHLERLAQLQNEGRLLVAGPMPAIDSENPGEAGFTGSTVIADFASLEAAQTWADNDPYIDAGVYAKVIVKPFKKVLPA

SEQ ID NO: 21461 - DNA, 291 bp, Neisseria gonorrhoeae FA 1090
  CDS (1)..(291): transl_table=11
gtggaatattttatgttgctggcaacagacggggaggatgtgcatgaagcgcgtatggcggcacgtcccgaacactttaaacggctggaaacgctgaaatcggaaggccgtctgctgacggcaggcccaaacctgctgccggacaatcccgaacgtgtttcgggcagcttgattgtggcacagttcgagtctttggatgcggcgcaggcttgggctgaagacgatccctatgttcatgccggcgtgtacagcgaagtgctgatcaagccgtttaaagcggtgttcaaataa

SEQ ID NO: 21462 - protein, 96 aa, Neisseria gonorrhoeae FA 1090
MEYFMLLATDGEDVHEARMAARPEHFKRLETLKSEGRLLTAGPNLLPDNPERVSGSLIVAQFESLDAAQAWAEDDPYVHAGVYSEVLIKPFKAVFK

SEQ ID NO: 21463 - DNA, 291 bp, Brucella abortus biovar 1 str. 9-941
  CDS (1)..(291): transl_table=11
atgctgtttgccctcctgtgcaatgacaagcccgaccatctgcaagtgcgtctcgatacccgcccggcgcatctggactatctgaagagcctcggcgacgccctgaaattcgccggtccctttctcggcgaagacggcaagcccaatggcagtctcgtggtcgttgaagccgccgacaaggccgcagccgaaaaaatcgccgccagcgacccttatgcgcttgccggcctgttcaaggatgtgaccgtgcgcccatggaactgggccatcaacaaccctgtcaacgcttga

SEQ ID NO: 21464 - protein, 96 aa, Brucella abortus biovar 1 str. 9-941
MLFALLCNDKPDHLQVRLDTRPAHLDYLKSLGDALKFAGPFLGEDGKPNGSLVVVEAADKAAAEKIAASDPYALAGLFKDVTVRPWNWAINNPVNA

SEQ ID NO: 21465 - DNA, 300 bp, Pseudomonas syringae pv. syringae B728a
  CDS (1)..(300): transl_table=11
atgctctacgcaatcatcgccaccgacgtcgaaaactcgctggaaaaacgcctcagcgttcgcccggcacacctggagcgcctcaacgcgctcaaggatgaaggccgtctggtgctggccggtccacacccggcagtcgacagtaacgacccgggcgctgccggtttcagcggcagcctgatcgttgcggagttcgaatcgcaaagcgccgccaaggcgtgggccgaagccgatccgttcgtggccgcaggcgtctacgccaacgtcgtggtcaagccgttcaagcaggttatgccctga

SEQ ID NO: 21466 - protein, 99 aa, Pseudomonas syringae pv. syringae B728a
MLYAIIATDVENSLEKRLSVRPAHLERLNALKDEGRLVLAGPHPAVDSNDPGAAGFSGSLIVAEFESQSAAKAWAEADPFVAAGVYANVVVKPFKQVMP

SEQ ID NO: 21467 - DNA, 300 bp, Xanthomonas campestris pv. campestris str. 8004
  CDS (1)..(300): transl_table=11
gtgtggtacgtaatcgaaggctatgaccgggccgatgccctggcggcacggcagcaggcgagaccggcgcatctgcagcgcctgcaggcactgacggcagaagggcggctgctggtggccggcccatgcccggcaatcgacgccgaggacccgggcccggccggctttagcggcagcgtgatgattgccgagttcgcttcactggaggcagcacgcgcgtgggccgatgccgacccgtatgtggcggccggggtgtatgcgcgggtcgacgtccgcccgttccggcgggtgctgccatga

SEQ ID NO: 21468 - protein, 99 aa, Xanthomonas campestris pv. campestris str. 8004
MWYVIEGYDRADALAARQQARPAHLQRLQALTAEGRLLVAGPCPAIDAEDPGPAGFSGSVMIAEFASLEAARAWADADPYVAAGVYARVDVRPFRRVLP

SEQ ID NO: 21469 - DNA, 300 bp, Pseudomonas fluorescens Pf-5
  CDS (1)..(300): transl_table=11
atgctttacgcaatcattgccacagacgtcgccaactccctggaaaaacgcctggccaaccggccggcgcacctggagcggctgcaagtgctcaaggaccaggggcgcgtggtactcgccggcccgcacccggcgattgacagcaatgacccgggcgcggccggtttcagcggcagcctgatcgtcgccgagttcgactccctgagcgccgcccaggcctgggccgacgccgacccgttcgtgacctgcggcgtctacgcccatgtactggtcaagccgttcaagcaatcgatgccgtaa

SEQ ID NO: 21470 - protein, 99 aa, Pseudomonas fluorescens Pf-5
MLYAIIATDVANSLEKRLANRPAHLERLQVLKDQGRVVLAGPHPAIDSNDPGAAGFSGSLIVAEFDSLSAAQAWADADPFVTCGVYAHVLVKPFKQSMP

SEQ ID NO: 21471 - DNA, 330 bp, Psychrobacter arcticum 273-4
  CDS (1)..(330): transl_table=11
atgtccttattcgccattattggtcacgacgtagcaggcagtagcgcccaacgtcagctgacgcgcccagagcacgttgaacgcttacaactattgaatcatgagcagcggttgattatcgcaggaccaacccctatcgagcacggcaaaaatgagatgtcaggcagccttatcatcgctgatttcgattcgcttgaggcggctcaagattgggcaagcgcggagccgtatttgcgtgacggtgtctacagtcatgtcgacatcaagccatttattcaggcgttaccagcagtgaatgtcagtacaacgaatgaggtaacatcatcgtga

SEQ ID NO: 21472 - protein, 109 aa, Psychrobacter arcticum 273-4
MSLFAIIGHDVAGSSAQRQLTRPEHVERLQLLNHEQRLIIAGPTPIEHGKNEMSGSLIIADFDSLEAAQDWASAEPYLRDGVYSHVDIKPFIQALPAVNVSTTNEVTSS

SEQ ID NO: 21473 - DNA, 303 bp, Colwellia psychrerythraea 34H
  CDS (1)..(303): transl_table=11
atgttttatgttatatacagtgaagatgttgaaaactcactcagcttacgcctatctgttcgcgacaagcatattggacgtttaaaagacttacaagcgcaaggaaaactgttactagcgggtccatgtccagctattgatagtgaagaacctggtgaggctggatttactggttcattaattgttgcagaatttgatagcttagctgccgcacaaacatgggcagatgaagatccttatatcagtgctggtgtttataaaaaagtaacggttaaaccttataaaaaagtattacctgcttaa

SEQ ID NO: 21474 - protein, 100 aa, Colwellia psychrerythraea 34H
MFYVIYSEDVENSLSLRLSVRDKHIGRLKDLQAQGKLLLAGPCPAIDSEEPGEAGFTGSLIVAEFDSLAAAQTWADEDPYISAGVYKKVTVKPYKKVLPA

SEQ ID NO: 21475 - DNA, 300 bp, Pseudomonas syringae pv. phaseolicola 1448A
  CDS (1)..(300): transl_table=11
atgctctacgcaatcatcgccaccgacgtcgaaaactcgctggaaaaacgcctcagcgtgcgcccggcacaccttgagcgcctaaacgcgctcaaggatgaaggccgtctggtgctggccggcccacacccggcagtcgacagcaacgacccgggtgctgccggtttcagcggcagcctgatcgtggccgagtttgaatcgcaaagcgccgccaaggcgtgggccgaagccgatccatatgttgcggcaggcgtctatgccaatgtcgtggtcaagccattcaagctcgtcctgccctga

SEQ ID NO: 21476 - protein, 99 aa, Pseudomonas syringae pv. phaseolicola 1448A
MLYAIIATDVENSLEKRLSVRPAHLERLNALKDEGRLVLAGPHPAVDSNDPGAAGFSGSLIVAEFESQSAAKAWAEADPYVAAGVYANVVVKPFKLVLP

SEQ ID NO: 21477 - DNA, 303 bp, Dechloromonas aromatica RCB
  CDS (1)..(303): transl_table=11
atgctctatgcgatcattgctgaagacaaggccggcacgctggacaagcgcctcgccgcccgtcctgcccacctggagcgcctgctggccttgcaatccgaagctcgcctgatcctggccggcccctgtccggccatcgattcgcccgacccgggcccagccggcttttcaggcagcatcatcatcgccgaattcggctcgctgactgcggcccaaacctgggccgatgccgatccctatatcgcggccggtgtttacgagaaagtcaccatcaagccattcaagaaggcactgccggcgtga

SEQ ID NO: 21478 - protein, 100 aa, Dechloromonas aromatica RCB
MLYAIIAEDKAGTLDKRLAARPAHLERLLALQSEARLILAGPCPAIDSPDPGPAGFSGSIIIAEFGSLTAAQTWADADPYIAAGVYEKVTIKPFKKALPA

SEQ ID NO: 21479 - DNA, 300 bp, Ralstonia eutropha JMP134
  CDS (1)..(300): transl_table=11
atgtatttcgctattgtagccatcgaccgccccggggccaccgatgtcagaaccagcactcgccccgctcaccgcgaatacttgggtacccctcatcctggagtgacttacaggctgggcggaccacttctagcgcctgacggcgcgacgatgatcggttcgttgattgtgatcgaggcgccagatctggtcaccgctgaacgattttcggccggcgatccctacagaaaggcggatctattcgcggaggtctcggtcaggccttgggattgggggtcaggcaatccggacaaaggatga

SEQ ID NO: 21480 - protein, 99 aa, Ralstonia eutropha JMP134
MYFAIVAIDRPGATDVRTSTRPAHREYLGTPHPGVTYRLGGPLLAPDGATMIGSLIVIEAPDLVTAERFSAGDPYRKADLFAEVSVRPWDWGSGNPDKG

SEQ ID NO: 21481 - DNA, 303 bp, Ralstonia eutropha JMP134
  CDS (1)..(303): transl_table=11
atgctttacgcattccacctgatcgacaaacccggtgttggcgagttgcgtctgaaggtccgcccggatcacaagatctacctgggcgccgtcaaggaccagatcgcgtttgccggtccgctgcttgccgaagacggcgagaccatggtcggcagcctgctggtgatcgatttcccgtcactggccgccgcacgcgagtggctgtcccgcgagcccttcacgcgtgccggcatctatggcgccagcagcgtgctggccttcaacaatatgtggccgcagaagaccggctttcccgccgcctga

SEQ ID NO: 21482 - protein, 100 aa, Ralstonia eutropha JMP134
MLYAFHLIDKPGVGELRLKVRPDHKIYLGAVKDQIAFAGPLLAEDGETMVGSLLVIDFPSLAAAREWLSREPFTRAGIYGASSVLAFNNMWPQKTGFPAA

SEQ ID NO: 21483 - DNA, 294 bp, Ralstonia eutropha JMP134
  CDS (1)..(294): transl_table=11
atgaagttcgccgccatcgtcgaatacgtaaacgagcctgagcgccttgcgcaattccggcccgcccatcgcgcctatctgcaagcgctgttgcaacacggacggctggtgatcgccggcccgttcgccgacggcagcggcgcgctgttcgtgtatgaagtcgccaatgaaagcgaggcatcgaagctcgctgccaatgatccgttcgcgaaagcgtcgctgttccgaagcgttgtcatgaagccctggaagctcgtgttcgcgagccaggacaacctgaatctcccgctgtga

SEQ ID NO: 21484 - protein, 97 aa, Ralstonia eutropha JMP134
MKFAAIVEYVNEPERLAQFRPAHRAYLQALLQHGRLVIAGPFADGSGALFVYEVANESEASKLAANDPFAKASLFRSVVMKPWKLVFASQDNLNLPL

SEQ ID NO: 21485 - DNA, 303 bp, Thiobacillus denitrificans ATCC 25259
  CDS (1)..(303): transl_table=11
atgttttacgcgatagtcggacaggacgcggaagggagtctcaccaagcgcgcggccgcccgccccgctcaccttgagcgcctgcagcgtttgcaggacgaaggccgcctgctgctcgccggccccttccctgcgatcgatgccctcgaccccggcgcggccggcttctccggcagcctcatcgtcgccgagttcggcacgctcgacgacgcgcaggcctgggcgagcgccgacccgtacgtcgcggcgggcgtctacagcgaggtcagcgtcaagcccttcaagaaagtcctgccggcatga

SEQ ID NO: 21486 - protein, 100 aa, Thiobacillus denitrificans ATCC 25259
MFYAIVGQDAEGSLTKRAAARPAHLERLQRLQDEGRLLLAGPFPAIDALDPGAAGFSGSLIVAEFGTLDDAQAWASADPYVAAGVYSEVSVKPFKKVLPA

SEQ ID NO: 21487 - DNA, 273 bp, Rhodobacter sphaeroides 2.4.1
  CDS (1)..(273)
atgcgcgtggccctcatctgcaccgacaaggccggtgcgctccagacccggctcgacaatcgctcggcccatctggcctatatcgccgaaaccggcgtggtcgagatggcgggcccgttcctgagccccgaggggcagatgaccggctcgctcgtggtgctcgaggtgggatcgctggccgaggccgaggcctgggccgcaggcgatccctatgcgcaggccggcctcttcgagagcgtcgccatctccgagtggaagaaggtggtgggctga

SEQ ID NO: 21488 - protein, 90 aa, Rhodobacter sphaeroides 2.4.1
MRVALICTDKAGALQTRLDNRSAHLAYIAETGVVEMAGPFLSPEGQMTGSLVVLEVGSLAEAEAWAAGDPYAQAGLFESVAISEWKKVVG

SEQ ID NO: 21489 - DNA, 300 bp, Haemophilus somnus 129PT
  CDS (1)..(300)
atgatgtactatgttatttttgctcaagataaacctgatacattagcattacgcttatctgtcagagaacaacaccttgaacgtttaaaacaattacaagctgaagataggttattaactgcgggacctaatcctgctatagatgatgaaaatcccggagaagcaggttttaccggttcaactgttattgcaaaattcaatagcttagaagaagcggagcaatgggcaaatacagatccttatgttgcagccggtgtatatgataaagtcatcattaaaccatttaaaaaagtcttttaa

SEQ ID NO: 21490 - protein, 99 aa, Haemophilus somnus 129PT
MMYYVIFAQDKPDTLALRLSVREQHLERLKQLQAEDRLLTAGPNPAIDDENPGEAGFTGSTVIAKFNSLEEAEQWANTDPYVAAGVYDKVIIKPFKKVF

SEQ ID NO: 21491 - DNA, 282 bp, Actinobacillus pleuropneumoniae serovar 1 str. 4074
  CDS (1)..(282)
atgtattacgttatttttgcacaagataatccgaatatgcttgagaagcgtttggaagtacgcccggctcatttggctcgtttagaaaaattgcaggcggaaggtcgcttattaacgtccggtcctaacccgacggaagacggcacaagtatcaccggttctaccgtgattgccgaattcgattcgttagccgatgctcaaatctgggcttcggaagatccttatgtagaagccggcgtttacggtgatgtgattatcaagccatttagaaaggtgttctaa

SEQ ID NO: 21492 - protein, 93 aa, Actinobacillus pleuropneumoniae serovar 1 str. 4074
MYYVIFAQDNPNMLEKRLEVRPAHLARLEKLQAEGRLLTSGPNPTEDGTSITGSTVIAEFDSLADAQIWASEDPYVEAGVYGDVIIKPFRKVF

SEQ ID NO: 21493 - DNA, 297 bp, Haemophilus influenzae R2846
  CDS (1)..(297)
atgtactatgttatttttgcccaagatattcccaatacgttagaaaagcgtcttgccgtacgcgagcaacacttggctcgtttaaaacaacttcaagcggaaaatcgcttactgacagcaggcccaaatcctgcaattgatgatgaaaatccgagtgaagctgggtttacaggctcaaccgttattgctcaatttgaaaatctacaagaggcaaaagactgggcggcacaagatccttatgtagaagctggtgtatatgcggatgttattgtaaagccgtttaaaaaagtcttttaa

SEQ ID NO: 21494 - protein, 98 aa, Haemophilus influenzae R2846
MYYVIFAQDIPNTLEKRLAVREQHLARLKQLQAENRLLTAGPNPAIDDENPSEAGFTGSTVIAQFENLQEAKDWAAQDPYVEAGVYADVIVKPFKKVF

SEQ ID NO: 21495 - DNA, 312 bp, Burkholderia cepacia R18194
  CDS (1)..(312)
atggcgcgattctttgcggtgtttgcgacggaccagccgggcatgcgcgacgtgcgcgatcgcgtacggccgattcatcggacttacctgcgctcggccgatcagcacggcgtggtggtgcggctcggtggcccgacgctggacccgcacggcgatgcgatgaacggcacgctgctcgtcgtggaagcggacgacattcaggcagtgatgcagttcatcggcaacgatccgtatgtgaaggaagggctgttctcgcacgtggaagtgcgtccgtgggactggagcctcggtaaccccgagcatcgagtgtga

SEQ ID NO: 21496 - protein, 103 aa, Burkholderia cepacia R18194
MARFFAVFATDQPGMRDVRDRVRPIHRTYLRSADQHGVVVRLGGPTLDPHGDAMNGTLLVVEADDIQAVMQFIGNDPYVKEGLFSHVEVRPWDWSLGNPEHRV

SEQ ID NO: 21497 - DNA, 300 bp, Rubrivivax gelatinosus PM1
  CDS (1)..(300)
atgctcttcgccctgcacatgatcgacaagcccgccagcctcgagctgcgccagcggctgcgcccggcgcaccgggcgcacctcgatctgatcgccgaccgcctggcgatcgccggtccgctgctcgacgagggcggcgcgatggccggcagcctgatcgtcgccgagttcgccgaccgcgccgcggtcgaggactggctggcgaacgagcccttcacggtcggagggctctacgcgcgggtcgacatccggccgttccgcaacgtgtacccgcagcgcgcggggttcgccgaggtctga

SEQ ID NO: 21498 - protein, 99 aa, Rubrivivax gelatinosus PM1
MLFALHMIDKPASLELRQRLRPAHRAHLDLIADRLAIAGPLLDEGGAMAGSLIVAEFADRAAVEDWLANEPFTVGGLYARVDIRPFRNVYPQRAGFAEV

SEQ ID NO: 21499 - DNA, 300 bp, Pseudomonas fluorescens PfO-1
  CDS (1)..(300)
atgctctacgccatcattgccaccgacgtcgccaactccctggaagcccgcctcgctgcgcgcccggcacaccttgaacgcctgcaagtgctcaagggcgaaggccgcatcgtgctggccggcccgcacccggcggtcgacagcaatgatccgggcgcagcgggtttcagcggcagcctgatcgttgccgaattcgactccctgagcgcggcgcaagcctgggccgatgccgatccttacatcgccgccggcgtctatgccaacgtgatcgtcaagccgttcaagcaagtcctgccgtaa

SEQ ID NO: 21500 - protein, 99 aa, Pseudomonas fluorescens PfO-1
MLYAIIATDVANSLEARLAARPAHLERLQVLKGEGRIVLAGPHPAVDSNDPGAAGFSGSLIVAEFDSLSAAQAWADADPYIAAGVYANVIVKPFKQVLP

SEQ ID NO: 21501 - DNA, 360 bp, Rhodospirillum rubrum
  CDS (1)..(360)
atggttgcgccttgccgcggcctcgccctggcggcgatcggccgttcccttccttgcggagcccttcccatgttgtttgccgtgcattgcgttgataagcccgaccacgccgccgttcgcctggagaaccgcgccgcccatttggactacgcccatggctgggatgcgaagatcgtctttggcggtccgctgctctcgggcgatggcaccggcatggtcggcagcctgctggttcttgatgtcgccgaccgcgccgaggccgaggccttttgcgccggcgacccttatggcaaggccgggctgttcgaggcggtgatcatccgcccctataagatcgttctgggtacccgcgccggctga

SEQ ID NO: 21502 - protein, 119 aa, Rhodospirillum rubrum
MVAPCRGLALAAIGRSLPCGALPMLFAVHCVDKPDHAAVRLENRAAHLDYAHGWDAKIVFGGPLLSGDGTGMVGSLLVLDVADRAEAEAFCAGDPYGKAGLFEAVIIRPYKIVLGTRAG

SEQ ID NO: 21503 - DNA, 300 bp, Microbulbifer degradans 2-40
  CDS (1)..(300)
atgctatttgcaataatcagccaagacgtacccaacagcttacccctaagaaaaaccgcacgagccgaccatattgcgcgattaacagagttgcgcgatgaaggccgcttgatactagctggcccccaccctgcaattgagtcagacgaccctggcgacgctgggtttaccggtagcttggtagttgcagaattcgccagcctacaagacgcacaaagctgggcagatagcgacccttacattaaagctggcgtatatgaacgagttaccgttaagccattcaaaaaagtattaccctag

SEQ ID NO: 21504 - protein, 99 aa, Microbulbifer degradans 2-40
MLFAIISQDVPNSLPLRKTARADHIARLTELRDEGRLILAGPHPAIESDDPGDAGFTGSLVVAEFASLQDAQSWADSDPYIKAGVYERVTVKPFKKVLP

SEQ ID NO: 21505 - DNA, 279 bp, Anaeromyxobacter dehalogenans 2CP-C
  CDS (1)..(279): transl_table=11
atgtacttcgcgctcctgtacgagacggtccccgactacgtccagcgccgggcggcgttccgcgccgagcacctcgcggcggcccagcaggcccggcaggagggacggctcctcctcgccggcgcgttcgatccgcccgacggcgcgctcctcgtgttcaaggccgcgagcgccgaggaggtcgaggcgttcgcgcgcgccgacccgtacgtgcggaacggcctggtcacgtcgtggcgcgtccggccgtggacggtggtggtgggcggggaggggtag

SEQ ID NO: 21506 - protein, 92 aa, Anaeromyxobacter dehalogenans 2CP-C
MYFALLYETVPDYVQRRAAFRAEHLAAAQQARQEGRLLLAGAFDPPDGALLVFKAASAEEVEAFARADPYVRNGLVTSWRVRPWTVVVGGEG

SEQ ID NO: 21507 - DNA, 300 bp, Azotobacter vinelandii AvOP
  CDS (1)..(300): transl_table=11
atgctctacgccattatcgccaccgacgtggcaaactccctggacaagcgcctgggcgctcgtcccgcccatctcgcccgtctgcagcaactgaagcaggaaggccgcctggtgctggccggcccgcaccccgccgtggacagctccgatcccggccccgccggcttcagcggcagcctggtggtcgccgagttcgaatccctggaggccgcccgcgcctgggccgatgccgatccctattgcgccgccggcgtgtatgccgaggtcagggtcaaacccttcaacaaggtcctgccctga

SEQ ID NO: 21508 - protein, 99 aa, Azotobacter vinelandii AvOP
MLYAIIATDVANSLDKRLGARPAHLARLQQLKQEGRLVLAGPHPAVDSSDPGPAGFSGSLVVAEFESLEAARAWADADPYCAAGVYAEVRVKPFNKVLP

SEQ ID NO: 21509 - DNA, 312 bp, Burkholderia cenocepacia HI2424
  CDS (1)..(312): transl_table=11
atggcgcgttttttcgcggtgtttgccaccgaccaaccgggcatgcgtgacgtgcgcgaccgcatgcgcccgattcaccggagctatctgcgctcggcggccgagcacggcgtgtatgtgcggctcggcggcccgacgctggacccgcaaggcgacgcgatgaacggcacgctgctcgtcatcgaggcggacgatatccatgcggtgatgcggttcgtcggcaacgacccgtatgtgaaggagggcctgttctcgcacgtcgaggtgcgtccgtgggactggagcctcggcaatcccgagcaaagggtgtga

SEQ ID NO: 21510 - protein, 103 aa, Burkholderia cenocepacia HI2424
MARFFAVFATDQPGMRDVRDRMRPIHRSYLRSAAEHGVYVRLGGPTLDPQGDAMNGTLLVIEADDIHAVMRFVGNDPYVKEGLFSHVEVRPWDWSLGNPEQRV

SEQ ID NO: 21511 - DNA, 300 bp, Chromohalobacter salexigens DSM 3043
  CDS (1)..(300): transl_table=11
atgctttattcgatcgttagcgacgatgtgcaagacagcctggaacgtcgcaaggcggcacgcccggatcacctggcgcggctcgagaaactgcgcgacgaagggcgcctggttctcgccggccccagccccgccgtggatgccgaggacccgggcgaggccggcttcaccggcagcgtggtgatcgccgagttcgacagcctgcaggaggcccaggcgtgggccgatgccgatcccttcgtgatcgccggcgtctacgccaaggtcaccgtcaagccgttcaagaaggtcttgccgtaa

SEQ ID NO: 21512 - protein, 99 aa, Chromohalobacter salexigens DSM 3043
MLYSIVSDDVQDSLERRKAARPDHLARLEKLRDEGRLVLAGPSPAVDAEDPGEAGFTGSVVIAEFDSLQEAQAWADADPFVIAGVYAKVTVKPFKKVLP

SEQ ID NO: 21513 - DNA, 297 bp, Chromohalobacter salexigens DSM 3043
  CDS (1)..(297): transl_table=11
atgaccgaatatgccgtagtcgcttacgactacaccgacgatgatgccctgaaccgccgcctggccaaccgcgaggcgcacctggcgggcgtgcgcgcgctggcccgggagggctgtttcctgagtggcggggcgatcctggatgacgatggcaagatgatcggctccaatgcgcattttcgattcgccgatcgccaggccttgcaggcgtggctggacatcgagccctacatgaccggacgcgtgtgggagcatgtcgatattcgcgaactcaaacgcttcgatcccacggcgtga

SEQ ID NO: 21514 - protein, 98 aa, Chromohalobacter salexigens DSM 3043
MTEYAVVAYDYTDDDALNRRLANREAHLAGVRALAREGCFLSGGAILDDDGKMIGSNAHFRFADRQALQAWLDIEPYMTGRVWEHVDIRELKRFDPTA

SEQ ID NO: 21515 - DNA, 282 bp, Polaromonas sp. JS666
  CDS (1)..(282): transl_table=11
atgctgtttgcaattcatgccctggataaaaaaaattccggctccctgcgtgcggatgcggcgcaagaacatggcgcatttctgggcaacgctgcagcgtgggggctggaaatcgtgttttccgggcctttggtggatgcaaattcacccatcggtagcttgctggttgtcgaggcgcaagagattggtatcgccaagaaatttatcgaggccgatcctctggcgaaggcgggtgtctatgaaaaagtgagcgtgacgggattcctcaaaaagaggggttga

SEQ ID NO: 21516 - protein, 93 aa, Polaromonas sp. JS666
MLFAIHALDKKNSGSLRADAAQEHGAFLGNAAAWGLEIVFSGPLVDANSPIGSLLVVEAQEIGIAKKFIEADPLAKAGVYEKVSVTGFLKKRG

SEQ ID NO: 21517 - DNA, 276 bp, Desulfuromonas acetoxidans DSM 684
  CDS (1)..(276): transl_table=11
atgttgtatgtgattcgttgtattgataaagaagatcatcttgaagtccgtatggctaaccggccaacccatgtcgagtacctcaaaagctttggtgagcgcctttttgttgccggaccaaccctggatgatgccggtgagatgaatggctctgtggtcatcctcgaatgcgaggacaaggctggtgccgaagcttttgccgccaacgatccttatgccaaggccggattattttctgacgtgaccatcagtccctggaaaaaagtcctgccctga

SEQ ID NO: 21518 - protein, 91 aa, Desulfuromonas acetoxidans DSM 684
MLYVIRCIDKEDHLEVRMANRPTHVEYLKSFGERLFVAGPTLDDAGEMNGSVVILECEDKAGAEAFAANDPYAKAGLFSDVTISPWKKVLP

SEQ ID NO: 21519 - DNA, 273 bp, Jannaschia sp. CCS1
  CDS (1)..(273): transl_table=11
atgctttgtgccctcatcgccaccgacaaacccggccacctgcagacccgtctcgacaaccgcgacgcccatctggcctatgcgaaagacagcggcaaactggtcatggcggggccgttcatcgacgaaaatggcgggatgtccggcacgcttctggtgatcgaggtcgatacgatgcaggacgcttacgactttgccgacaacgacccctacgccaaggcgggtctgttcgagaaggtccggatcgagcaatggaagaaggtgatcggctga

SEQ ID NO: 21520 - protein, 90 aa, Jannaschia sp. CCS1
MLCALIATDKPGHLQTRLDNRDAHLAYAKDSGKLVMAGPFIDENGGMSGTLLVIEVDTMQDAYDFADNDPYAKAGLFEKVRIEQWKKVIG

SEQ ID NO: 21521 - DNA, 303 bp, Methylobacillus flagellatus KT
  CDS (1)..(303): transl_table=11
atgtggtataccatcattgcagaagacgttcccggcagcctggaaaaacgcctggctgcccgccctccccaccttgagcgcctgaaggctcttcaggatgcaggtcgcctcctgctggctggcccctttcccgcgatcgacagcaatgatccgggtcctgcaggattcaccggcagcctgattgtggccgagtttgacagtctggaatcggcgcaggcctgggccaatgaggatccatttgtgaacgcaggggtatattccgctgtcacagtcaaaccttttcgcaaaaccttgcctgcatga

SEQ ID NO: 21522 - protein, 100 aa, Methylobacillus flagellatus KT
MWYTIIAEDVPGSLEKRLAARPPHLERLKALQDAGRLLLAGPFPAIDSNDPGPAGFTGSLIVAEFDSLESAQAWANEDPFVNAGVYSAVTVKPFRKTLPA

SEQ ID NO: 21523 - DNA, 300 bp, Shewanella baltica OS155
  CDS (1)..(300): transl_table=11
atgtggtatatgatttcagctcaagattttgagaacagtttagaaaaacgtttagccgctcgccctgcccatttagctcgcctgcaagccctcgccgatgaaggtcgtttactgatcgctggcccacatccagccattgacagcgaaaacccaggtgatgctggctttagtggttcactggttgtcgccgattttgaatccttagtggcagcaaaacactgggccgatgccgatccttatatcgaagcgggcgtgtataaaagcgtggtcgttaaacctttcaaacgagtcctgccctaa

SEQ ID NO: 21524 - protein, 99 aa, Shewanella baltica OS155
MWYMISAQDFENSLEKRLAARPAHLARLQALADEGRLLIAGPHPAIDSENPGDAGFSGSLVVADFESLVAAKHWADADPYIEAGVYKSVVVKPFKRVLP

SEQ ID NO: 21525 - DNA, 300 bp, Shewanella amazonensis SB2B
  CDS (1)..(300): transl_table=11
atgtggtacatgatttcatcccaggacgttgccaacagtctcgaaaaacgccttgcggcccggccagctcaccttgctcgccttcaggagctcgccgatgaaggtcgactgatgattgccggtccacacccggctatcgatagtgataaccccggtgaagccggctttaccggctctttggttgtagccgaatttgaatcactggaactcgcccaggcctgggccgatgccgatccttacattgccgctggggtgtatgaaaaggtgatcgtaaagccctttaagcgagtgttgccctga

SEQ ID NO: 21526 - protein, 99 aa, Shewanella amazonensis SB2B
MWYMISSQDVANSLEKRLAARPAHLARLQELADEGRLMIAGPHPAIDSDNPGEAGFTGSLVVAEFESLELAQAWADADPYIAAGVYEKVIVKPFKRVLP

SEQ ID NO: 21527 - DNA, 297 bp, Ralstonia metallidurans CH34
  CDS (1)..(297): transl_table=11
atgccgtacctcattgagaccttcgacaagcccgaacaccagcacgttcgccaggccaaccggcccgcgcacctggagttcctggcggagaacagcaagctgctgctggcctgcggggccaagctcaatgatgacggcagcgatggcggcggtggcatctacatcgtcgacgtggacacacgcgaggccgcgcgggcactgatcgaggccgatccgttcttcacggccggcctgttcgccgacatccggatcgtgcgctggcgcaaggcgtatctggatggcgtctgccgtctctga

SEQ ID NO: 21528 - protein, 98 aa, Ralstonia metallidurans CH34
MPYLIETFDKPEHQHVRQANRPAHLEFLAENSKLLLACGAKLNDDGSDGGGGIYIVDVDTREAARALIEADPFFTAGLFADIRIVRWRKAYLDGVCRL

SEQ ID NO: 21529 - DNA, 303 bp, Magnetococcus sp. MC-1
  CDS (1)..(303): transl_table=11
atgtactacgccatcgttgcccaagatatcgagaacagcctatccctacggcagagcgcccgcccggcccaccttgagcgtctcaaagcgttacaggcccaggatcgtttactggttgccggcccactacccgctgtggaccgtgaagatcctggcgaggctgggtttaccggcagtgtggtgattgcccagtttgattccctcagccaagcacaagcgtgggcggcggctgacccctatgttgcggcgggggtctatgcccaagtcagtgttaaaccctttaaaaaggtactccctgcttag

SEQ ID NO: 21530 - protein, 100 aa, Magnetococcus sp. MC-1
MYYAIVAQDIENSLSLRQSARPAHLERLKALQAQDRLLVAGPLPAVDREDPGEAGFTGSVVIAQFDSLSQAQAWAAADPYVAAGVYAQVSVKPFKKVLPA

SEQ ID NO: 21531 - DNA, 297 bp, Mesorhizobium sp. BNC1
  CDS (1)..(297): transl_table=11
atgatcttcatcattctttgcaaggataagcccggtcatctgcaagtccgcatggacacgaggccggaccacgtcgcctatctcgatacgcttaatgcggaaggcaagctgaaattcgctggcccgttcctcgacggggagaataagccctgcggcagcatggtcggcatcgaggctgcgagcctcgccgatgccgaggcgctcgcacgctccgacccctatgcacttgccggcctgttcgaatccgtcgagattcgcccgtggaactgggtgttcaacaagccggagagtgcgtga

SEQ ID NO: 21532 - protein, 98 aa, Mesorhizobium sp. BNC1
MIFIILCKDKPGHLQVRMDTRPDHVAYLDTLNAEGKLKFAGPFLDGENKPCGSMVGIEAASLADAEALARSDPYALAGLFESVEIRPWNWVFNKPESA

SEQ ID NO: 21533 - DNA, 273 bp, Silicibacter sp. TM1040
  CDS (1)..(273): transl_table=11
atgctcattgcattgattgcccgcgacaaacccgaccatctgcagacgcgcctcgacaatcgtgcggcgcatctcgcctatatcgaagagaccggcgttgttgcgcaggcgggcccgcttttggaccaaaacggcgagatggttggctctctggtgatcctcgacgtggaggacatggccgccggtgaagcctgggccgcaaacgacccctacaacaaggccggactctttgaggccgttgaacttatcacctggaagaaggtgatcggctga

SEQ ID NO: 21534 - protein, 90 aa, Silicibacter sp. TM1040
MLIALIARDKPDHLQTRLDNRAAHLAYIEETGVVAQAGPLLDQNGEMVGSLVILDVEDMAAGEAWAANDPYNKAGLFEAVELITWKKVIG

SEQ ID NO: 21535 - DNA, 273 bp, Paracoccus denitrificans PD1222
  CDS (1)..(273): transl_table=11
atgccccttttcgccgtgatctgccgcgaccatgccggcaagctgcaaacccgtctcgacacccgcgaaagccacctggccttcatgggcgcgcagcccggcgtcaagctggccggccccttcgtcgagaacggccagccctgcggctcgctgctgatcgtcgagggcgaaagcttgacccaggtcaaggaatgggcggcacaggacccctacaacgcagccgatctgttcgcctcggtcgaggtgatcgagtggaagaaggtgattggctga

SEQ ID NO: 21536 - protein, 90 aa, Paracoccus denitrificans PD1222
MPLFAVICRDHAGKLQTRLDTRESHLAFMGAQPGVKLAGPFVENGQPCGSLLIVEGESLTQVKEWAAQDPYNAADLFASVEVIEWKKVIG

SEQ ID NO: 21537 - DNA, 300 bp, Shewanella denitrificans OS-217
  CDS (1)..(300): transl_table=11
atgtggtatatgatttcttcgcaagatgttgaaaatagtttagaaaagcgcttatcagtccgctcgtttcacttagccagactgcaagaattatctgatgaaggccgcctattagtcgcaggtcctcatccggcaattgataatgaaaatccaggggatgcaggctttaccggctccttggttatcgcagactttgccagccttgagatagctcaagcttgggccgatgctgacccctatattgaggctggcgtttatgccagcgtgatagtgaaaccctttaagcgagtattgccttaa

SEQ ID NO: 21538 - protein, 99 aa, Shewanella denitrificans OS-217
MWYMISSQDVENSLEKRLSVRSFHLARLQELSDEGRLLVAGPHPAIDNENPGDAGFTGSLVIADFASLEIAQAWADADPYIEAGVYASVIVKPFKRVLP

SEQ ID NO: 21539 - DNA, 300 bp, Shewanella frigidimarina NCIMB 400
  CDS (1)..(300): transl_table=11
atgtggtatatgatttcatctcaagatgttgaaaacagtctagaaaagcgtttatctgttcgtgctgaacatttagcacgtttacaagctttagccgatgaaggccgtttattaactgccggaccacaccctgcaattgataatgaaaatcctggtgaagcgggtttcacaggatcattagttattgctgactttccttcattagaagatgcacaagcttgggctgatgtggatccttatatcggtgctggcgtgtacaaaagcgttatcgttaagccatttaaacgagtgcttccttaa

SEQ ID NO: 21540 - protein, 99 aa, Shewanella frigidimarina NCIMB 400
MWYMISSQDVENSLEKRLSVRAEHLARLQALADEGRLLTAGPHPAIDNENPGEAGFTGSLVIADFPSLEDAQAWADVDPYIGAGVYKSVIVKPFKRVLP

SEQ ID NO: 21541 - DNA, 330 bp, Psychrobacter cryohalolentis K5
  CDS (1)..(330): transl_table=11
atgtctttattcgccattatcggtcatgacgtagcaggcagtagcgcgcaacgtcagctgacacgcccagagcacgttgagcgcttacaagtattgaatcgtgagcagcgcttgattatcgcaggaccaacaccgattgaacatggtaaaagcgagatgtcaggcagcctgattatcgcggactttgactcgcttgaggcagctcaaaactgggcaagcgctgagccgtatttgcgtgacggtgtctacagtcatgtcgatatcaagccatttattcaagcgttaccagcagtgaatgtcagcacaacaaatgaggtagcatcatcgtga

SEQ ID NO: 21542 - protein, 109 aa, Psychrobacter cryohalolentis K5
MSLFAIIGHDVAGSSAQRQLTRPEHVERLQVLNREQRLIIAGPTPIEHGKSEMSGSLIIADFDSLEAAQNWASAEPYLRDGVYSHVDIKPFIQALPAVNVSTTNEVASS

SEQ ID NO: 21543 - DNA, 303 bp, Nitrosomonas eutropha C71
  CDS (1)..(303): transl_table=11
atgctctatttaatatacggtgaagatgttccggatagcctggcgcaacgggtagttaaccggcctgcacatttggcgcgaatccaggaattacaggagcaggggagactgttattggcaggcccttgtccggcaattgatagcgtggaccccgggccggcgggttttaccggaagcttgatagtggcagagtttgcgtcactgaatgcggctcaggaatgggcagatgctgatccatacctggcagccggtatttatgcaaaagtggccgtaaagccgttcaggaaggttctgcctgaataa

SEQ ID NO: 21544 - protein, 100 aa, Nitrosomonas eutropha C71
MLYLIYGEDVPDSLAQRVVNRPAHLARIQELQEQGRLLLAGPCPAIDSVDPGPAGFTGSLIVAEFASLNAAQEWADADPYLAAGIYAKVAVKPFRKVLPE

SEQ ID NO: 21545 - DNA, 285 bp, Burkholderia ambifaria AMMD
  CDS (1)..(285): transl_table=11
atgcacttcactgtctactgccttgaccaccccgacatggtcgagcgtcgccttgaaaactacgatgctcacaaggcttatctgcagactgcgcctgtgaatacgctcatttctggtccgctggcaaagccggatggccagacgatgattggcagcttctttctctacgaagctgatgacatcggggaaataaaagcattcatcgaggccgacccgttcaacaaggcgggcatctgggccacggtcgatatcagaccgttcatcaagcgggtcgataaccgctaa

SEQ ID NO: 21546 - protein, 94 aa, Burkholderia ambifaria AMMD
MHFTVYCLDHPDMVERRLENYDAHKAYLQTAPVNTLISGPLAKPDGQTMIGSFFLYEADDIGEIKAFIEADPFNKAGIWATVDIRPFIKRVDNR

SEQ ID NO: 21547 - DNA, 303 bp, Burkholderia cepacia
  CDS (1)..(303): transl_table=11
atgctatttttgatctaccgtaaagacaggccggggagtcttcaagtccgaatcgataactatgcagcccaccttgcctacctggagccgctcaaagcaaagattcaggtaggcggaccgacacttggcgccggaacgggaaccgacgacaaggacatgacgggcagcttcctgatcatggaggcggaaagttgggacgaggtgcacagcttcgtcgagaacgacccgttcacgaaagctggactgtttgccgcgacgatcgtcgaacgctggaagcacggcaagcacaacgactccaaatga

SEQ ID NO: 21548 - protein, 100 aa, Burkholderia cepacia
MLFLIYRKDRPGSLQVRIDNYAAHLAYLEPLKAKIQVGGPTLGAGTGTDDKDMTGSFLIMEAESWDEVHSFVENDPFTKAGLFAATIVERWKHGKHNDSK

SEQ ID NO: 21549 - DNA, 303 bp, uncultured bacterium 577
  CDS (1)..(303)
atgctttacgtaataaatggtgaagatgctccaaatagtctagaaaaacgtataatatctagaccttctcacctagaacgtattaagatattacaaaatgaggggcgcctattactagcagggccatatcctgcaattgatagttcagatcctggtccagctggctttactggtagcctgatcgtagcagagtttatttcattagagatggctagcgcttgggccgaggctgatccatacttaatttctggagtatatacaaaggttacggtcaagccatttaagaaaatattgccagaatga

SEQ ID NO: 21550 - protein, 100 aa, uncultured bacterium 577
MLYVINGEDAPNSLEKRIISRPSHLERIKILQNEGRLLLAGPYPAIDSSDPGPAGFTGSLIVAEFISLEMASAWAEADPYLISGVYTKVTVKPFKKILPE

SEQ ID NO: 21551 - DNA, 273 bp, uncultured proteobacterium
  CDS (1)..(273)
atgcgtattgctgttatcacccgcgataaaccaggacatttacacctgcgtgtggaaacccgtgacgcgcatttggcctatatcaaggagaccggcattgttgaaatggcgggaccgtttttggacgacgcagagcaaatgtgcggctctctgattgttttggaagttgaaactatggccgcagcacaggcttgggctgagaacgacccctataataaagctggattgttcgaaagcgtgaccttgagccagtggaagaaagtcatcggctaa

SEQ ID NO: 21552 - protein, 90 aa, uncultured proteobacterium
MRIAVITRDKPGHLHLRVETRDAHLAYIKETGIVEMAGPFLDDAEQMCGSLIVLEVETMAAAQAWAENDPYNKAGLFESVTLSQWKKVIG

SEQ ID NO: 21553 - DNA, 297 bp, Alcaligenes eutrophus
  CDS (1)..(297): transl_table=11
atgccgtacctgatcgaaaccgtcgacaagcccaatcaccagcatgtgcgccaggccacccgtgccagccacctggattacctggaagccaacaaggacttgctgctggcttgcggcgccaagctcaacgacgatggctcggatgccggaggcggcatctatatcgtcgatgtcgacacccgcgacgcggcacagcaattcatcgacgccgatccgttcaccgaggcgggtttgtttgccgaggtgcgcatcgtgcgctggcgcaaggcctatctcgacggcgtgcgccatctttga

SEQ ID NO: 21554 - protein, 98 aa, Alcaligenes eutrophus
MPYLIETVDKPNHQHVRQATRASHLDYLEANKDLLLACGAKLNDDGSDAGGGIYIVDVDTRDAAQQFIDADPFTEAGLFAEVRIVRWRKAYLDGVRHL

SEQ ID NO: 21555 - DNA, 273 bp, Roseobacter denitrificans
  CDS (1)..(273): transl_table=11
atgctcgtcgctctgatcgctcatgacaaaccgggcgcattgcccattcgtcaggaaaaccgccccgcgcatgtggaatacctcaaatctagtacggctgtgcaacaggctggccccctgctggatgacgccggagagatgtgcggctccctcatcattctggatgtcgcggatatggatgaggccaaagcctgggcgcaaggtgatccttacggtgccgccggactgtttgcatcggtcgatctgatcccctggaaccgggtgattggctga

SEQ ID NO: 21556 - protein, 90 aa, Roseobacter denitrificans
MLVALIAHDKPGALPIRQENRPAHVEYLKSSTAVQQAGPLLDDAGEMCGSLIILDVADMDEAKAWAQGDPYGAAGLFASVDLIPWNRVIG

SEQ ID NO: 21557 - DNA, 297 bp, Haemophilus influenzae
  CDS (1)..(297): transl_table=11
atgtactatgttatttttgcccaagatattcccaatacgttagaaaagcgtcttgccgtacgcgagcaacacttggctcgtttaaaacaacttcaagcggaaaatcgcttactgacagcaggcccaaatcctgcaattgatgatgaaaatccgagtgaagctggttttacaggttcaaccgttattgctcaatttgaaaatctacaagcggcaaaagactgggctgcacaagatccttatgtagaagctggcgtatatgcggatgttattgtaaagccgtttaaaaaagtcttttaa

SEQ ID NO: 21558 - protein, 98 aa, Haemophilus influenzae
MYYVIFAQDIPNTLEKRLAVREQHLARLKQLQAENRLLTAGPNPAIDDENPSEAGFTGSTVIAQFENLQAAKDWAAQDPYVEAGVYADVIVKPFKKVF

SEQ ID NO: 21559 - DNA, 297 bp, Escherichia coli O6
  CDS (1)..(297)
atgttgtatgttatttacgctcaagacaaagctgatagcctcgaaaaacgcctttccgttcgtccggcacatttagcacgtttacagttactgcatgatgaaggtcgtttgttgacagctggtccaatgccagcggtagacagtaacgatccaggggctgcgggatttactggctcaaccgttattgctgaatttgaatcgctggaagcagctcaggcctgggccgatgctgacccgtacgtagcggcaggagtctatgaacacgtttcagtgaaaccatttaagaaagtgttctga

SEQ ID NO: 21560 - protein, 98 aa, Escherichia coli O6
MLYVIYAQDKADSLEKRLSVRPAHLARLQLLHDEGRLLTAGPMPAVDSNDPGAAGFTGSTVIAEFESLEAAQAWADADPYVAAGVYEHVSVKPFKKVF

SEQ ID NO: 21561 - DNA, 24 bp, Artificial sequence
  Primer sequence
atgcatggccttaacaaagacatc

SEQ ID NO: 21562 - DNA, 28 bp, Artificial sequence
  Primer sequence
ttagaacactttcttaaatggtttcact

SEQ ID NO: 21563 - protein, 104 aa, Artificial sequence
  Consensus
  Variant (2)..(2): Xaa in position 2 is any amino acid
  Variant (4)..(4): Xaa in position 4 is any amino acid
  Variant (6)..(8): Xaa in position 6 to 8 is any amino acid
  Variant (10)..(13): Xaa in position 10 to 13 is any amino acid
  Variant (15)..(16): Xaa in position 15 to 16 is any amino acid
  Variant (18)..(20): Xaa in position 18 to 20 is any amino acid
  Variant (22)..(23): Xaa in position 22 to 23 is any amino acid
  Variant (26)..(27): Xaa in position 26 to 27 is any amino acid
  Variant (29)..(32): Xaa in position 29 to 32 is any amino acid
  Variant (33)..(39): Xaa in position 33 to 39 is any or no amino acid
  Variant (41)..(42): Xaa in position 41 to 42 is any amino acid
  Variant (46)..(53): Xaa in position 46 to 53 is any amino acid
  Variant (54)..(67): Xaa in position 54 to 67 is any or no amino acid
  Variant (70)..(70): Xaa in position 70 is any or no amino acid
  Variant (73)..(73): Xaa in position 73 is any amino acid
  Variant (75)..(77): Xaa in position 75 to 77 is any amino acid
  Variant (79)..(80): Xaa in position 79 to 80 is any amino acid
  Variant (82)..(83): Xaa in position 82 to 83 is any amino acid
  Variant (86)..(87): Xaa in position 86 to 87 is any amino acid
  Variant (91)..(92): Xaa in position 91 to 92 is any amino acid
  Variant (97)..(98): Xaa in position 97 to 98 is any amino acid
  Variant (100)..(100): Xaa in position 100 is any amino acid
  Variant (102)..(102): Xaa in position 102 is any amino acid
MXYXIXXXDXXXXLXXRXXXRXXHLXXLXXXXXXXXXXXLXXAGPXXXXXXXXXXXXXXXXXXXXXXGSXVIXEXXXLXXAXXWAXXDPYXXAGVYXXVXVXPF

SEQ ID NO: 21564 - protein, 20 aa, Artificial sequence
  Consensus
  Variant (2)..(3): Xaa in position 2 to 3 is any amino acid
  Variant (4)..(4): Xaa in position 4 is Asp, Gly or Asn
  Variant (5)..(6): Xaa in position 5 to 6 is any amino acid
  Variant (7)..(7): Xaa in position 7 is Ala, Asp, Glu, Gln, Ser or Thr
  Variant (8)..(8): Xaa in position 8 is any amino acid
  Variant (10)..(12): Xaa in position 10 to 12 is any amino acid
  Variant (14)..(15): Xaa in position 14 to 15 is any amino acid
  Variant (17)..(19): Xaa in position 17 to 19 is any or no amino acid
DXXXXXXXRXXXRXXHXXXL

SEQ ID NO: 21565 - protein, 34 aa, Artificial sequence
  Consensus
  Variant (2)..(2): Xaa in position 2 is Ser or Thr
  Variant (3)..(3): Xaa in position 3 is any amino acid
  Variant (4)..(4): Xaa in position 4 is Phe, Ile, Leu, Met or Val
  Variant (5)..(5): Xaa in position 5 is Gly, Ile, Leu or Val
  Variant (6)..(9): Xaa in position 6 to 9 is any amino acid
  Variant (10)..(10): Xaa in position 10 is Ala, Asp, Glu, Asn, Ser or Thr
  Variant (11)..(13): Xaa in position 11 to 13 is any amino acid
  Variant (14)..(14): Xaa in position 14 is Ala, Gly, Ile, Leu or Val
  Variant (15)..(20): Xaa in position 15 to 20 is any amino acid
  Variant (21)..(21): Xaa in position 21 is Asp or Glu
  Variant (23)..(26): Xaa in position 23 to 26 is any amino acid
  Variant (28)..(33): Xaa in position 28 to 33 is any or no amino acid
GXXXXXXXXXXXXXXXXXXXXPXXXXGXXXXXXV

SEQ ID NO: 21566 - DNA, 1047 bp, Escherichia coli K12; identical to SEQ ID NO: 1323
  CDS (1)..(1047)

SEQ ID NO: 21567 - protein, 348 aa, Escherichia coli K12; identical to SEQ ID NO: 1324

SEQ ID NO: 21568 - DNA, 1235 bp, Salmonella typhimurium; identical to SEQ ID NO: 1325
  CDS (165)..(1235)

SEQ ID NO: 21569 - protein, 356 aa, Salmonella typhimurium; identical to SEQ ID NO: 1326

SEQ ID NO: 21570 - DNA, 1086 bp, Deinococcus radiodurans; identical to SEQ ID NO: 1327
  CDS (1)..(1086)

SEQ ID NO: 21571 - protein, 361 aa, Deinococcus radiodurans; identical to SEQ ID NO: 1328

SEQ ID NO: 21572 - DNA, 1056 bp, Neisseria meningitidis; identical to SEQ ID NO: 1329
  CDS (1)..(1056)

SEQ ID NO: 21573 - protein, 351 aa, Neisseria meningitidis; identical to SEQ ID NO: 1330

SEQ ID NO: 21574 - DNA, 1047 bp, Yersinia pestis; identical to SEQ ID NO: 1331
  CDS (1)..(1047)

SEQ ID NO: 21575 - protein, 348 aa, Yersinia pestis; identical to SEQ ID NO: 1332

SEQ ID NO: 21576 - DNA, 1071 bp, Escherichia coli; identical to SEQ ID NO: 1333
  CDS (1)..(1071)

SEQ ID NO: 21577 - protein, 356 aa, Escherichia coli; identical to SEQ ID NO: 1334

SEQ ID NO: 21578 - DNA, 1131 bp, Nostoc sp. PCC 7120; identical to SEQ ID NO: 1335
  CDS (1)..(1131)

SEQ ID NO: 21579 - protein, 376 aa, Nostoc sp. PCC 7120; identical to SEQ ID NO: 1336

SEQ ID NO: 21580 - DNA, 1053 bp, Salmonella enterica subsp. enterica serovar Typhi; identical to SEQ ID NO: 1337
  CDS (1)..(1053)

SEQ ID NO: 21581 - protein, 350 aa, Salmonella enterica subsp. enterica serovar Typhi; identical to SEQ ID NO: 1338

SEQ ID NO: 21582 - DNA, 1077 bp, Pseudomonas aeruginosa; identical to SEQ ID NO: 1339
  CDS (1)..(1077)

SEQ ID NO: 21583 - protein, 358 aa, Pseudomonas aeruginosa; identical to SEQ ID NO: 1340

SEQ ID NO: 21584 - DNA, 1047 bp, Buchnera sp; identical to SEQ ID NO: 1341
  CDS (1)..(1047)

SEQ ID NO: 21585 - protein, 348 aa, Buchnera sp; identical to SEQ ID NO: 1342

SEQ ID NO: 21586 - DNA, 1074 bp, Vibrio cholerae; identical to SEQ ID NO: 1343
  CDS (1)..(1074)

SEQ ID NO: 21587 - protein, 357 aa, Vibrio cholerae; identical to SEQ ID NO: 1344

SEQ ID NO: 21588 - DNA, 1038 bp, Lactococcus lactis subsp. lactis; identical to SEQ ID NO: 1345
  CDS (1)..(1038)

SEQ ID NO: 21589 - protein, 345 aa, Lactococcus lactis subsp. lactis; identical to SEQ ID NO: 1346

SEQ ID NO: 21590 - DNA, 1023 bp, Lactococcus lactis subsp. lactis; identical to SEQ ID NO: 1347
  CDS (1)..(1023)

SEQ ID NO: 21591 - protein, 340 aa, Lactococcus lactis subsp. lactis; identical to SEQ ID NO: 1348

SEQ ID NO: 21592 - DNA, 1032 bp, Streptococcus pneumoniae; identical to SEQ ID NO: 1349
  CDS (1)..(1032)

SEQ ID NO: 21593 - protein, 343 aa, Streptococcus pneumoniae; identical to SEQ ID NO: 1350

SEQ ID NO: 21594 - DNA, 1095 bp, Pseudomonas aeruginosa; identical to SEQ ID NO: 1351
  CDS (1)..(1095)

SEQ ID NO: 21595 - protein, 364 aa, Pseudomonas aeruginosa; identical to SEQ ID NO: 1352

SEQ ID NO: 21596 - DNA, 1110 bp, Caulobacter crescentus; identical to SEQ ID NO: 1353
  CDS (1)..(1110)

SEQ ID NO: 21597 - protein, 369 aa, Caulobacter crescentus; identical to SEQ ID NO: 1354

SEQ ID NO: 21598 - DNA, 1032 bp, Streptococcus pneumoniae; identical to SEQ ID NO: 1355
  CDS (1)..(1032)

SEQ ID NO: 21599 - protein, 343 aa, Streptococcus pneumoniae; identical to SEQ ID NO: 1356

SEQ ID NO: 21600 - DNA, 1047 bp, Buchnera aphidicola; identical to SEQ ID NO: 1357
  CDS (1)..(1047)

SEQ ID NO: 21601 - protein, 348 aa, Buchnera aphidicola; identical to SEQ ID NO: 1358

SEQ ID NO: 21602 - DNA, 1089 bp, Haemophilus influenzae; identical to SEQ ID NO: 1359
  CDS (1)..(1089)

SEQ ID NO: 21603 - protein, 362 aa, Haemophilus influenzae; identical to SEQ ID NO: 1360

SEQ ID NO: 21604 - DNA, 1502 bp, Candida albicans; identical to SEQ ID NO: 1361
  CDS (336)..(1442)

SEQ ID NO: 21605 - protein, 368 aa, Candida albicans; identical to SEQ ID NO: 1362

SEQ ID NO: 21606 - DNA, 1113 bp, Saccharomyces cerevisiae; identical to SEQ ID NO: 1363
  CDS (1)..(1113)

SEQ ID NO: 21607 - protein, 370 aa, Saccharomyces cerevisiae; identical to SEQ ID NO: 1364

SEQ ID NO: 21608 - DNA, 2048 bp, Saccharomyces cerevisiae; identical to SEQ ID NO: 1365
  CDS (619)..(1731)

SEQ ID NO: 21609 - protein, 370 aa, Saccharomyces cerevisiae; identical to SEQ ID NO: 1366

SEQ ID NO: 21610 - DNA, 1107 bp, Schizosaccharomyces pombe; identical to SEQ ID NO: 1367
  CDS (1)..(1107)

SEQ ID NO: 21611 - protein, 368 aa, Schizosaccharomyces pombe; identical to SEQ ID NO: 1368

SEQ ID NO: 21612 - DNA, 1089 bp, Amycolatopsis orientalis; identical to SEQ ID NO: 1369
  CDS (1)..(1089)

SEQ ID NO: 21613 - protein, 362 aa, Amycolatopsis orientalis; identical to SEQ ID NO: 1370

SEQ ID NO: 21614 - DNA, 1119 bp, Schizosaccharomyces pombe; identical to SEQ ID NO: 1371
  CDS (1)..(1119)

SEQ ID NO: 21615 - protein, 372 aa, Schizosaccharomyces pombe; identical to SEQ ID NO: 1372

SEQ ID NO: 21616 - DNA, 1248 bp, Corynebacterium glutamicum; identical to SEQ ID NO: 1373
  CDS (101)..(1228)

SEQ ID NO: 21617 - protein, 375 aa, Corynebacterium glutamicum; identical to SEQ ID NO: 1374

SEQ ID NO: 21618 - DNA, 1083 bp, Methylophilus methylotrophus; identical to SEQ ID NO: 1375
  CDS (1)..(1083)

SEQ ID NO: 21619 - protein, 360 aa, Methylophilus methylotrophus; identical to SEQ ID NO: 1376

SEQ ID NO: 21620 - DNA, 1107 bp, Debaryomyces hansenii; identical to SEQ ID NO: 1377
  CDS (1)..(1107)

SEQ ID NO: 21621 - protein, 368 aa, Debaryomyces hansenii; identical to SEQ ID NO: 1378

SEQ ID NO: 21622 - DNA, 1074 bp, Yarrowia lipolytica; identical to SEQ ID NO: 1379
  CDS (1)..(1074)

SEQ ID NO: 21623 - protein, 357 aa, Yarrowia lipolytica; identical to SEQ ID NO: 1380

SEQ ID NO: 21624 - DNA, 1089 bp, Yarrowia lipolytica; identical to SEQ ID NO: 1381
  CDS (1)..(1089)

SEQ ID NO: 21625 - protein, 362 aa, Yarrowia lipolytica; identical to SEQ ID NO: 1382

SEQ ID NO: 21626 - DNA, 1119 bp, Kluyveromyces lactis; identical to SEQ ID NO: 1383
  CDS (1)..(1119)

SEQ ID NO: 21627 - protein, 372 aa, Kluyveromyces lactis; identical to SEQ ID NO: 1384

SEQ ID NO: 21628 - DNA, 1095 bp, Kluyveromyces lactis; identical to SEQ ID NO: 1385
  CDS (1)..(1095)

SEQ ID NO: 21629 - protein, 364 aa, Kluyveromyces lactis; identical to SEQ ID NO: 1386

SEQ ID NO: 21630 - DNA, 1074 bp, Erwinia carotovora subsp; identical to SEQ ID NO: 1387
  CDS (1)..(1074)

SEQ ID NO: 21631 - protein, 357 aa, Erwinia carotovora subsp; identical to SEQ ID NO: 1388

SEQ ID NO: 21632 - DNA, 1047 bp, Erwinia carotovora subsp; identical to SEQ ID NO: 1389
  CDS (1)..(1047)

SEQ ID NO: 21633 - protein, 348 aa, Erwinia carotovora subsp; identical to SEQ ID NO: 1390

SEQ ID NO: 21634 - DNA, 1056 bp, Erwinia carotovora subsp; identical to SEQ ID NO: 1391
  CDS (1)..(1056)

SEQ ID NO: 21635 - protein, 351 aa, Erwinia carotovora subsp; identical to SEQ ID NO: 1392

SEQ ID NO: 21636 - DNA, 1113 bp, Acinetobacter sp; identical to SEQ ID NO: 1393
  CDS (1)..(1113)

SEQ ID NO: 21637 - protein, 370 aa, Acinetobacter sp; identical to SEQ ID NO: 1394

SEQ ID NO: 21638 - DNA, 1056 bp, Acinetobacter sp; identical to SEQ ID NO: 1395
  CDS (1)..(1056)

SEQ ID NO: 21639 - protein, 351 aa, Acinetobacter sp; identical to SEQ ID NO: 1396

SEQ ID NO: 21640 - DNA, 1119 bp, Candida glabrata; identical to SEQ ID NO: 1397
  CDS (1)..(1119)

SEQ ID NO: 21641 - protein, 372 aa, Candida glabrata; identical to SEQ ID NO: 1398

SEQ ID NO: 21642 - DNA, 1071 bp, Candida glabrata; identical to SEQ ID NO: 1399
  CDS (1)..(1071)

SEQ ID NO: 21643 - protein, 356 aa, Candida glabrata; identical to SEQ ID NO: 1400

SEQ ID NO: 21644 - DNA, 1083 bp, Photobacterium profundum; identical to SEQ ID NO: 1401
  CDS (1)..(1083)

SEQ ID NO: 21645 - protein, 360 aa, Photobacterium profundum; identical to SEQ ID NO: 1402

SEQ ID NO: 21646 - DNA, 1053 bp, Photobacterium profundum; identical to SEQ ID NO: 1403
  CDS (1)..(1053)

SEQ ID NO: 21647 - protein, 350 aa, Photobacterium profundum; identical to SEQ ID NO: 1404

SEQ ID NO: 21648 - DNA, 1113 bp, Photobacterium profundum; identical to SEQ ID NO: 1405
  CDS (1)..(1113)

SEQ ID NO: 21649 - protein, 370 aa, Photobacterium profundum; identical to SEQ ID NO: 1406

SEQ ID NO: 21650 - DNA, 1056 bp, Photobacterium profundum; identical to SEQ ID NO: 1407
  CDS (1)..(1056)

SEQ ID NO: 21651 - protein, 351 aa, Photobacterium profundum; identical to SEQ ID NO: 1408

SEQ ID NO: 21652 - DNA, 1092 bp, Parachlamydia sp; identical to SEQ ID NO: 1409
  CDS (1)..(1092)

SEQ ID NO: 21653 - protein, 363 aa, Parachlamydia sp; identical to SEQ ID NO: 1410

SEQ ID NO: 21654 - DNA, 1095 bp, Rhodopseudomonas palustris; identical to SEQ ID NO: 1411
  CDS (1)..(1095)

SEQ ID NO: 21655 - protein, 364 aa, Rhodopseudomonas palustris; identical to SEQ ID NO: 1412

SEQ ID NO: 21656 - DNA, 1100 bp, Amycolatopsis methanolica; identical to SEQ ID NO: 1413
  CDS (1)..(1086)

SEQ ID NO: 21657 - protein, 361 aa, Amycolatopsis methanolica; identical to SEQ ID NO: 1414

SEQ ID NO: 21658 - DNA, 1071 bp, Treponema denticola; identical to SEQ ID NO: 1415
  CDS (1)..(1071)

SEQ ID NO: 21659 - protein, 356 aa, Treponema denticola; identical to SEQ ID NO: 1416

SEQ ID NO: 21660 - DNA, 1068 bp, Geobacter sulfurreducens; identical to SEQ ID NO: 1417
  CDS (1)..(1068)

SEQ ID NO: 21661 - protein, 355 aa, Geobacter sulfurreducens; identical to SEQ ID NO: 1418

SEQ ID NO: 21662 - DNA, 1095 bp, Ashbya gossypii; identical to SEQ ID NO: 1419
  CDS (1)..(1095)

SEQ ID NO: 21663 - protein, 364 aa, Ashbya gossypii; identical to SEQ ID NO: 1420

SEQ ID NO: 21664 - DNA, 1122 bp, Ashbya gossypii; identical to SEQ ID NO: 1421
  CDS (1)..(1122)

SEQ ID NO: 21665 - protein, 373 aa, Ashbya gossypii; identical to SEQ ID NO: 1422

SEQ ID NO: 21666 - DNA, 1098 bp, Amycolatopsis balhimycina; identical to SEQ ID NO: 1423
  CDS (1)..(1098)

SEQ ID NO: 21667 - protein, 365 aa, Amycolatopsis balhimycina; identical to SEQ ID NO: 1424

SEQ ID NO: 21668 - DNA, 1071 bp, Vibrio vulnificus; identical to SEQ ID NO: 1425
  CDS (1)..(1071)

SEQ ID NO: 21669 - protein, 356 aa, Vibrio vulnificus; identical to SEQ ID NO: 1426

SEQ ID NO: 21670 - DNA, 1047 bp, Photorhabdus luminescens; identical to SEQ ID NO: 1427
  CDS (1)..(1047)

SEQ ID NO: 21671 - protein, 348 aa, Photorhabdus luminescens; identical to SEQ ID NO: 1428

SEQ ID NO: 21672 - DNA, 1053 bp, Photorhabdus luminescens; identical to SEQ ID NO: 1429
  CDS (1)..(1053)

SEQ ID NO: 21673 - protein, 350 aa, Photorhabdus luminescens; identical to SEQ ID NO: 1430

SEQ ID NO: 21674 - DNA, 1095 bp, Photorhabdus luminescens; identical to SEQ ID NO: 1431
  CDS (1)..(1095)

SEQ ID NO: 21675 - protein, 364 aa, Photorhabdus luminescens; identical to SEQ ID NO: 1432

SEQ ID NO: 21676 - DNA, 1119 bp, Gloeobacter violaceus; identical to SEQ ID NO: 1433
  CDS (1)..(1119)

SEQ ID NO: 21677 - protein, 372 aa, Gloeobacter violaceus; identical to SEQ ID NO: 1434

SEQ ID NO: 21678 - DNA, 1107 bp, Chromobacterium violaceum; identical to SEQ ID NO: 1435
  CDS (1)..(1107)

SEQ ID NO: 21679 - protein, 368 aa, Chromobacterium violaceum; identical to SEQ ID NO: 1436

SEQ ID NO: 21680 - DNA, 1059 bp, Chromobacterium violaceum; identical to SEQ ID NO: 1437
  CDS (1)..(1059)

SEQ ID NO: 21681 - protein, 352 aa, Chromobacterium violaceum; identical to SEQ ID NO: 1438

SEQ ID NO: 21682 - DNA, 1140 bp, Neurospora crassa; identical to SEQ ID NO: 1439
  CDS (1)..(1140)

SEQ ID NO: 21683 - protein, 379 aa, Neurospora crassa; identical to SEQ ID NO: 1440

SEQ ID NO: 21684 - DNA, 1092 bp, Neurospora crassa; identical to SEQ ID NO: 1441
  CDS (1)..(1092)

SEQ ID NO: 21685 - protein, 363 aa, Neurospora crassa; identical to SEQ ID NO: 1442

SEQ ID NO: 21686 - DNA, 1068 bp, Synechococcus sp; identical to SEQ ID NO: 1443
  CDS (1)..(1068)

SEQ ID NO: 21687 - protein, 355 aa, Synechococcus sp; identical to SEQ ID NO: 1444

SEQ ID NO: 21688 - DNA, 1053 bp, Rhodopirellula baltica; identical to SEQ ID NO: 1445
  CDS (1)..(1053)

SEQ ID NO: 21689 - protein, 350 aa, Rhodopirellula baltica; identical to SEQ ID NO: 1446

SEQ ID NO: 21690 - DNA, 1068 bp, Prochlorococcus marinus subsp; identical to SEQ ID NO: 1447
  CDS (1)..(1068)

SEQ ID NO: 21691 - protein, 355 aa, Prochlorococcus marinus subsp; identical to SEQ ID NO: 1448

SEQ ID NO: 21692 - DNA, 1083 bp, Prochlorococcus marinus; identical to SEQ ID NO: 1449
  CDS (1)..(1083)

SEQ ID NO: 21693 - protein, 360 aa, Prochlorococcus marinus; identical to SEQ ID NO: 1450

SEQ ID NO: 21694 - DNA, 1074 bp, Prochlorococcus marinus; identical to SEQ ID NO: 1451
  CDS (1)..(1074)

SEQ ID NO: 21695 - protein, 357 aa, Prochlorococcus marinus; identical to SEQ ID NO: 1452

SEQ ID NO: 21696 - DNA, 1113 bp, Haemophilus ducreyi; identical to SEQ ID NO: 1453
  CDS (1)..(1113)

SEQ ID NO: 21697 - protein, 370 aa, Haemophilus ducreyi; identical to SEQ ID NO: 1454

SEQ ID NO: 21698 - DNA, 1080 bp, Haemophilus ducreyi; identical to SEQ ID NO: 1455
  CDS (1)..(1080)

SEQ ID NO: 21699 - protein, 359 aa, Haemophilus ducreyi; identical to SEQ ID NO: 1456

SEQ ID NO: 21700 - DNA, 1086 bp, Candidatus Blochmannia floridanus; identical to SEQ ID NO: 1457
  CDS (1)..(1086)

SEQ ID NO: 21701 - protein, 361 aa, Candidatus Blochmannia floridanus; identical to SEQ ID NO: 1458

SEQ ID NO: 21702 - DNA, 1074 bp, Bordetella pertussis; identical to SEQ ID NO: 1459
  CDS (1)..(1074)

SEQ ID NO: 21703 - protein, 357 aa, Bordetella pertussis; identical to SEQ ID NO: 1460

SEQ ID NO: 21704 - DNA, 1119 bp, Bordetella bronchiseptica; identical to SEQ ID NO: 1461
  CDS (1)..(1119)

SEQ ID NO: 21705 - protein, 372 aa, Bordetella bronchiseptica; identical to SEQ ID NO: 1462

SEQ ID NO: 21706 - DNA, 1179 bp, Nitrosomonas europaea; identical to SEQ ID NO: 1463
  CDS (1)..(1179)

SEQ ID NO: 21707 - protein, 392 aa, Nitrosomonas europaea; identical to SEQ ID NO: 1464

SEQ ID NO: 21708 - DNA, 1083 bp, Coxiella burnetii; identical to SEQ ID NO: 1465
  CDS (1)..(1083)

SEQ ID NO: 21709 - protein, 360 aa, Coxiella burnetii; identical to SEQ ID NO: 1466

SEQ ID NO: 21710 - DNA, 834 bp, Vibrio anguillarum; identical to SEQ ID NO: 1467
  CDS (1)..(834)

SEQ ID NO: 21711 - protein, 277 aa, Vibrio anguillarum; identical to SEQ ID NO: 1468

SEQ ID NO: 21712 - DNA, 1143 bp, Xylella fastidiosa; identical to SEQ ID NO: 1469
  CDS (1)..(1143)

SEQ ID NO: 21713 - protein, 380 aa, Xylella fastidiosa; identical to SEQ ID NO: 1470

SEQ ID NO: 21714 - DNA, 1053 bp, Vibrio parahaemolyticus; identical to SEQ ID NO: 1471
  CDS (1)..(1053)

SEQ ID NO: 21715 - protein, 350 aa, Vibrio parahaemolyticus; identical to SEQ ID NO: 1472

SEQ ID NO: 21716 - DNA, 1053 bp, Vibrio parahaemolyticus; identical to SEQ ID NO: 1473
  CDS (1)..(1053)

SEQ ID NO: 21717 - protein, 350 aa, Vibrio parahaemolyticus; identical to SEQ ID NO: 1474

SEQ ID NO: 21718 - DNA, 1074 bp, Vibrio parahaemolyticus; identical to SEQ ID NO: 1475
  CDS (1)..(1074)

SEQ ID NO: 21719 - protein, 357 aa, Vibrio parahaemolyticus; identical to SEQ ID NO: 1476

SEQ ID NO: 21720 - DNA, 1083 bp, Pseudomonas syringae; identical to SEQ ID NO: 1477
  CDS (1)..(1083)

SEQ ID NO: 21721 - protein, 360 aa, Pseudomonas syringae; identical to SEQ ID NO: 1478

SEQ ID NO: 21722 - DNA, 1077 bp, Pseudomonas syringae; identical to SEQ ID NO: 1479
  CDS (1)..(1077)

SEQ ID NO: 21723 - protein, 358 aa, Pseudomonas syringae; identical to SEQ ID NO: 1480

SEQ ID NO: 21724 - DNA, 1062 bp, Pseudomonas putida; identical to SEQ ID NO: 1481
  CDS (1)..(1062)

SEQ ID NO: 21725 - protein, 353 aa, Pseudomonas putida; identical to SEQ ID NO: 1482

SEQ ID NO: 21726 - DNA, 1113 bp, Pseudomonas putida; identical to SEQ ID NO: 1483
  CDS (1)..(1113)

SEQ ID NO: 21727 - protein, 370 aa, Pseudomonas putida; identical to SEQ ID NO: 1484

SEQ ID NO: 21728 - DNA, 1086 bp, Bradyrhizobium japonicum; identical to SEQ ID NO: 1485
  CDS (1)..(1086)

SEQ ID NO: 21729 - protein, 361 aa, Bradyrhizobium japonicum; identical to SEQ ID NO: 1486

SEQ ID NO: 21730 - DNA, 1053 bp, Yersinia pestis; identical to SEQ ID NO: 1487
  CDS (1)..(1053)

SEQ ID NO: 21731 - protein, 350 aa, Yersinia pestis; identical to SEQ ID NO: 1488

SEQ ID NO: 21732 - DNA, 1077 bp, Yersinia pestis; identical to SEQ ID NO: 1489
  CDS (1)..(1077)

SEQ ID NO: 21733 - protein, 358 aa, Yersinia pestis; identical to SEQ ID NO: 1490

SEQ ID NO: 21734 - DNA, 1038 bp, Wigglesworthia glossinidia brevipalpis; identical to SEQ ID NO: 1491
  CDS (1)..(1038)

SEQ ID NO: 21735 - protein, 345 aa, Wigglesworthia glossinidia brevipalpis; identical to SEQ ID NO: 1492

SEQ ID NO: 21736 - DNA, 1053 bp, Vibrio vulnificus; identical to SEQ ID NO: 1493
  CDS (1)..(1053)

SEQ ID NO: 21737 - protein, 350 aa, Vibrio vulnificus; identical to SEQ ID NO: 1494

SEQ ID NO: 21738 - DNA, 1053 bp, Vibrio vulnificus; identical to SEQ ID NO: 1495
  CDS (1)..(1053)

SEQ ID NO: 21739 - protein, 350 aa, Vibrio vulnificus; identical to SEQ ID NO: 1496

SEQ ID NO: 21740 - DNA, 1071 bp, Vibrio vulnificus; identical to SEQ ID NO: 1497
  CDS (1)..(1071)

SEQ ID NO: 21741 - protein, 356 aa, Vibrio vulnificus; identical to SEQ ID NO: 1498

SEQ ID NO: 21742 - DNA, 1062 bp, Synechococcus elongatus; identical to SEQ ID NO: 1499
  CDS (1)..(1062)

SEQ ID NO: 21743 - protein, 353 aa, Synechococcus elongatus; identical to SEQ ID NO: 1500

SEQ ID NO: 21744 - DNA, 1032 bp, Streptococcus mutans; identical to SEQ ID NO: 1501
  CDS (1)..(1032)

SEQ ID NO: 21745 - protein, 343 aa, Streptococcus mutans; identical to SEQ ID NO: 1502

SEQ ID NO: 21746 - DNA, 1035 bp, Streptococcus mutans; identical to SEQ ID NO: 1503
  CDS (1)..(1035)

SEQ ID NO: 21747 - protein, 344 aa, Streptococcus mutans; identical to SEQ ID NO: 1504

SEQ ID NO: 21748 - DNA, 1008 bp, Streptococcus agalactiae; identical to SEQ ID NO: 1505
  CDS (1)..(1008)

SEQ ID NO: 21749 - protein, 335 aa, Streptococcus agalactiae; identical to SEQ ID NO: 1506

SEQ ID NO: 21750 - DNA, 1065 bp, Shewanella oneidensis; identical to SEQ ID NO: 1507
  CDS (1)..(1065)

SEQ ID NO: 21751 - protein, 354 aa, Shewanella oneidensis; identical to SEQ ID NO: 1508

SEQ ID NO: 21752 - DNA, 1092 bp, Shewanella oneidensis; identical to SEQ ID NO: 1509
  CDS (1)..(1092)

SEQ ID NO: 21753 - protein, 363 aa, Shewanella oneidensis; identical to SEQ ID NO: 1510

SEQ ID NO: 21754 - DNA, 1059 bp, Shewanella oneidensis; identical to SEQ ID NO: 1511
  CDS (1)..(1059)

SEQ ID NO: 21755 - protein, 352 aa, Shewanella oneidensis; identical to SEQ ID NO: 1512

SEQ ID NO: 21756 - DNA, 1053 bp, Escherichia coli O6; identical to SEQ ID NO: 1513
  CDS (1)..(1053)

SEQ ID NO: 21757 - protein, 350 aa, Escherichia coli O6; identical to SEQ ID NO: 1514

SEQ ID NO: 21758 - DNA, 1170 bp, Corynebacterium efficiens; identical to SEQ ID NO: 1515
  CDS (1)..(1170)

SEQ ID NO: 21759 - protein, 389 aa, Corynebacterium efficiens; identical to SEQ ID NO: 1516

SEQ ID NO: 21760 - DNA, 1134 bp, Bifidobacterium longum; identical to SEQ ID NO: 1517
  CDS (1)..(1134)

SEQ ID NO: 21761 - protein, 377 aa, Bifidobacterium longum; identical to SEQ ID NO: 1518

SEQ ID NO: 21762 - DNA, 1233 bp, Bifidobacterium longum; identical to SEQ ID NO: 1519
  CDS (1)..(1233)

SEQ ID NO: 21763 - protein, 410 aa, Bifidobacterium longum; identical to SEQ ID NO: 1520

SEQ ID NO: 21764 - DNA, 1221 bp, Phytophthora infestans; identical to SEQ ID NO: 1521
  CDS (20)..(1153)

SEQ ID NO: 21765 - protein, 377 aa, Phytophthora infestans; identical to SEQ ID NO: 1522

SEQ ID NO: 21766 - DNA, 1062 bp, Chlorobium tepidum; identical to SEQ ID NO: 1523
  CDS (1)..(1062)

SEQ ID NO: 21767 - protein, 353 aa, Chlorobium tepidum; identical to SEQ ID NO: 1524

SEQ ID NO: 21768 - DNA, 1074 bp, Xanthomonas campestris; identical to SEQ ID NO: 1525
  CDS (1)..(1074)

SEQ ID NO: 21769 - protein, 357 aa, Xanthomonas campestris; identical to SEQ ID NO: 1526

SEQ ID NO: 21770 - DNA, 1074 bp, Xanthomonas axonopodis; identical to SEQ ID NO: 1527
  CDS (1)..(1074)

SEQ ID NO: 21771 - protein, 357 aa, Xanthomonas axonopodis; identical to SEQ ID NO: 1528

SEQ ID NO: 21772 - DNA, 1080 bp, Ralstonia solanacearum; identical to SEQ ID NO: 1529
  CDS (1)..(1080)

SEQ ID NO: 21773 - protein, 359 aa, Ralstonia solanacearum; identical to SEQ ID NO: 1530

SEQ ID NO: 21774 - DNA, 1179 bp, Ralstonia solanacearum; identical to SEQ ID NO: 1531
  CDS (1)..(1179)

SEQ ID NO: 21775 - protein, 392 aa, Ralstonia solanacearum; identical to SEQ ID NO: 1532

SEQ ID NO: 21776 - DNA, 1065 bp, Synechococcus sp; identical to SEQ ID NO: 1533
  CDS (1)..(1065)

SEQ ID NO: 21777 - protein, 354 aa, Synechococcus sp; identical to SEQ ID NO: 1534

SEQ ID NO: 21778 - DNA, 1035 bp, Escherichia coli; identical to SEQ ID NO: 1535
  CDS (1)..(1035)

SEQ ID NO: 21779 - protein, 344 aa, Escherichia coli; identical to SEQ ID NO: 1536

SEQ ID NO: 21780 - DNA, 1200 bp, Stigmatella aurantiaca; identical to SEQ ID NO: 1537
  CDS (62)..(1147)

SEQ ID NO: 21781 - protein, 361 aa, Stigmatella aurantiaca; identical to SEQ ID NO: 1538

SEQ ID NO: 21782 - DNA, 1092 bp, Rhizobium loti; identical to SEQ ID NO: 1539
  CDS (1)..(1092)

SEQ ID NO: 21783 - protein, 363 aa, Rhizobium loti; identical to SEQ ID NO: 1540

SEQ ID NO: 21784 - DNA, 1083 bp, Amycolatopsis mediterranei; identical to SEQ ID NO: 1541
  CDS (1)..(1083)

SEQ ID NO: 21785 - protein, 360 aa, Amycolatopsis mediterranei; identical to SEQ ID NO: 1542

SEQ ID NO: 21786 - DNA, 1053 bp, Pasteurella multocida; identical to SEQ ID NO: 1543
  CDS (1)..(1053)

SEQ ID NO: 21787 - protein, 350 aa, Pasteurella multocida; identical to SEQ ID NO: 1544

SEQ ID NO: 21788 - DNA, 1086 bp, Pasteurella multocida; identical to SEQ ID NO: 1545
  CDS (1)..(1086)

SEQ ID NO: 21789 - protein, 361 aa, Pasteurella multocida; identical to SEQ ID NO: 1546

SEQ ID NO: 21790 - DNA, 1125 bp, Emericella nidulans; identical to SEQ ID NO: 1547
  CDS (1)..(1125)

SEQ ID NO: 21791 - protein, 374 aa, Emericella nidulans; identical to SEQ ID NO: 1548

SEQ ID NO: 21792 - DNA, 1089 bp, Emericella nidulans; identical to SEQ ID NO: 1549
  CDS (1)..(1089)

SEQ ID NO: 21793 - protein, 362 aa, Emericella nidulans; identical to SEQ ID NO: 1550

SEQ ID NO: 21794 - DNA, 1239 bp, Vibrio cholerae; identical to SEQ ID NO: 1551
  CDS (114)..(1175)

SEQ ID NO: 21795 - protein, 353 aa, Vibrio cholerae; identical to SEQ ID NO: 1552

SEQ ID NO: 21796 - DNA, 2184 bp, Candida albicans; identical to SEQ ID NO: 1553
  CDS (461)..(1573)

SEQ ID NO: 21797 - protein, 370 aa, Candida albicans; identical to SEQ ID NO: 1554

SEQ ID NO: 21798 - DNA, 1047 bp, Buchnera aphidicola; identical to SEQ ID NO: 1555
  CDS (1)..(1047)

SEQ ID NO: 21799 - protein, 348 aa, Buchnera aphidicola; identical to SEQ ID NO: 1556

SEQ ID NO: 21800 - DNA, 1047 bp, Buchnera aphidicola; identical to SEQ ID NO: 1557
  CDS (1)..(1047)

SEQ ID NO: 21801 - protein, 348 aa, Buchnera aphidicola; identical to SEQ ID NO: 1558

SEQ ID NO: 21802 - DNA, 1047 bp, Erwinia herbicola; identical to SEQ ID NO: 1559
  CDS (1)..(1047)

SEQ ID NO: 21803 - protein, 348 aa, Erwinia herbicola; identical to SEQ ID NO: 1560

SEQ ID NO: 21804 - DNA, 1047 bp, Salmonella typhimurium; identical to SEQ ID NO: 1561
  CDS (1)..(1047)

SEQ ID NO: 21805 - protein, 348 aa, Salmonella typhimurium; identical to SEQ ID NO: 1562

SEQ ID NO: 21806 - DNA, 23 bp, Artificial sequence
  Primer sequence
atgaacagaactgacgaactccg

SEQ ID NO: 21807 - DNA, 24 bp, Artificial sequence
  Primer sequence
ttagaagcgggtatctaccgcaga

SEQ ID NO: 21808 - protein, 352 aa, Artificial sequence; identical to SEQ ID NO: 19007
  Consensus
  Variant (2)..(3): Xaa in position 2 to 3 is any amino acid
  Variant (5)..(11): Xaa in position 5 to 11 is any amino acid
  Variant (13)..(24): Xaa in position 13 to 24 is any amino acid
  Variant (26)..(30): Xaa in position 26 to 30 is any amino acid
  Variant (32)..(33): Xaa in position 32 to 33 is any amino acid
  Variant (35)..(35): Xaa in position 35 is any amino acid
  Variant (37)..(40): Xaa in position 37 to 40 is any amino acid
  Variant (42)..(43): Xaa in position 42 to 43 is any amino acid
  Variant (45)..(46): Xaa in position 45 to 46 is any amino acid
  Variant (51)..(51): Xaa in position 51 is any amino acid
  Variant (54)..(55): Xaa in position 54 to 55 is any amino acid
  Variant (58)..(59): Xaa in position 58 to 59 is any amino acid
  Variant (62)..(63): Xaa in position 62 to 63 is any amino acid
  Variant (65)..(76): Xaa in position 65 to 76 is any amino acid
  Variant (78)..(80): Xaa in position 78 to 80 is any amino acid
  Variant (83)..(83): Xaa in position 83 is any amino acid
  Variant (85)..(85): Xaa in position 85 is any amino acid
  Variant (91)..(93): Xaa in position 91 to 93 is any amino acid
  Variant (100)..(100): Xaa in position 100 is any amino acid
  Variant (103)..(112): Xaa in position 103 to 112 is any amino acid
  Variant (115)..(117): Xaa in position 115 to 117 is any amino acid
  Variant (119)..(119): Xaa in position 119 is any amino acid
  Variant (121)..(128): Xaa in position 121 to 128 is any amino acid
  Variant (130)..(130): Xaa in position 130 is any amino acid
  Variant (132)..(132): Xaa in position 132 is any amino acid
  Variant (134)..(134): Xaa in position 134 is any amino acid
  Variant (136)..(136): Xaa in position 136 is any amino acid
  Variant (139)..(142): Xaa in position 139 to 142 is any amino acid
  Variant (144)..(146): Xaa in position 144 to 146 is any amino acid
  Variant (148)..(152): Xaa in position 148 to 152 is any amino acid
  Variant (163)..(163): Xaa in position 163 is any amino acid
  Variant (166)..(167): Xaa in position 166 to 167 is any amino acid
  Variant (170)..(170): Xaa in position 170 is any amino acid
  Variant (173)..(173): Xaa in position 173 is any amino acid
  Variant (175)..(175): Xaa in position 175 is any amino acid
  Variant (180)..(180): Xaa in position 180 is any amino acid
  Variant (182)..(182): Xaa in position 182 is any amino acid
  Variant (184)..(187): Xaa in position 184 to 187 is any amino acid
  Variant (189)..(190): Xaa in position 189 to 190 is any amino acid
  Variant (192)..(194): Xaa in position 192 to 194 is any amino acid
  Variant (196)..(198): Xaa in position 196 to 198 is any amino acid
  Variant (200)..(200): Xaa in position 200 is any amino acid
  Variant (202)..(207): Xaa in position 202 to 207 is any amino acid
  Variant (209)..(214): Xaa in position 209 to 214 is any amino acid
  Variant (216)..(216): Xaa in position 216 is any amino acid
  Variant (219)..(221): Xaa in position 219 to 221 is any amino acid
  Variant (223)..(224): Xaa in position 223 to 224 is any amino acid
  Variant (229)..(237): Xaa in position 229 to 237 is any amino acid
  Variant (240)..(268): Xaa in position 240 to 268 is any amino acid
  Variant (270)..(270): Xaa in position 270 is any amino acid
  Variant (273)..(273): Xaa in position 273 is any amino acid
  Variant (276)..(276): Xaa in position 276 is any amino acid
  Variant (278)..(281): Xaa in position 278 to 281 is any amino acid
  Variant (283)..(284): Xaa in position 283 to 284 is any amino acid
  Variant (286)..(291): Xaa in position 286 to 291 is any amino acid
  Variant (293)..(295): Xaa in position 293 to 295 is any amino acid
  Variant (297)..(304): Xaa in position 297 to 304 is any amino acid
  Variant (306)..(306): Xaa in position 306 is any amino acid
  Variant (308)..(308): Xaa in position 308 is any amino acid
  Variant (311)..(314): Xaa in position 311 to 314 is any amino acid
  Variant (316)..(316): Xaa in position 316 is any amino acid
  Variant (318)..(333): Xaa in position 318 to 333 is any amino acid
  Variant (336)..(336): Xaa in position 336 is any amino acid
  Variant (338)..(338): Xaa in position 338 is any amino acid
  Variant (341)..(341): Xaa in position 341 is any amino acid
  Variant (343)..(344): Xaa in position 343 to 344 is any amino acid
  Variant (346)..(347): Xaa in position 346 to 347 is any amino acid
  Variant (349)..(351): Xaa in position 349 to 351 is any amino acid

SEQ ID NO: 21809 - protein, 24 aa, Artificial sequence
  Consensus
  Variant (2)..(2): Xaa in position 2 is any amino acid
  Variant (3)..(3): Xaa in position 3 is Leu, Val, Phe, Ile, Ala or Met
  Variant (4)..(4): Xaa in position 4 is Val, Ile, Leu or Ala
  Variant (5)..(5): Xaa in position 5 is Val or Ile
  Variant (6)..(6): Xaa in position 6 is Val, Ile, Cys or Thr
  Variant (11)..(11): Xaa in position 11 is Ile, Val, Ser or Leu
  Variant (12)..(12): Xaa in position 12 is His or Asp
  Variant (13)..(13): Xaa in position 13 is Asp or Asn
  Variant (14)..(15): Xaa in position 14 to 15 is any amino acid
  Variant (16)..(16): Xaa in position 16 is Ala, Ser, Gln or Thr
  Variant (17)..(17): Xaa in position 17 is Ala, Val or Gly
  Variant (18)..(18): Xaa in position 18 is any amino acid
  Variant (19)..(19): Xaa in position 19 is Glu, Asp, Ala or Gln
  Variant (21)..(21): Xaa in position 21 is Ala, Gly, Cys or Ser
  Variant (22)..(22): Xaa in position 22 is any amino acid
  Variant (23)..(23): Xaa in position 23 is Arg, Lys, Gln, His or Leu
  Variant (24)..(24): Xaa in position 24 is Leu, Ile or Phe
RXXXXXGPCSXXXXXXXXXYXXXX

SEQ ID NO: 21810 - protein, 42 aa, Artificial sequence; identical to SEQ ID NO: 2884
  Consensus
  Variant (1)..(1): Xaa in position 1 is Leu, Ile, Phe or Met
  Variant (2)..(2): Xaa in position 2 is any amino acid
  Variant (3)..(3): Xaa in position 3 is Ile, Val, Leu or Met
  Variant (4)..(4): Xaa in position 4 is Val, Ile or Leu
  Variant (7)..(7): Xaa in position 7 is Val, Ala or Thr
  Variant (9)..(9): Xaa in position 9 is Phe, Leu, Thr or Val
  Variant (10)..(10): Xaa in position 10 is Glu or Ala
  Variant (15)..(16): Xaa in position 15 to 16 is any amino acid
  Variant (17)..(17): Xaa in position 17 is any or no amino acid
  Variant (19)..(19): Xaa in position 19 is Trp or Tyr
  Variant (20)..(20): Xaa in position 20 is Lys or Arg
  Variant (22)..(22): Xaa in position 22 is Leu, Phe, Met or Tyr
  Variant (23)..(23): Xaa in position 23 is Ile, Val, Ala or Leu
  Variant (24)..(24): Xaa in position 24 is any amino acid
  Variant (25)..(25): Xaa in position 25 is Asp, Glu or Gln
  Variant (27)..(27): Xaa in position 27 is any amino acid
  Variant (28)..(28): Xaa in position 28 is Leu, Met, Ile, Val, Ala or Thr
  Variant (29)..(29): Xaa in position 29 is Asp, Asn or Ser
  Variant (30)..(33): Xaa in position 30 to 33 is any amino acid
  Variant (34)..(34): Xaa in position 34 is Ile, Val, Leu or Met
  Variant (35)..(36): Xaa in position 35 to 36 is any amino acid
  Variant (38)..(38): Xaa in position 38 is Leu, Ile, Met or Val
  Variant (39)..(40): Xaa in position 39 to 40 is any amino acid
  Variant (41)..(41): Xaa in position 41 is Ala, Ser, Gly, Val or Thr

SEQ ID NO: 21811 - protein, 65 aa, Artificial sequence; identical to SEQ ID NO: 2885
  Consensus
  Variant (2)..(2): Xaa in position 2 is any amino acid
  Variant (4)..(4): Xaa in position 4 is Asp, Tyr, Gln, Asn or Glu
  Variant (5)..(9): Xaa in position 5 to 9 is any amino acid
  Variant (10)..(10): Xaa in position 10 is Tyr, Phe or Leu
  Variant (11)..(12): Xaa in position 11 to 12 is any amino acid
  Variant (13)..(13): Xaa in position 13 is Asp or Glu
  Variant (14)..(15): Xaa in position 14 to 15 is any amino acid
  Variant (16)..(16): Xaa in position 16 is Ser, Ala, Thr or Cys
  Variant (17)..(17): Xaa in position 17 is Trp, Phe, Tyr, Leu or Val
  Variant (18)..(18): Xaa in position 18 is any amino acid
  Variant (19)..(19): Xaa in position 19 is Ala or Ser
  Variant (20)..(20): Xaa in position 20 is Ile or Val
  Variant (24)..(24): Xaa in position 24 is Thr, Ser or Asn
  Variant (25)..(25): Xaa in position 25 is Thr, Val, Ala, Ser or Ile
  Variant (26)..(26): Xaa in position 26 is Glu or Ala
  Variant (27)..(27): Xaa in position 27 is Ser, Asp or Asn
  Variant (29)..(29): Xaa in position 29 is any amino acid
  Variant (32)..(32): Xaa in position 32 is Glu, Gln, Phe or Met
  Variant (33)..(33): Xaa in position 33 is Leu, Met, Val, Ile or Phe
  Variant (34)..(34): Xaa in position 34 is Ala, Ser, Thr, Cys or Val
  Variant (36)..(36): Xaa in position 36 is Gly, Ala or Asn
  Variant (37)..(39): Xaa in position 37 to 39 is any amino acid
  Variant (40)..(40): Xaa in position 40 is Pro or Ala
  Variant (41)..(41): Xaa in position 41 is Val, Ile, Thr or Leu
  Variant (43)..(43): Xaa in position 43 is Phe, Met, Tyr or Ile
  Variant (46)..(46): Xaa in position 46 is any amino acid
  Variant (47)..(47): Xaa in position 47 is Thr, Ser or Arg
  Variant (48)..(48): Xaa in position 48 is any amino acid
  Variant (50)..(53): Xaa in position 50 to 53 is any amino acid
  Variant (54)..(54): Xaa in position 54 is Ala or Met
  Variant (55)..(55): Xaa in position 55 is any amino acid
  Variant (56)..(56): Xaa in position 56 is Asp, Asn or Glu
  Variant (57)..(57): Xaa in position 57 is Ala or Gly
  Variant (58)..(59): Xaa in position 58 to 59 is any amino acid
  Variant (60)..(60): Xaa in position 60 is Ala or Ser
  Variant (61)..(61): Xaa in position 61 is Ala, Ser, Val or Thr
  Variant (62)..(64): Xaa in position 62 to 64 is any amino acid
  Variant (65)..(65): Xaa in position 65 is His or Gln

SEQ ID NO: 21812 - protein, 71 aa, Artificial sequence; identical to SEQ ID NO: 2886
  Consensus
  Variant (1)..(1): Xaa in position 1 is Thr or Ser
  Variant (2)..(2): Xaa in position 2 is any amino acid
  Variant (5)..(7): Xaa in position 5 to 7 is any amino acid
  Variant (8)..(8): Xaa in position 8 is His or Phe
  Variant (9)..(9): Xaa in position 9 is Val, Ile, Leu or Ala
  Variant (10)..(10): Xaa in position 10 is Ile or Val
  Variant (11)..(11): Xaa in position 11 is Leu or Met
  Variant (14)..(14): Xaa in position 14 is Gly, Ser or Ala
  Variant (15)..(16): Xaa in position 15 to 16 is any amino acid
  Variant (17)..(22): Xaa in position 17 to 22 is any or no amino acid
  Variant (23)..(23): Xaa in position 23 is Pro, Thr or Ser
  Variant (25)..(25): Xaa in position 25 is Tyr, Phe or His
  Variant (26)..(29): Xaa in position 26 to 29 is any amino acid
  Variant (30)..(30): Xaa in position 30 is Val, Ile or Leu
  Variant (31)..(36): Xaa in position 31 to 36 is any amino acid
  Variant (37)..(37): Xaa in position 37 is Leu, Met, Ile, Tyr or His
  Variant (38)..(40): Xaa in position 38 to 40 is any amino acid
  Variant (41)..(51): Xaa in position 41 to 51 is any or no amino acid
  Variant (52)..(52): Xaa in position 52 is Leu, Ile or Val
  Variant (53)..(53): Xaa in position 53 is Met, Val, Ile or Leu
  Variant (54)..(54): Xaa in position 54 is Ile or Val
  Variant (56)..(56): Xaa in position 56 is Cys, Phe, Ala, Thr, Tyr or Val
  Variant (57)..(57): Xaa in position 57 is Ser, Asn or Ala
  Variant (59)..(59): Xaa in position 59 is Gly, Ala or Asp
  Variant (61)..(61): Xaa in position 61 is Ser or Cys
  Variant (62)..(62): Xaa in position 62 is any amino acid
  Variant (64)..(66): Xaa in position 64 to 66 is any amino acid
  Variant (67)..(67): Xaa in position 67 is Arg, Asn, Lys, Leu or Glu
  Variant (69)..(70): Xaa in position 69 to 70 is any amino acid
  Variant (71)..(71): Xaa in position 71 is Val or Ile

SEQ ID NO: 21813 - protein, 41 aa, Artificial sequence; identical to SEQ ID NO: 2887
  Consensus
  Variant (2)..(2): Xaa in position 2 is any amino acid
  Variant (4)..(4): Xaa in position 4 is Ile, Leu, Val, Ala or Met
  Variant (7)..(7): Xaa in position 7 is His, Asn, Phe or Tyr
  Variant (8)..(8): Xaa in position 8 is Leu or Ile
  Variant (9)..(10): Xaa in position 9 to 10 is any amino acid
  Variant (12)..(12): Xaa in position 12 is any amino acid
  Variant (14)..(19): Xaa in position 14 to 19 is any amino acid
  Variant (20)..(30): Xaa in position 20 to 30 is any or no amino acid
  Variant (32)..(32): Xaa in position 32 is any amino acid
  Variant (34)..(34): Xaa in position 34 is Ile or Val
  Variant (37)..(37): Xaa in position 37 is Ala, Pro, Gly, Lys, Ser or Glu
  Variant (39)..(39): Xaa in position 39 is Ile, Leu or Val
  Variant (40)..(40): Xaa in position 40 is any amino acid
  Variant (41)..(41): Xaa in position 41 is Trp, Ile, Leu or Phe

SEQ ID NO: 21814 - DNA, 1122 bp, Escherichia coli K12
  CDS (1)..(1122)
atggttgctgaattgaccgcattacgcgatcaaattgatgaagtcgataaagcgctgctgaatttattagcgaagcgtctggaactggttgctgaagtgggcgaggtgaaaagccgctttggactgcctatttatgttccggagcgcgaggcatctatgttggcctcgcgtcgtgcagaggcggaagctctgggtgtaccgccagatctgattgaggatgttttgcgtcgggtgatgcgtgaatcttactccagtgaaaacgacaaaggatttaaaacactttgtccgtcactgcgtccggtggttatcgtcggcggtggcggtcagatgggacgcctgttcgagaagatgctgaccctctcgggttatcaggtgcggattctggagcaacatgactgggatcgagcggctgatattgttgccgatgccggaatggtgattgttagtgtgccaatccacgttactgagcaagttattggcaaattaccgcctttaccgaaagattgtattctggtcgatctggcatcagtgaaaaatgggccattacaggccatgctggtggcgcatgatggtccggtgctggggctacacccgatgttcggtccggacagcggtagcctggcaaagcaagttgtggtctggtgtgatggacgtaaaccggaagcataccaatggtttctggagcaaattcaggtctggggcgctcggctgcatcgtattagcgccgtcgagcacgatcagaatatggcgtttattcaggcactgcgccactttgctacttttgcttacgggctgcacctggcagaagaaaatgttcagcttgagcaacttctggcgctctcttcgccgatttaccgccttgagctggcgatggtcgggcgactgtttgctcaggatccgcagctttatgccgacatcattatgtcgtcagagcgtaatctggcgttaatcaaacgttactataagcgtttcggcgaggcgattgagttgctggagcagggcgataagcaggcgtttattgacagtttccgcaaggtggagcactggttcggcgattacgcacagcgttttcagagtgaaagccgcgtgttattgcgtcaggcgaatgacaatcgccagtaa

SEQ ID NO: 21815 - protein, 373 aa, Escherichia coli K12
MVAELTALRDQIDEVDKALLNLLAKRLELVAEVGEVKSRFGLPIYVPEREASMLASRRAEAEALGVPPDLIEDVLRRVMRESYSSENDKGFKTLCPSLRPVVIVGGGGQMGRLFEKMLTLSGYQVRILEQHDWDRAADIVADAGMVIVSVPIHVTEQVIGKLPPLPKDCILVDLASVKNGPLQAMLVAHDGPVLGLHPMFGPDSGSLAKQVVVWCDGRKPEAYQWFLEQIQVWGARLHRISAVEHDQNMAFIQALRHFATFAYGLHLAEENVQLEQLLALSSPIYRLELAMVGRLFAQDPQLYADIIMSSERNLALIKRYYKRFGEAIELLEQGDKQAFIDSFRKVEHWFGDYAQRFQSESRVLLRQANDNRQ

SEQ ID NO: 21816 - DNA, 1122 bp, Yersinia pestis
  CDS (1)..(1122)
atggtggctgaactgactgctttacgcgatcaaattgatgaagtcgataaagcgttgttggatttgctggctaaacgcctgcatttggtggctgaagtcggtgaagtaaaaagccgttatggcttgccgatatatgttccggatcgtgaggcggcaatgctggcctcacgccggcaagaagccggggcactaggtgttccgccggatttaattgaagatgtgctgcgtcgggtgatgcgggaatcttataccagcgaaaatgataaaggcttcaagacattatgcccggaactgcgtccagtggttatcatcggtggtcaagggcagatgggtcggttatttagccggatgcttaatctgtctggttatcaggtgagaacactggagcaagaagattggtcacaagctgaatctattctggctgatgccgggatggtgattgtgagtgtccccattcatatcactgaagaggtgattaatcggctacccaaattaccagcagattgtattttgctggatttggcctcggtaaaaaataaacccctgcaagctatgctggcagcccatgaagggccagttttggggttgcatccaatgtttggccctgatgtcggcagcttggcgaagcaagtcgtggtgtattgtgatggacgcgatccacaggcgtatcagtggttactggagcagctacaggtctggggagcaagattgcaccgtatcagcgcggtcgaacatgatcaaaacatggcgttcattcaggctctgaggcattttgcgacttttgcgtacggattgcatctggcggaagaaaatgtgcaattggaacaattgctggcactgtcttcaccaatttatcgcctggagctggcaatggttgggcggctatttgcacaagatccacagctttacgctgatatcattatgtcgtcggaagataatctggcgctgattaaacgttactacaaacgctttggtgaggcgctcaccttgttagagcaccatgataaacaagcgtttgttcaaagtttcgagaaagtagaacactggtttggtgattacgcggaacgtttcttggtagagagccgttcattactgcgtcaggcgaacgataatcgtcagtag

SEQ ID NO: 21817 - protein, 373 aa, Yersinia pestis
MVAELTALRDQIDEVDKALLDLLAKRLHLVAEVGEVKSRYGLPIYVPDREAAMLASRRQEAGALGVPPDLIEDVLRRVMRESYTSENDKGFKTLCPELRPVVIIGGQGQMGRLFSRMLNLSGYQVRTLEQEDWSQAESILADAGMVIVSVPIHITEEVINRLPKLPADCILLDLASVKNKPLQAMLAAHEGPVLGLHPMFGPDVGSLAKQVVVYCDGRDPQAYQWLLEQLQVWGARLHRISAVEHDQNMAFIQALRHFATFAYGLHLAEENVQLEQLLALSSPIYRLELAMVGRLFAQDPQLYADIIMSSEDNLALIKRYYKRFGEALTLLEHHDKQAFVQSFEKVEHWFGDYAERFLVESRSLLRQANDNRQ

SEQ ID NO: 21818 - DNA, 1122 bp, Salmonella enterica subsp. enterica serovar Typhi
  CDS (1)..(1122)
atggttgctgaattgaccgcgttacgcgatcaaatagatgatgtcgataaagcgttgttgaatttactggctaagcgcctggaactggttgccaaagtcggcgaggtgaaaagccgttttggcctgcctatttacgtgccggagcgtgaggcctctatgctggcttcacgacgggcggaagcagaagcgatcggtgtcccgcccgatctcattgaagatgtcctgcgccgggtaatgcgtgaatcttactccagcgaaaatgataaggggttcaaaacgctttgtccttctctgcgtccggtcgtcattgtgggcggcggcggacagatggggcgtctgtttgaaaaaatgctcacgctgtcgggctatcaggtccgtattctggaacaacaggactggccgcgcgccagggacattgtcgccgatgccggaatggtgatcgtcagcgtgccgattcatgttactgaacaggtcatagcgcaactgccgcccctgccgtccgactgtattctggtcgatctggcatcggtgaaaagcggtccgttacaggcaatgttggcggcccatgatggccccgtgctgggcttgcacccgatgtttggcccggacagcgggagcctggcgaagcaggtggtggtctggtgtgatgggcgtcaaccggaagcgtatcagtggttccttgagcaaatccaggtgtggggcgcgcggttgcaccgaattagcgctgtcgagcacgatcagaacatggcttttatccaggcgctgcgccactttgctaccttcgcttatgggctgcatctggcggaagagaacgtccagcttgagcagcttctggcgctatcatcgccgatttatcgactggagctggcgatggtcgggcgtctgttcgcccaggacccgcagctgtatgcagacattattatgtcgtcggagcgcaatctggcgcttatcaagcgttactataaacgttttggcgatgcgatcgggttactggaacagggtgataagcaggcttttatcgacagttttcgcaaagttgaacactggtttggcgattatgccagacgcttccagaatgaaagccgtgtgttattacgtcaggcgaatgacagccgaccataa

SEQ ID NO: 21819 - protein, 373 aa, Salmonella enterica subsp. enterica serovar Typhi
MVAELTALRDQIDDVDKALLNLLAKRLELVAKVGEVKSRFGLPIYVPEREASMLASRRAEAEAIGVPPDLIEDVLRRVMRESYSSENDKGFKTLCPSLRPVVIVGGGGQMGRLFEKMLTLSGYQVRILEQQDWPRARDIVADAGMVIVSVPIHVTEQVIAQLPPLPSDCILVDLASVKSGPLQAMLAAHDGPVLGLHPMFGPDSGSLAKQVVVWCDGRQPEAYQWFLEQIQVWGARLHRISAVEHDQNMAFIQALRHFATFAYGLHLAEENVQLEQLLALSSPIYRLELAMVGRLFAQDPQLYADIIMSSERNLALIKRYYKRFGDAIGLLEQGDKQAFIDSFRKVEHWFGDYARRFQNESRVLLRQANDSRP

SEQ ID NO: 21820 - DNA, 1128 bp, Vibrio cholerae
  CDS (1)..(1128)
atggccgtagagttgaatcagttacgcgaccaaatcgatgaagtcgataagcagatggtggagctactggcgcgccgtctggcattggtggagcaggtcgggcaagtgaaaagtcgatatgggttaccgatttatgctcccgatcgtgaagcggcaatgctcgcttcacgtcgagcggaagcggaaagcaaaggtgttccgccccaactgattgaagatattttgcgccgaaccatgcgtgaatcctacgccagtgaaaaggactccggctttaaatgccttaatcctgagttacgttccgtggtgatcgtcggtggtaacggtcagcttgggcgactatttggccgtatgtttaaactctctggctatcaagtcaaagtgctgggcagccaagattgggacaaagcggatgaactgctcagtgatgctggcttagtggtggtcacggtacctatccatttgacgctcggtgttatcgaaaagctgcgccagttaccggacgattgcattttgtgcgatctcacctcaatcaaagccaagccgcttgccgccatgctacaagtgcacaaaggtccagtggttgggctgcaccctatgtttggtccagacgttccaagcttggcgaagcaggtgattgtttactgtgatggtcgaggcaatgaacactaccaatggctcttgcaacagtttgctatttggggcgcaagcttgtgccagattgatgcggatgaacatgatcgtggtatgacacttattcaagcactgcgccacttcacttcctttgcttatggcttgcatctgaccaaagagaacccgaacttggcacaactgctgaaactcagttcaccgatttaccgtttagagcttgccatggtcggacggctatttgggcaagatccccatctgtacggcgatattattctctcatcaccagaaaatattgagatgatccagcgttttcatcgctgcttaagcgatgcggttgagttggtgagcgcgggcgataaggcgagttttgtggctcaatttgaacgagttagccagtggtttggtgattattcacagcagtttatgcatgagagccaaaacttgctcaaacaagcgaatgatgcgatccacagaggttaa

SEQ ID NO: 21821 - protein, 375 aa, Vibrio cholerae
MAVELNQLRDQIDEVDKQMVELLARRLALVEQVGQVKSRYGLPIYAPDREAAMLASRRAEAESKGVPPQLIEDILRRTMRESYASEKDSGFKCLNPELRSVVIVGGNGQLGRLFGRMFKLSGYQVKVLGSQDWDKADELLSDAGLVVVTVPIHLTLGVIEKLRQLPDDCILCDLTSIKAKPLAAMLQVHKGPVVGLHPMFGPDVPSLAKQVIVYCDGRGNEHYQWLLQQFAIWGASLCQIDADEHDRGMTLIQALRHFTSFAYGLHLTKENPNLAQLLKLSSPIYRLELAMVGRLFGQDPHLYGDIILSSPENIEMIQRFHRCLSDAVELVSAGDKASFVAQFERVSQWFGDYSQQFMHESQNLLKQANDAIHRG

SEQ ID NO: 21822 - DNA, 1134 bp, Haemophilus influenzae
  CDS (1)..(1134)
atgagttttatggaagcccttaaagatttacgttctgaaattgattcgcttgatcgcgaacttatccaactttttgctaaacgtcttgagttggtttctcaagtcggtaaagtgaaacatcaacatggattacctatttatgcgccagaacgtgaaatagcaatgctccaagcacgtcgtttagaagctgaaaaagcaggcatttcagccgatttaattgaagatgttctacgccgttttatgcgtgaatcctatgccaatgaaaaccaatttggttttaaaactatcaattctgatattcacaaaattgttattgtgggcggttatggtaaattaggcggcttatttgcccgttatttacgtgcatctggctatccaatttctattttagatcgcgaagattgggcggtggctgaaagtattttagcgaatgctgatgtcgtgatcgtttccgtccctattaatctcaccttagaaacaattgaacgcttaaaaccttatttaacggaaaacatgctacttgcagatttaacctctgttaagcgtgaaccgctagcgaaaatgcttgaagttcatactggtgctgttttaggtttacatccaatgtttggtgcagatattgcaagtatggcaaaacaagtggttgtgcgttgtgatggacgttttcctgaacgttatgaatggttacttgagcaaattcaaatttggggtgcaaaaatttatcaaaccaatgccacagaacacgatcataatatgacttatatacaagccttgcgccatttttcgacttttgcgaatggtttacacctttccaaacagcccattaatctcgctaatttattggcactttcttcccctatttatcggttagaacttgcgatgataggtcgtttatttgcgcaagatgcagagctttacgcagatattattatggataagtcagaaaatttagcggtaattgaaacgctaaaacaaacttacgacgaagccttaactttctttgaaaataatgatcgtcaaggttttattgatgctttccacaaggtgcgtgactggtttggcgattattccgaacaatttttaaaagaaagccgtcagctattgcaacaggcaaatgatttgaaacaagggtag

SEQ ID NO: 21823 - protein, 377 aa, Haemophilus influenzae
MSFMEALKDLRSEIDSLDRELIQLFAKRLELVSQVGKVKHQHGLPIYAPEREIAMLQARRLEAEKAGISADLIEDVLRRFMRESYANENQFGFKTINSDIHKIVIVGGYGKLGGLFARYLRASGYPISILDREDWAVAESILANADVVIVSVPINLTLETIERLKPYLTENMLLADLTSVKREPLAKMLEVHTGAVLGLHPMFGADIASMAKQVVVRCDGRFPERYEWLLEQIQIWGAKIYQTNATEHDHNMTYIQALRHFSTFANGLHLSKQPINLANLLALSSPIYRLELAMIGRLFAQDAELYADIIMDKSENLAVIETLKQTYDEALTFFENNDRQGFIDAFHKVRDWFGDYSEQFLKESRQLLQQANDLKQG

SEQ ID NO: 21824 - DNA, 1122 bp, Erwinia herbicola
  CDS (1)..(1122)
atggtggctgaactgaccgcgttacgcgatcaaattgacagtgtagataaagcgctgctggatctgctggctaagcgactggaactggtggccgaggtaggtgaggtgaagagccgttacggcctgcctatctatgtgcctgagcgtgaggcgtcgatgctggcttcgcgtcgcaaagaggccgaagcgctcggcgtaccaccggatctgattgaggatgtgctgcgtcgcgtgatgcgggaatcctataccagcgagaatgataaaggctttaaaaccctctgtcctgaactgcgcccggtggtgattgtcggtggtaagggccagatgggccggctgtttgaaaaaatgctcgggctatcaggctacacggttaaaacgctggataaagaggactggcctcaggctgagactctgctcagcgatgccggaatggtgatcattagcgtgccgattcacctgaccgagcaggtgattgcccaactgccaccactgccggaagattgtattctggtcgatctggcgtcagtcaaaaaccggcctctgcaggcaatgctggctgcccataacgggcctgtactgggtctgcatccgatgtttggcccggacagcggcagcctggcaaaacaggtggtggtctggtgtgatggaagacaaccggaagcgtatcagtggttcctggagcagattcaggtctggggtgcgcgtctgcatcgtatcagcgctgttgagcatgaccagaacatggcattcattcaggcgctgcgtcactttgctaccttcgcttatggtctgcatttagccgaagagaacgtcaatctggatcagctgctggcgctctcgtcgcccatttaccggcttgaactggcgatggtggggcggttgttcgctcaggatccgcaactctatgcggatatcatcatgtcttcagagagtaatctggcgctgataaaacgctattaccagcggtttggtgaagcgattgcgctgctggagcagggcgacaagcaggcgtttatcgccagctttaaccgggttgaacagtggtttggcgatcacgcaaaacgcttcctggtcgaaagccgaagcctgttgcgatcggccaatgacagccgcccataa

SEQ ID NO: 21825 - protein, 373 aa, Erwinia herbicola
MVAELTALRDQIDSVDKALLDLLAKRLELVAEVGEVKSRYGLPIYVPEREASMLASRRKEAEALGVPPDLIEDVLRRVMRESYTSENDKGFKTLCPELRPVVIVGGKGQMGRLFEKMLGLSGYTVKTLDKEDWPQAETLLSDAGMVIISVPIHLTEQVIAQLPPLPEDCILVDLASVKNRPLQAMLAAHNGPVLGLHPMFGPDSGSLAKQVVVWCDGRQPEAYQWFLEQIQVWGARLHRISAVEHDQNMAFIQALRHFATFAYGLHLAEENVNLDQLLALSSPIYRLELAMVGRLFAQDPQLYADIIMSSESNLALIKRYYQRFGEAIALLEQGDKQAFIASFNRVEQWFGDHAKRFLVESRSLLRSANDSRP

SEQ ID NO: 21826 - DNA, 1131 bp, Mannheimia succiniciproducens MBEL55E
  CDS (1)..(1131)
atggaagcactcaaagaaatcagagccgaaatcgatcaattggatcgagagttgttagaagtttttgccaaacgtttagcgttagtcaaaaaggtcggagaaattaaacatcaacaaggtttgccgatttatgtaccggaacgcgaagcagatatgctggcggctcggcgttcagaagcggaaaaaatgggcatacctgcggatttaattgaagatgtgttacgtcgtgttatgcgggagtcttacgctaacgaacatgaacacggttttaaaaccgttaatccggcgattaaaaaaattgttattgtaggcggtaaaggcaaattaggcggcttattcgggcgttttctgacggcttcaggctactttgtggaagcgttgggaagcaaagattgggacaacgcaaaggctattttggccggtgcaaatgcggtaatcgtttgtgtgcctatcgtaaaaaccttggaaaccattgaacgcttaaaaccttatttaacggaagatatgttattgacggatctaacctccgtaaaacgccgcccgttggaaaaaatgctggaaattcatcaaggcgcggtcgtaggcttgcatccgatgtttgggcccgatatcgcaagcatggcaaaacaggtggttgtacgttgcgacgggcgttatccggagcgttatcaatggctgttggaacaaattcaaatgtggggcgcgcgaatttatcaggcggatgccgccgagcatgaccacagcatgacctatattcaagcattacgtcattttgccacctttgccaacggtttacatctttcaagacaaccggtgaaattagctaatttattagccttatcttcaccgatttatcgtctggaacttgcgatgatcgggcgtttgtttgcgcaagacggtagtttatatgccgatattattatggataagccggaaaacctggaagtaatcgaaagtttaaaacaaagctatgaagacagcttaaaattctttgaaaacggtgatagagaaggctttattaaaacctttaacaaagtgagagaatggttcggcgattattcggaacaatttatgaaagaaagccgtcaactgctgcaacaagctaacgattatcgtcataatagtctctga

SEQ ID NO: 21827 - protein, 376 aa, Mannheimia succiniciproducens MBEL55E
MEALKEIRAEIDQLDRELLEVFAKRLALVKKVGEIKHQQGLPIYVPEREADMLAARRSEAEKMGIPADLIEDVLRRVMRESYANEHEHGFKTVNPAIKKIVIVGGKGKLGGLFGRFLTASGYFVEALGSKDWDNAKAILAGANAVIVCVPIVKTLETIERLKPYLTEDMLLTDLTSVKRRPLEKMLEIHQGAVVGLHPMFGPDIASMAKQVVVRCDGRYPERYQWLLEQIQMWGARIYQADAAEHDHSMTYIQALRHFATFANGLHLSRQPVKLANLLALSSPIYRLELAMIGRLFAQDGSLYADIIMDKPENLEVIESLKQSYEDSLKFFENGDREGFIKTFNKVREWFGDYSEQFMKESRQLLQQANDYRHNSL

SEQ ID NO: 21828 - DNA, 1122 bp, Erwinia carotovora
  CDS (1)..(1122)
atggtagctgaactgaccgcattacgtgatcagatagatgaggtagataaggagcttgtcgcgctcttatcacgtcggttgcgtttggtggcggaagtgggtgaagtgaaaagccgctatggtttgcccatttatgcgcccgatcgtgaagcggccatgctcagctcacgtcgtaacgaggcggcgtcgatgggggttccaccggatcttattgaagatatcctgcggcgcaccatgcgcgaatcctattccagcgaaaacgacaaaggttttaaaacgctgtgtccacaattgcgtccggtcgtcatcattggtggccgtggtcaaatgggcaatttgtttgagaagatgctgacgctatcgggatatcaggtgaggatcctggagcaagatgactggccgcgcgctgatgagctgttgtctgatgcaggtatggtgattgtcagcgtgccgattcacgttaccgaacaggttattgccagtctgcctatcttgccggatgactgtattctggtcgatctggcatcggtaaaaaatggcccgcttcaggcgatgctggcggcgcataatggtccggtactcggtttgcaccctatgtttgggccagacagcggcagccttgccaaacaggttgtcgtttattgcgatggccgacagccggaggcctatcagtggttactggaacagattcaggtatggggcgcgcgtctgcatcgcattagcgcagttgaacacgatcagaacatgatgttcattcaagcgctgcgccacttcgctacatttgcctatggcctgcatttagcggaagagaatgtgcagcttgaacagctattagcactgtcatcgccaatctatcgattggaattgatcatggttggtaggttgtttgcgcaggatccgcagctttatgccgacattattatgtcttcagaggataatttggcgttgattaagcgttactacaaacgttttggcgaagccattgagttactggagcaaacagataaagcggaatttattagcagcttcaaaaaagttgaacactggttcggcgattatgccaagcgttttcaggcggagagccgagtgcttttacgtcaggcaaacgacattcgccaataa

SEQ ID NO: 21829 - protein, 373 aa, Erwinia carotovora
MVAELTALRDQIDEVDKELVALLSRRLRLVAEVGEVKSRYGLPIYAPDREAAMLSSRRNEAASMGVPPDLIEDILRRTMRESYSSENDKGFKTLCPQLRPVVIIGGRGQMGNLFEKMLTLSGYQVRILEQDDWPRADELLSDAGMVIVSVPIHVTEQVIASLPILPDDCILVDLASVKNGPLQAMLAAHNGPVLGLHPMFGPDSGSLAKQVVVYCDGRQPEAYQWLLEQIQVWGARLHRISAVEHDQNMMFIQALRHFATFAYGLHLAEENVQLEQLLALSSPIYRLELIMVGRLFAQDPQLYADIIMSSEDNLALIKRYYKRFGEAIELLEQTDKAEFISSFKKVEHWFGDYAKRFQAESRVLLRQANDIRQ

SEQ ID NO: 21830 - DNA, 1128 bp, Photobacterium profundum
  CDS (1)..(1128)
atggttgctgaactgagcaaattaagagatcaaatcgatgatgttgatcagcaaatggtagagcttttagctcgccgtttatcattagtagaagaagtgggtcatgttaaaagcctgcatggtttacctatttatgcgccagaccgtgaagccgcaatgttagcctcacgccgtcatgaagctgagcaaaaaggtgtgccgcctgatctgattgaagacattttgcgccgtaccatgcgtgaatcttattcgagtgaaaatgattcagggtttaaatgcttaaagcctgaacttcgccctattgttgttgtgggtgggcatggtcagctaggtggattgttctgtcgtttatttgaactttcaggttaccaagtacgtcaactaggcagccaagattgggatcgtgcggatgagatccttgcagatgcgggtatggttgtcgtctctgtaccgattaacatcactgagcaaatcattggtaaactttccaacttaccagatgactgtattcttgctgatttaacctcgatcaagagtggcccattacaggcaatgctagaagtgcataatggccccgtgattggtttacatccaatgtttggtcccgatatttctagcttggcgaagcaagtgattgtgtattgcgatgggcgaaaccctgaaaattaccaatggttacttgagcaatttcagatttggggggcaacgctaaatcgtattagtgcgattgaacatgatcaaggtatgacgctgatccaagctttacgccactttacgtcatttgtttatggtgtgcatttggcagaggaagatccgaagatcgagcaactcatgtcgttaagttcaccgatttatcgcttagaacttgcaatggtcggtcgcttgtttgctcaagatgcacaattgtatgccgacattattatgtctgcgccgcaaaacgttgcgatgattaaacgcttccaccaacgttttggtgaggctatcaagatgcttgagacgcaagataaagaggcgttcaaacaagcatttaatcaggtcgagcattggttcggtgattatgcgggacacttccttgctgaaagccaaggtttgttaaggcaagcgaacgattcaacccaccgttcgtaa

SEQ ID NO: 21831 - protein, 375 aa, Photobacterium profundum
MVAELSKLRDQIDDVDQQMVELLARRLSLVEEVGHVKSLHGLPIYAPDREAAMLASRRHEAEQKGVPPDLIEDILRRTMRESYSSENDSGFKCLKPELRPIVVVGGHGQLGGLFCRLFELSGYQVRQLGSQDWDRADEILADAGMVVVSVPINITEQIIGKLSNLPDDCILADLTSIKSGPLQAMLEVHNGPVIGLHPMFGPDISSLAKQVIVYCDGRNPENYQWLLEQFQIWGATLNRISAIEHDQGMTLIQALRHFTSFVYGVHLAEEDPKIEQLMSLSSPIYRLELAMVGRLFAQDAQLYADIIMSAPQNVAMIKRFHQRFGEAIKMLETQDKEAFKQAFNQVEHWFGDYAGHFLAESQGLLRQANDSTHRS

SEQ ID NO: 21832 - DNA, 1128 bp, Vibrio vulnificus
  CDS (1)..(1128)
atggcagttgaactgaacgcattgcgtgaacagattgatgcagtagacaaacagatgttggcgctattggctcagcgcttggcattggtagagcaagttggccatgtgaaaagccaacatggcttaccgatttatgcacccgatagagaagcggcgatgctggcctctcgtcgtgcagaagccgaaaaaatcggcgtacctccacagctcattgaggacattttgcgccgaaccatgcgtgaatcttatgccagtgagaaagattctgggtttaaatgtctcaatccggacttgcgttctgtggtgatcattggtggtcatggccagttgggtggtctgtttgctcgcatgtttaccctctcgggttaccaggtcaaaatcttaggcagtaaggattggcaccgcgctgatgagatattggatggggcaggattggtggtggttaccgtgccgattcatttaacccaaggggtgattgaaaagctgacccaactgccatcggattgcattttgtgtgacctcacttcgatcaagtcgaagccgctgaaaaccatgctcgatgtgcactctgggccggttgttggtttgcaccctatgtttggtcccgatgtgccgagtttagccaagcaagtgattgtctactgtgatggtcgaggtgctgagcaatatcagtggttactgcagcagtttaagatttggggggcaagcttgtgccaaattgaggccagcgaacacgaccacggcatgacgttaattcaagcattaaggcactttacttcctttgcctatggcatgcatttgagtcaggaaaatccaagtctcgataaactgctgaaactgagctcgcccatttaccgtcttgagttagcgatggtagggcgtctgtttgcccaagacccaaacttgtatggcgacattattctttcgtcgcaagagaacatcgacatgatcaagcgtttccatcgccgctttggcgaggcactagagatgttagatcagcacgataaagcgcgttttgttgaacgtttcacgcaagtgagtgattggtttggggggtattcgcagcagtttatggcggaaagccaaaacttactcaaacaagcgaatgacaacttgcatcgtgattaa

SEQ ID NO: 21833 - protein, 375 aa, Vibrio vulnificus
MAVELNALREQIDAVDKQMLALLAQRLALVEQVGHVKSQHGLPIYAPDREAAMLASRRAEAEKIGVPPQLIEDILRRTMRESYASEKDSGFKCLNPDLRSVVIIGGHGQLGGLFARMFTLSGYQVKILGSKDWHRADEILDGAGLVVVTVPIHLTQGVIEKLTQLPSDCILCDLTSIKSKPLKTMLDVHSGPVVGLHPMFGPDVPSLAKQVIVYCDGRGAEQYQWLLQQFKIWGASLCQIEASEHDHGMTLIQALRHFTSFAYGMHLSQENPSLDKLLKLSSPIYRLELAMVGRLFAQDPNLYGDIILSSQENIDMIKRFHRRFGEALEMLDQHDKARFVERFTQVSDWFGGYSQQFMAESQNLLKQANDNLHRD

SEQ ID NO: 21834 - DNA, 1122 bp, Photorhabdus luminescens
  CDS (1)..(1122)
atggcggctgaattatctcaattgcgggataagattgatgaagtggataaagctttgctgggcttgctggcaaagcgtctggaattggttgcagagattggtgaggtaaaaagtcagaatgggctgtcaatttatgcacctgacagagaaatggcgatgcttgcttcacgtcggcaggaggccgaagagtttggtgttccaccggatttaattgaggatattctgcgccgcattatgcgggagtcttataccagtgagaataacaaagggtttaaaacgctttgccctcaattggggccgatagtcattgttggtggcttgggcaaaatggggaaactatttggccgtttgttaactttgtctggttatgaagtcagaaatctggaaccacaagattggcctaacgcggaacaaattctggcgggagtggggatggtgattatcagtgtacctattcatttgacagaagaagttattcgccgtttaccgccattacctgaccattgcattttggtggacttagcgtccgttaaacagcagccattacaggctatgcttgatgtgcataaaggtccagtgttgggattacatcctatgtttgggccggatgtcggtagtttggtaaaacaagttgttgtttactgtgacggacgtcaagaggaagcttatcaatggtttttagaacagttgttaatttggggggcttgcttgcatcaaatgagccctgaacagcatgataaaaacatgagctttattcaggcgttgcgccatttcacgacatttgcttatgggcaacatctcgcacaggaaggggcggatttacaacaactgttatcaatatcttcacctatttaccgtttggaattgatcatggtcgggcgcttatttgcgcaagatccccagctctacgcggatattattatgtcatcaccagagaatattgatcttatacgccgttatcatcaaagttttggacaagcgttagagatattggaaagccaggacaaacgggcttttgtcagcagttttgaagatgttagtgaatggtttggtgattatgcacctcgttttatgagggaaagcagggtattgcttcaacaagcgaatgatagtcgccaataa

SEQ ID NO: 21835 - protein, 373 aa, Photorhabdus luminescens
MAAELSQLRDKIDEVDKALLGLLAKRLELVAEIGEVKSQNGLSIYAPDREMAMLASRRQEAEEFGVPPDLIEDILRRIMRESYTSENNKGFKTLCPQLGPIVIVGGLGKMGKLFGRLLTLSGYEVRNLEPQDWPNAEQILAGVGMVIISVPIHLTEEVIRRLPPLPDHCILVDLASVKQQPLQAMLDVHKGPVLGLHPMFGPDVGSLVKQVVVYCDGRQEEAYQWFLEQLLIWGACLHQMSPEQHDKNMSFIQALRHFTTFAYGQHLAQEGADLQQLLSISSPIYRLELIMVGRLFAQDPQLYADIIMSSPENIDLIRRYHQSFGQALEILESQDKRAFVSSFEDVSEWFGDYAPRFMRESRVLLQQANDSRQ

SEQ ID NO: 21836 - DNA, 1134 bp, Candidatus Blochmannia floridanus
  CDS (1)..(1134)
atgatggatagattaaattttttacgtagtgaaattgataaaatagatcaaagtttgttaaatttattatctaaaagattatcattagtttctcaggtaggtgaaattaaaagtcaacttggtttatttatttatgatccggaaagagaaaagatgattttatctcaaagaaaacaggaagcattaaaattaggtatttctcctaatttggtcagagatatattacgtcgaattatgcgagagtcttattcttatgaaaatgaaaaaggatttaaaaagttatatccaagttctaggccagtggtgattattgggggtaatggccgaatgggacaatttttctttaaaatgttaactttatcaggatatcaagtaagaattttagatcaagatgattggatacatgctaagtctatattaactaatgttggtgtagtgtttattagtgtacctatttattcggtaatcaaagtaattaatcaattacctcatttatcgaatgattgtattatcgtggatttgtcttctgtaaaaaagagttctttaacagctatattaaagattcatactggaccagttttaggattacatccaatgtttagtccggatactactattaccgctagtatgataaaaaaagttgtaatttgttgtgacggtcgttatcctcaagaatatcaatggttattgcagcagttaaaattatggggagcaaaagtatattattgtaattttattgaacatgataagtatatgagttttatacaaagtttatgtcattttacaatttttgttatgggatatcatttgtttaaagaaaatattgatttaaaaaaaattttatctttttcttccccaatgtttcaattggaattaatattaataggccgattatttacacaaaatcctcaattatatgcagatattattatgtcatctaaaaataatattattgtaattaagcgttattataaaagattaggaaaaatgttaatgttattggaacaaaataataaagaagaatttataaatcaatttaaaaaaattaaatgttggttagatagttatgctggtatttttttaaaagatagctcaaatttattaaaatatattaatgatattcaggaatattaa

SEQ ID NO: 21837 - protein, 377 aa, Candidatus Blochmannia floridanus
MMDRLNFLRSEIDKIDQSLLNLLSKRLSLVSQVGEIKSQLGLFIYDPEREKMILSQRKQEALKLGISPNLVRDILRRIMRESYSYENEKGFKKLYPSSRPVVIIGGNGRMGQFFFKMLTLSGYQVRILDQDDWIHAKSILTNVGVVFISVPIYSVIKVINQLPHLSNDCIIVDLSSVKKSSLTAILKIHTGPVLGLHPMFSPDTTITASMIKKVVICCDGRYPQEYQWLLQQLKLWGAKVYYCNFIEHDKYMSFIQSLCHFTIFVMGYHLFKENIDLKKILSFSSPMFQLELILIGRLFTQNPQLYADIIMSSKNNIIVIKRYYKRLGKMLMLLEQNNKEEFINQFKKIKCWLDSYAGIFLKDSSNLLKYINDIQEY

SEQ ID NO: 21838 - DNA, 1128 bp, Vibrio parahaemolyticus
  CDS (1)..(1128)
atggcagttgaacttaacgcattgcgcgatcagattgatgcagtcgacaaacaaatgcttgagcttttggctcagcgtttagagctggtagaaaaagttggggaagtaaaaagtgaacacggtttgcctatttacgcccctgatcgtgaagcggcgatgctggcgtctcgccgagcagaagctgagaaaatgggtgtcccacctcagcttatcgaagacattcttcgtcgtaccatgcgtgagtcttatgccagtgagaaagattccggttttaagtgtttgaacccagaattacgttcagtggtcattattggtggtaatggccagttaggcggtctgtttggccgcatgttcaagctatcaggttaccaagtgaaagttttgggtagcaaagattggggtcgtgcggatgagattctcaaagacgcaggcttagtggttgtcaccgtaccgattcacctgacggaaggggtgattgaaaaactgggcaacttgccacaagactgcattctgtgtgacctgacgtctatcaagtcaaagccgctgcaagcgatgttgaatgtgcacgctggacctgtggttggtttacacccgatgttcggccctgatgttcctagccttgccaagcaggtgattgtttactgtgatggacgtggtaaagagcaataccaatggttgttgcaacagtttggtatttggggcgcgagcttgtgtcagattgatgcgcaagagcacgatcatggcatgacgttaatccaagcgctgcgccacttcacgtcatttgcttacggaatgcaccttagcaaagagaacccgaatattgagcaactgttgaaactgagctcgccaatctaccgtcttgaattggcaatggtggggcgtctgtttggtcaggatccaaatctctacggtgacatcattctcgcatcgcaagagaacatcgatatgatcaagcgtttccatcaacgctttggggaagcgcttgcgattttagacagcaaagacaaggctaaatttgtagaaagttttgagcaggtgagtgattggtttggccaatactctcagcaatttatgaacgagagccaaaacttactgaaacaggcgaatgacaatatccatcgtggataa

SEQ ID NO: 21839 - protein, 375 aa, Vibrio parahaemolyticus
MAVELNALRDQIDAVDKQMLELLAQRLELVEKVGEVKSEHGLPIYAPDREAAMLASRRAEAEKMGVPPQLIEDILRRTMRESYASEKDSGFKCLNPELRSVVIIGGNGQLGGLFGRMFKLSGYQVKVLGSKDWGRADEILKDAGLVVVTVPIHLTEGVIEKLGNLPQDCILCDLTSIKSKPLQAMLNVHAGPVVGLHPMFGPDVPSLAKQVIVYCDGRGKEQYQWLLQQFGIWGASLCQIDAQEHDHGMTLIQALRHFTSFAYGMHLSKENPNIEQLLKLSSPIYRLELAMVGRLFGQDPNLYGDIILASQENIDMIKRFHQRFGEALAILDSKDKAKFVESFEQVSDWFGQYSQQFMNESQNLLKQANDNIHRG

SEQ ID NO: 21840 - DNA, 1140 bp, Shewanella oneidensis
  CDS (1)..(1140)
atgaatgaaaaaaccacatccgaattagaacatcttcgaggactgatcgacggtgtcgatcagcaattgctgcatttactgcgtaaacgcttagatttagtcgcccaagtcggcacggtaaagcacgctgcaggattacccatttatgcaccacagcgtgaagcggcaatgctggcaaaacgccgtgaagaagcccaaaccatgggcattgcgccacaattgattgaagatattttacgtcgcctaatgcgtgaatcctatcttaatgaaaaggatgttggctttaagcaagtcaagaatgatttaggttcggtagttatagtgggcggtaaaggccagcttggcgggctgtttcaacaaatgctgagactgtcaggttatcaagtgaaagtgctcgataaagatgattggcaacaagcggaatgcttatttgccgatgctggattggtattagtgacagtgcctattgccatcacctgcgacattatccgtgaaaagctaactcagttaccacgggactgtattctagccgatttaacctccatcaagacggaacccatgcaggcgatgttggccgctcataaggggcctgttgtcggctttcatccgatgtttggtccagatgtcggtagcttagctaagcaggttgtggtggtgtgtcatgggcgcgaagctgataaataccaatggttactcgaacaaattgccatttggggcgcacggattgtcgaagctgagcctgaatgtcacgataatgcgatgcaactggtgcaggcgatgcgccatttctcaacctttgtctatggcttaaatctttgcaaagaagaggcggatatagagactttattgaaatttagctcgccaatctaccgcttagagttagcgatggtgggccgtttatttgcccaaagcccggagctttacgctgatattatttttgctcagcaggagagccagcatgcgattggcgattatctggataactatcgcgaagccttagaattgctgaaacggggcgatagagaggagtttatcaatcagttccaaatggttgccaagtggtttggtgattttgcaccgcagtttcagcgcgaaagtcgcatgatgctgcaatcggtaagtgatatgaaaacgaactga

SEQ ID NO: 21841 - protein, 379 aa, Shewanella oneidensis
MNEKTTSELEHLRGLIDGVDQQLLHLLRKRLDLVAQVGTVKHAAGLPIYAPQREAAMLAKRREEAQTMGIAPQLIEDILRRLMRESYLNEKDVGFKQVKNDLGSVVIVGGKGQLGGLFQQMLRLSGYQVKVLDKDDWQQAECLFADAGLVLVTVPIAITCDIIREKLTQLPRDCILADLTSIKTEPMQAMLAAHKGPVVGFHPMFGPDVGSLAKQVVVVCHGREADKYQWLLEQIAIWGARIVEAEPECHDNAMQLVQAMRHFSTFVYGLNLCKEEADIETLLKFSSPIYRLELAMVGRLFAQSPELYADIIFAQQESQHAIGDYLDNYREALELLKRGDREEFINQFQMVAKWFGDFAPQFQRESRMMLQSVSDMKTN

SEQ ID NO: 21842 - DNA, 1125 bp, Pasteurella multocida
  CDS (1)..(1125)
atggatacgttaaataagttaagaacacagattgatcaagttgatcgtcagttattacagcttttagcacagcgacttgagttagtgaaacaagtcggtgaagtcaagcatcaacaaggtctgccgatttatgtgccagaacgtgaagcggagatgctcaacgcccgccgtgcggaagctgaaacgttaggggtatctgctgatttaattgaagatgtattacgtcgtatcatgcgagaatcttatgcgcgggaaaaccaatttggttttaaaaccgtgaatccggcgatcaaaaaaatcgtgatcgtaggtgggggagggaaacttggtagcttgtttgcacgttatttcacattgtctggttactatgttgagattttagagcaacaggattggcaaagtgcggacaagattttgaacgaaacagatgtgattgttgtttcggtaccgatcgccaaaaccgtcgaaacaattaaacgtttgaagccttatttgacagataatatgctgttggtggatttaacttcagttaagcgtgcaccattacaagcgatgttagacgtgcacgctggcgcggtattaggtttacatccaatgtttggtccggatatcgccagcatggcaaaacaagtgattgtacgctgtgatggtcgttttgaatcacgttatcaatggctgatcacccaaatacaaatttggggggcaaaattctaccaagttgaggcgactgaacacgatcatagtatgacgtatgtacaagcgttgcgacacttttccacttttgctaatggcttacatttatcaaaacaaccggttcaattagcgaatttattggcactttcttcgccaatttattgcttagaattggcgatgattgggcgtttatttgcgcaagatgcagaactttatgccgatattattttagataagcctgaaaatctcgcggtcattgagagtttaaagcaaagttatgaagaaagtttggcattttttacccatggtgataagcaggcattcattgacagctttgaacaagttaaacaatggtttggtgaatactcggagcagtttctgaaagaaagtcgccagttgctccaacaagcaaatgattatcgacaaatttaa

SEQ ID NO: 21843 - protein, 374 aa, Pasteurella multocida
MDTLNKLRTQIDQVDRQLLQLLAQRLELVKQVGEVKHQQGLPIYVPEREAEMLNARRAEAETLGVSADLIEDVLRRIMRESYARENQFGFKTVNPAIKKIVIVGGGGKLGSLFARYFTLSGYYVEILEQQDWQSADKILNETDVIVVSVPIAKTVETIKRLKPYLTDNMLLVDLTSVKRAPLQAMLDVHAGAVLGLHPMFGPDIASMAKQVIVRCDGRFESRYQWLITQIQIWGAKFYQVEATEHDHSMTYVQALRHFSTFANGLHLSKQPVQLANLLALSSPIYCLELAMIGRLFAQDAELYADIILDKPENLAVIESLKQSYEESLAFFTHGDKQAFIDSFEQVKQWFGEYSEQFLKESRQLLQQANDYRQI

SEQ ID NO: 21844 - DNA, 24 bp, Artificial sequence
  Primer sequence
atggttgctgaattgaccgcatta

SEQ ID NO: 21845 - DNA, 23 bp, Artificial sequence
  Primer sequence
ttactggcgattgtcattcgcct

SEQ ID NO: 21846 - protein, 370 aa, Artificial sequence
  Consensus
  Variant (2)..(4): Xaa in position 2 to 4 is any amino acid
  Variant (6)..(7): Xaa in position 6 to 7 is any amino acid
  Variant (10)..(11): Xaa in position 10 to 11 is any amino acid
  Variant (13)..(21): Xaa in position 13 to 21 is any amino acid
  Variant (24)..(24): Xaa in position 24 is any amino acid
  Variant (27)..(29): Xaa in position 27 to 29 is any amino acid
  Variant (31)..(32): Xaa in position 31 to 32 is any amino acid
  Variant (34)..(36): Xaa in position 34 to 36 is any amino acid
  Variant (39)..(39): Xaa in position 39 is any amino acid
  Variant (42)..(42): Xaa in position 42 is any amino acid
  Variant (44)..(44): Xaa in position 44 is any amino acid
  Variant (47)..(49): Xaa in position 47 to 49 is any amino acid
  Variant (51)..(52): Xaa in position 51 to 52 is any amino acid
  Variant (54)..(55): Xaa in position 54 to 55 is any amino acid
  Variant (58)..(60): Xaa in position 58 to 60 is any amino acid
  Variant (62)..(65): Xaa in position 62 to 65 is any amino acid
  Variant (67)..(68): Xaa in position 67 to 68 is any amino acid
  Variant (70)..(70): Xaa in position 70 is any amino acid
  Variant (74)..(74): Xaa in position 74 is any amino acid
  Variant (80)..(81): Xaa in position 80 to 81 is any amino acid
  Variant (83)..(85): Xaa in position 83 to 85 is any amino acid
  Variant (89)..(97): Xaa in position 89 to 97 is any amino acid
  Variant (99)..(100): Xaa in position 99 to 100 is any amino acid
  Variant (103)..(103): Xaa in position 103 is any amino acid
  Variant (105)..(106): Xaa in position 105 to 106 is any amino acid
  Variant (108)..(109): Xaa in position 108 to 109 is any amino acid
  Variant (111)..(116): Xaa in position 111 to 116 is any amino acid
  Variant (120)..(123): Xaa in position 120 to 123 is any amino acid
  Variant (125)..(127): Xaa in position 125 to 127 is any amino acid
  Variant (130)..(131): Xaa in position 130 to 131 is any amino acid
  Variant (133)..(145): Xaa in position 133 to 145 is any amino acid
  Variant (149)..(154): Xaa in position 149 to 154 is any amino acid
  Variant (156)..(161): Xaa in position 156 to 161 is any amino acid
  Variant (163)..(169): Xaa in position 163 to 169 is any amino acid
  Variant (172)..(172): Xaa in position 172 is any amino acid
  Variant (174)..(174): Xaa in position 174 is any amino acid
  Variant (176)..(182): Xaa in position 176 to 182 is any amino acid
  Variant (184)..(185): Xaa in position 184 to 185 is any amino acid
  Variant (187)..(187): Xaa in position 187 is any amino acid
  Variant (189)..(189): Xaa in position 189 is any amino acid
  Variant (191)..(191): Xaa in position 191 is any amino acid
  Variant (193)..(193): Xaa in position 193 is any amino acid
  Variant (198)..(199): Xaa in position 198 to 199 is any amino acid
  Variant (201)..(205): Xaa in position 201 to 205 is any amino acid
  Variant (207)..(208): Xaa in position 207 to 208 is any amino acid
  Variant (210)..(210): Xaa in position 210 is any amino acid
  Variant (212)..(214): Xaa in position 212 to 214 is any amino acid
  Variant (216)..(216): Xaa in position 216 is any amino acid
  Variant (219)..(222): Xaa in position 219 to 222 is any amino acid
  Variant (224)..(224): Xaa in position 224 is any amino acid
  Variant (226)..(228): Xaa in position 226 to 228 is any amino acid
  Variant (230)..(232): Xaa in position 230 to 232 is any amino acid
  Variant (236)..(244): Xaa in position 236 to 244 is any amino acid
  Variant (247)..(248): Xaa in position 247 to 248 is any amino acid
  Variant (250)..(252): Xaa in position 250 to 252 is any amino acid
  Variant (254)..(256): Xaa in position 254 to 256 is any amino acid
  Variant (259)..(260): Xaa in position 259 to 260 is any amino acid
  Variant (262)..(263): Xaa in position 262 to 263 is any amino acid
  Variant (265)..(266): Xaa in position 265 to 266 is any amino acid
  Variant (268)..(280): Xaa in position 268 to 280 is any amino acid
  Variant (284)..(286): Xaa in position 284 to 286 is any amino acid
  Variant (290)..(292): Xaa in position 290 to 292 is any amino acid
  Variant (297)..(297): Xaa in position 297 is any amino acid
  Variant (299)..(301): Xaa in position 299 to 301 is any amino acid
  Variant (304)..(304): Xaa in position 304 is any amino acid
  Variant (308)..(316): Xaa in position 308 to 316 is any amino acid
  Variant (318)..(338): Xaa in position 318 to 338 is any amino acid
  Variant (340)..(342): Xaa in position 340 to 342 is any amino acid
  Variant (344)..(348): Xaa in position 344 to 348 is any amino acid
  Variant (350)..(356): Xaa in position 350 to 356 is any amino acid
  Variant (358)..(360): Xaa in position 358 to 360 is any amino acid
  Variant (362)..(364): Xaa in position 362 to 364 is any amino acid
  Variant (366)..(369): Xaa in position 366 to 369 is any amino acid
LXXXRXXIDXXDXXXXXXXXXRLXLVXXXGXXKXXXGLXIYXPXREXXXLXXRXXEAXXXGXXXXLXXDXLRRXMRESYXXEXXXGFKXXXXXXXXXVXXGGXGXXGXXFXXXXXXSGYXXXXLXXXDWXXAXXXXXXXXXXXXXVPIXXXXXXIXXXXXXLXXXXXXXDLXSXKXXXXXXXLXXHXGXVXGXHPMFXXDXXXXXSXXKXVXXXCXGRXXXXYXWXXXQXXXWGAXXXXXXXXXHDXXMXXXQXXXHFXXFXXGXXLXXXXXXXXXXXXXSSPXXXLELXXXGRLFXQXXXLYXDIIXXXXXXXXXIXXXXXXXXXXXXXXXXXXXXXFXXXFXXXXXWXXXXXXXFXXXSXXXLXXXXD

SEQ ID NO: 21847 - protein, 370 aa, Artificial sequence
  Consensus
  Variant (2)..(3): Xaa in position 2 to 3 is any amino acid
  Variant (6)..(7): Xaa in position 6 to 7 is any amino acid
  Variant (10)..(10): Xaa in position 10 is any amino acid
  Variant (13)..(17): Xaa in position 13 to 17 is any amino acid
  Variant (21)..(21): Xaa in position 21 is any amino acid
  Variant (24)..(24): Xaa in position 24 is any amino acid
  Variant (27)..(28): Xaa in position 27 to 28 is any amino acid
  Variant (31)..(31): Xaa in position 31 is any amino acid
  Variant (34)..(36): Xaa in position 34 to 36 is any amino acid
  Variant (42)..(42): Xaa in position 42 is any amino acid
  Variant (44)..(44): Xaa in position 44 is any amino acid
  Variant (48)..(48): Xaa in position 48 is any amino acid
  Variant (51)..(52): Xaa in position 51 to 52 is any amino acid
  Variant (55)..(55): Xaa in position 55 is any amino acid
  Variant (58)..(60): Xaa in position 58 to 60 is any amino acid
  Variant (62)..(63): Xaa in position 62 to 63 is any amino acid
  Variant (65)..(65): Xaa in position 65 is any amino acid
  Variant (70)..(70): Xaa in position 70 is any amino acid
  Variant (74)..(74): Xaa in position 74 is any amino acid
  Variant (80)..(81): Xaa in position 80 to 81 is any amino acid
  Variant (83)..(85): Xaa in position 83 to 85 is any amino acid
  Variant (89)..(91): Xaa in position 89 to 91 is any amino acid
  Variant (93)..(97): Xaa in position 93 to 97 is any amino acid
  Variant (100)..(100): Xaa in position 100 is any amino acid
  Variant (103)..(103): Xaa in position 103 is any amino acid
  Variant (105)..(106): Xaa in position 105 to 106 is any amino acid
  Variant (108)..(108): Xaa in position 108 is any amino acid
  Variant (111)..(115): Xaa in position 111 to 115 is any amino acid
  Variant (120)..(120): Xaa in position 120 is any amino acid
  Variant (122)..(123): Xaa in position 122 to 123 is any amino acid
  Variant (125)..(127): Xaa in position 125 to 127 is any amino acid
  Variant (130)..(131): Xaa in position 130 to 131 is any amino acid
  Variant (133)..(135): Xaa in position 133 to 135 is any amino acid
  Variant (137)..(138): Xaa in position 137 to 138 is any amino acid
  Variant (141)..(141): Xaa in position 141 is any amino acid
  Variant (143)..(143): Xaa in position 143 is any amino acid
  Variant (145)..(145): Xaa in position 145 is any amino acid
  Variant (149)..(150): Xaa in position 149 to 150 is any amino acid
  Variant (152)..(154): Xaa in position 152 to 154 is any amino acid
  Variant (156)..(157): Xaa in position 156 to 157 is any amino acid
  Variant (159)..(161): Xaa in position 159 to 161 is any amino acid
  Variant (163)..(164): Xaa in position 163 to 164 is any amino acid
  Variant (169)..(169): Xaa in position 169 is any amino acid
  Variant (172)..(172): Xaa in position 172 is any amino acid
  Variant (174)..(174): Xaa in position 174 is any amino acid
  Variant (176)..(177): Xaa in position 176 to 177 is any amino acid
  Variant (180)..(180): Xaa in position 180 is any amino acid
  Variant (184)..(185): Xaa in position 184 to 185 is any amino acid
  Variant (187)..(187): Xaa in position 187 is any amino acid
  Variant (191)..(191): Xaa in position 191 is any amino acid
  Variant (201)..(205): Xaa in position 201 to 205 is any amino acid
  Variant (207)..(207): Xaa in position 207 is any amino acid
  Variant (212)..(212): Xaa in position 212 is any amino acid
  Variant (214)..(214): Xaa in position 214 is any amino acid
  Variant (219)..(222): Xaa in position 219 to 222 is any amino acid
  Variant (226)..(226): Xaa in position 226 is any amino acid
  Variant (228)..(228): Xaa in position 228 is any amino acid
  Variant (230)..(232): Xaa in position 230 to 232 is any amino acid
  Variant (236)..(241): Xaa in position 236 to 241 is any amino acid
  Variant (243)..(243): Xaa in position 243 is any amino acid
  Variant (247)..(248): Xaa in position 247 to 248 is any amino acid
  Variant (250)..(251): Xaa in position 250 to 251 is any amino acid
  Variant (259)..(260): Xaa in position 259 to 260 is any amino acid
  Variant (263)..(263): Xaa in position 263 is any amino acid
  Variant (265)..(265): Xaa in position 265 is any amino acid
  Variant (268)..(269): Xaa in position 268 to 269 is any amino acid
  Variant (271)..(273): Xaa in position 271 to 273 is any amino acid
  Variant (275)..(276): Xaa in position 275 to 276 is any amino acid
  Variant (279)..(279): Xaa in position 279 is any amino acid
  Variant (292)..(292): Xaa in position 292 is any amino acid
  Variant (300)..(301): Xaa in position 300 to 301 is any amino acid
  Variant (308)..(312): Xaa in position 308 to 312 is any amino acid
  Variant (314)..(316): Xaa in position 314 to 316 is any amino acid
  Variant (318)..(326): Xaa in position 318 to 326 is any amino acid
  Variant (328)..(334): Xaa in position 328 to 334 is any amino acid
  Variant (337)..(338): Xaa in position 337 to 338 is any amino acid
  Variant (340)..(342): Xaa in position 340 to 342 is any amino acid
  Variant (344)..(345): Xaa in position 344 to 345 is any amino acid
  Variant (347)..(348): Xaa in position 347 to 348 is any amino acid
  Variant (352)..(352): Xaa in position 352 is any amino acid
  Variant (354)..(356): Xaa in position 354 to 356 is any amino acid
  Variant (358)..(359): Xaa in position 358 to 359 is any amino acid
  Variant (362)..(363): Xaa in position 362 to 363 is any amino acid
  Variant (366)..(366): Xaa in position 366 is any amino acid
LXXLRXXIDXVDXXXXXLLAXRLXLVXXVGXVKXXXGLPIYXPXREAXMLXXRRXEAXXXGXXPXLIEDXLRRXMRESYXXEXXXGFKXXXPXXXXXVIXGGXGXXGXLFXXXXXLSGYXVXXLXXXDWXXAXXXLXXAGXVXVXVPIXXTXXXIXXLXXXLXXDCILXDLXSXKXXPLXAMLXXHXGPVXGLHPMFGPDXXXXXSXAKQVXVXCDGRXXXXYQWXLXQXXXWGAXXXXXXAXEHDXXMXXIQALRHFXXFAXGXHLXXEXXXLXXLLXLSSPIYRLELAMXGRLFAQDXXLYADIIXXXXXNXXXIXXXXXXXXXAXXXXXXXDKXXFXXXFXXVXXWFGXYXXXFXXESXXLLXQAND

SEQ ID NO: 21848 - protein, 62 aa, Artificial sequence
  Consensus
  Variant (2)..(3): Xaa in position 2 to 3 is any amino acid
  Variant (4)..(4): Xaa in position 4 is Leu or Ile
  Variant (6)..(7): Xaa in position 6 to 7 is any amino acid
  Variant (10)..(10): Xaa in position 10 is any amino acid
  Variant (11)..(11): Xaa in position 11 is Val, Leu or Ile
  Variant (13)..(13): Xaa in position 13 is Lys, Gln or Arg
  Variant (14)..(14): Xaa in position 14 is any amino acid
  Variant (15)..(15): Xaa in position 15 is Leu or Met
  Variant (16)..(16): Xaa in position 16 is Leu, Val or Ile
  Variant (17)..(17): Xaa in position 17 is any amino acid
  Variant (18)..(18): Xaa in position 18 is Leu or Val
  Variant (19)..(19): Xaa in position 19 is Leu or Phe
  Variant (20)..(20): Xaa in position 20 is Ala, Ser or Arg
  Variant (21)..(21): Xaa in position 21 is Lys, Gln or Arg
  Variant (24)..(24): Xaa in position 24 is any amino acid
  Variant (27)..(27): Xaa in position 27 is any amino acid
  Variant (28)..(28): Xaa in position 28 is Gln, Glu or Lys
  Variant (29)..(29): Xaa in position 29 is Val or Ile
  Variant (31)..(31): Xaa in position 31 is any amino acid
  Variant (32)..(32): Xaa in position 32 is Val or Ile
  Variant (34)..(34): Xaa in position 34 is Ser or His
  Variant (35)..(36): Xaa in position 35 to 36 is any amino acid
  Variant (39)..(39): Xaa in position 39 is any amino acid
  Variant (42)..(42): Xaa in position 42 is Ala, Val or Asp
  Variant (44)..(44): Xaa in position 44 is Asp, Glu or Gln
  Variant (47)..(48): Xaa in position 47 to 48 is any amino acid
  Variant (49)..(49): Xaa in position 49 is Met or Ile
  Variant (51)..(52): Xaa in position 51 to 52 is any amino acid
  Variant (54)..(54): Xaa in position 54 is Arg or Lys
  Variant (55)..(55): Xaa in position 55 is any amino acid
  Variant (58)..(60): Xaa in position 58 to 60 is any amino acid
  Variant (62)..(62): Xaa in position 62 is Val or Ile
LXXXRXXIDXXDXXXXXXXXXRLXLVXXXGXXKXXXGLXIYXPXREXXXLXXRXXEAXXXGX

SEQ ID NO: 21849 - protein, 23 aa, Artificial sequence
  Consensus
  Variant (2)..(2): Xaa in position 2 is Ile, Val or Leu
  Variant (3)..(3): Xaa in position 3 is Glu or Arg
  Variant (5)..(5): Xaa in position 5 is Ile, Val or Leu
  Variant (9)..(9): Xaa in position 9 is any amino acid
  Variant (15)..(16): Xaa in position 15 to 16 is any amino acid
  Variant (18)..(18): Xaa in position 18 is Asn, Lys or His
  Variant (19)..(20): Xaa in position 19 to 20 is any amino acid
LXXDXLRRXMRESYXXEXXXGFK

SEQ ID NO: 21850 - protein, 52 aa, Artificial sequence
  Consensus
  Variant (1)..(1): Xaa in position 1 is Val, Ile or Leu
  Variant (3)..(3): Xaa in position 3 is Ile, Val or Leu
  Variant (4)..(4): Xaa in position 4 is Val, Ile or Leu
  Variant (7)..(7): Xaa in position 7 is any amino acid
  Variant (9)..(9): Xaa in position 9 is Gln, Lys or Arg
  Variant (10)..(10): Xaa in position 10 is Leu or Met
  Variant (12)..(12): Xaa in position 12 is any amino acid
  Variant (13)..(13): Xaa in position 13 is Leu or Phe
  Variant (15)..(15): Xaa in position 15 is any amino acid
  Variant (16)..(16): Xaa in position 16 is Arg, Lys or Gln
  Variant (17)..(17): Xaa in position 17 is any amino acid
  Variant (18)..(18): Xaa in position 18 is Leu or Phe
  Variant (19)..(19): Xaa in position 19 is any amino acid
  Variant (20)..(20): Xaa in position 20 is Leu or Ala
  Variant (24)..(24): Xaa in position 24 is any amino acid
  Variant (25)..(25): Xaa in position 25 is Val or Ile
  Variant (26)..(27): Xaa in position 26 to 27 is any amino acid
  Variant (29)..(29): Xaa in position 29 is Glu, Gly or Asp
  Variant (30)..(31): Xaa in position 30 to 31 is any amino acid
  Variant (34)..(35): Xaa in position 34 to 35 is any amino acid
  Variant (37)..(38): Xaa in position 37 to 38 is any amino acid
  Variant (39)..(39): Xaa in position 39 is Ile or Leu
  Variant (40)..(40): Xaa in position 40 is Leu, Val or Phe
  Variant (41)..(42): Xaa in position 41 to 42 is any amino acid
  Variant (43)..(43): Xaa in position 43 is Ala, Val or Thr
  Variant (44)..(44): Xaa in position 44 is Gly, Asp or Asn
  Variant (45)..(45): Xaa in position 45 is Met, Leu, Val or Ala
  Variant (46)..(46): Xaa in position 46 is Val, Ile or Leu
  Variant (47)..(47): Xaa in position 47 is Ile, Leu, Val or Phe
  Variant (48)..(48): Xaa in position 48 is Val, Ile or Leu
  Variant (49)..(49): Xaa in position 49 is Ser, Thr or Cys
XVXXGGXGXXGXXFXXXXXXSGYXXXXLXXXDWXXAXXXXXXXXXXXXXVPI

SEQ ID NO: 21851 - protein, 34 aa, Artificial sequence
  Consensus
  Variant (1)..(1): Xaa in position 1 is Ile, Leu or Val
  Variant (2)..(2): Xaa in position 2 is Leu, Ile or Val
  Variant (3)..(3): Xaa in position 3 is any amino acid
  Variant (6)..(6): Xaa in position 6 is Thr, Ala or Ser
  Variant (8)..(8): Xaa in position 8 is Val, Ile or Leu
  Variant (10)..(11): Xaa in position 10 to 11 is any amino acid
  Variant (12)..(12): Xaa in position 12 is Pro or Ser
  Variant (13)..(13): Xaa in position 13 is Leu or Met
  Variant (14)..(15): Xaa in position 14 to 15 is any amino acid
  Variant (16)..(16): Xaa in position 16 is Met or Ile
  Variant (18)..(18): Xaa in position 18 is any amino acid
  Variant (19)..(19): Xaa in position 19 is Val, Ala or Ile
  Variant (21)..(21): Xaa in position 21 is any amino acid
  Variant (23)..(23): Xaa in position 23 is Pro or Ala
  Variant (25)..(25): Xaa in position 25 is Leu, Val or Ile
  Variant (27)..(27): Xaa in position 27 is Leu or Phe
  Variant (32)..(32): Xaa in position 32 is Gly or Ser
  Variant (33)..(33): Xaa in position 33 is Pro or Ala
XXXDLXSXKXXXXXXXLXXHXGXVXGXHPMFXXD

SEQ ID NO: 21852 - protein, 30 aa, Artificial sequence
  Consensus
  Variant (2)..(2): Xaa in position 2 is Leu or Met
  Variant (3)..(3): Xaa in position 3 is Ala, Ile or Val
  Variant (5)..(5): Xaa in position 5 is Gln or Lys
  Variant (7)..(8): Xaa in position 7 to 8 is Val, Ile or Leu
  Variant (9)..(9): Xaa in position 9 is any amino acid
  Variant (11)..(11): Xaa in position 11 is Asp or His
  Variant (14)..(17): Xaa in position 14 to 17 is any amino acid
  Variant (19)..(19): Xaa in position 19 is Gln or Glu
  Variant (21)..(21): Xaa in position 21 is Leu or Phe
  Variant (22)..(22): Xaa in position 22 is Leu, Ile or Val
  Variant (23)..(23): Xaa in position 23 is Glu, Gln or Thr
  Variant (25)..(25): Xaa in position 25 is Ile, Phe or Leu
  Variant (26)..(26): Xaa in position 26 is any amino acid
  Variant (27)..(27): Xaa in position 27 is Ile, Val, Leu or Met
SXXKXVXXXCXGRXXXXYXWXXXQXXXWGA

SEQ ID NO: 21853 - protein, 23 aa, Artificial sequence
  Consensus
  Variant (3)..(4): Xaa in position 3 to 4 is any amino acid
  Variant (6)..(6): Xaa in position 6 is any amino acid
  Variant (7)..(7): Xaa in position 7 is Phe, Leu or Tyr
  Variant (8)..(8): Xaa in position 8 is Ile or Val
  Variant (10)..(10): Xaa in position 10 is Ala or Ser
  Variant (11)..(11): Xaa in position 11 is Leu or Met
  Variant (12)..(12): Xaa in position 12 is Arg or Cys
  Variant (15)..(15): Xaa in position 15 is Ala, Thr or Ser
  Variant (16)..(16): Xaa in position 16 is Thr, Ser or Ile
  Variant (18)..(18): Xaa in position 18 is Ala or Val
  Variant (19)..(19): Xaa in position 19 is any amino acid
  Variant (21)..(21): Xaa in position 21 is any amino acid
  Variant (22)..(22): Xaa in position 22 is His or Asn
HDXXMXXXQXXXHFXXFXXGXXL

SEQ ID NO: 21854 - protein, 37 aa, Artificial sequence
  Consensus
  Variant (4)..(4): Xaa in position 4 is Ile, Met, Leu or Phe
  Variant (5)..(5): Xaa in position 5 is Tyr or Phe
  Variant (6)..(6): Xaa in position 6 is Arg, Gln or Cys
  Variant (10)..(10): Xaa in position 10 is Ala or Ile
  Variant (11)..(11): Xaa in position 11 is Met, Leu, Val or Ile
  Variant (12)..(12): Xaa in position 12 is Val, Ile or Leu
  Variant (17)..(17): Xaa in position 17 is Ala, Gly or Thr
  Variant (19)..(21): Xaa in position 19 to 21 is any amino acid
  Variant (24)..(24): Xaa in position 24 is Ala or Gly
  Variant (28)..(28): Xaa in position 28 is Met, Leu or Phe
  Variant (29)..(29): Xaa in position 29 is Ser, Asp or Ala
  Variant (30)..(32): Xaa in position 30 to 32 is any amino acid
  Variant (33)..(33): Xaa in position 33 is Asn or Ser
  Variant (34)..(34): Xaa in position 34 is Leu, Ile, Val or Gln
  Variant (35)..(35): Xaa in position 35 is any amino acid
  Variant (36)..(36): Xaa in position 36 is Leu, Met, Val or Ala
SSPXXXLELXXXGRLFXQXXXLYXDIIXXXXXXXXXI

SEQ ID NO: 21855 - DNA, 1071 bp, Escherichia coli K12; identical to SEQ ID NO: 1333
  CDS (1)..(1071)

SEQ ID NO: 21856 - protein, 356 aa, Escherichia coli K12; identical to SEQ ID NO: 1334

SEQ ID NO: 21857 - DNA, 1235 bp, Salmonella typhimurium; identical to SEQ ID NO: 1325
  CDS (165)..(1235)

SEQ ID NO: 21858 - protein, 356 aa, Salmonella typhimurium; identical to SEQ ID NO: 1326

SEQ ID NO: 21859 - DNA, 1086 bp, Deinococcus radiodurans; identical to SEQ ID NO: 1327
  CDS (1)..(1086)

SEQ ID NO: 21860 - protein, 361 aa, Deinococcus radiodurans; identical to SEQ ID NO: 1328

SEQ ID NO: 21861 - DNA, 1056 bp, Neisseria meningitidis; identical to SEQ ID NO: 1329
  CDS (1)..(1056)

SEQ ID NO: 21862 - protein, 351 aa, Neisseria meningitidis; identical to SEQ ID NO: 1330

SEQ ID NO: 21863 - DNA, 1047 bp, Yersinia pestis; identical to SEQ ID NO: 1331
  CDS (1)..(1047)

SEQ ID NO: 21864 - protein, 348 aa, Yersinia pestis; identical to SEQ ID NO: 1332

SEQ ID NO: 21865 - DNA, 1047 bp, Salmonella enterica subsp. enterica serovar Typhi; identical to SEQ ID NO: 1575
  CDS (1)..(1047)

SEQ ID NO: 21866 - protein, 348 aa, Salmonella enterica subsp. enterica serovar Typhi; identical to SEQ ID NO: 1576

SEQ ID NO: 21867 - DNA, 1047 bp, Escherichia coli; identical to SEQ ID NO: 1323
  CDS (1)..(1047)

SEQ ID NO: 21868 - protein, 348 aa, Escherichia coli; identical to SEQ ID NO: 1324

SEQ ID NO: 21869 - DNA, 1188 bp, Escherichia coli; identical to SEQ ID NO: 1579
  CDS (92)..(1144)

SEQ ID NO: 21870 - protein, 350 aa, Escherichia coli; identical to SEQ ID NO: 1580

SEQ ID NO: 21871 - DNA, 1131 bp, Nostoc sp. PCC 7120; identical to SEQ ID NO: 1335
  CDS (1)..(1131)

SEQ ID NO: 21872 - protein, 376 aa, Nostoc sp. PCC 7120; identical to SEQ ID NO: 1336

SEQ ID NO: 21873 - DNA, 1053 bp, Salmonella enterica subsp. enterica serovar Typhi; identical to SEQ ID NO: 1337
  CDS (1)..(1053)

SEQ ID NO: 21874 - protein, 350 aa, Salmonella enterica subsp. enterica serovar Typhi; identical to SEQ ID NO: 1338

SEQ ID NO: 21875 - DNA, 1077 bp, Pseudomonas aeruginosa; identical to SEQ ID NO: 1339
  CDS (1)..(1077)

SEQ ID NO: 21876 - protein, 358 aa, Pseudomonas aeruginosa; identical to SEQ ID NO: 1340

SEQ ID NO: 21877 - DNA, 1047 bp, Buchnera sp; identical to SEQ ID NO: 1341
  CDS (1)..(1047)

SEQ ID NO: 21878 - protein, 348 aa, Buchnera sp; identical to SEQ ID NO: 1342

SEQ ID NO: 21879 - DNA, 1032 bp, Streptococcus pneumoniae; identical to SEQ ID NO: 1589
  CDS (1)..(1032)

SEQ ID NO: 21880 - protein, 343 aa, Streptococcus pneumoniae; identical to SEQ ID NO: 1590

SEQ ID NO: 21881 - DNA, 1074 bp, Vibrio cholerae; identical to SEQ ID NO: 1343
  CDS (1)..(1074)

SEQ ID NO: 21882 - protein, 357 aa, Vibrio cholerae; identical to SEQ ID NO: 1344

SEQ ID NO: 21883 - DNA, 1038 bp, Lactococcus lactis subsp. lactis; identical to SEQ ID NO: 1345
  CDS (1)..(1038)

SEQ ID NO: 21884 - protein, 345 aa, Lactococcus lactis subsp. lactis; identical to SEQ ID NO: 1346

SEQ ID NO: 21885 - DNA, 1023 bp, Lactococcus lactis subsp. lactis; identical to SEQ ID NO: 1347
  CDS (1)..(1023)

SEQ ID NO: 21886 - protein, 340 aa, Lactococcus lactis subsp. lactis; identical to SEQ ID NO: 1348

SEQ ID NO: 21887 - DNA, 1032 bp, Streptococcus pneumoniae; identical to SEQ ID NO: 1597
  CDS (1)..(1032)

SEQ ID NO: 21888 - protein, 343 aa, Streptococcus pneumoniae; identical to SEQ ID NO: 1350

SEQ ID NO: 21889 - DNA, 1095 bp, Pseudomonas aeruginosa; identical to SEQ ID NO: 1351
  CDS (1)..(1095)

SEQ ID NO: 21890 - protein, 364 aa, Pseudomonas aeruginosa; identical to SEQ ID NO: 1352

SEQ ID NO: 21891 - DNA, 1110 bp, Caulobacter crescentus; identical to SEQ ID NO: 1353
  CDS (1)..(1110)

SEQ ID NO: 21892 - protein, 369 aa, Caulobacter crescentus; identical to SEQ ID NO: 1354

SEQ ID NO: 21893 - DNA, 1143 bp, Xylella fastidiosa; identical to SEQ ID NO: 1603
  CDS (1)..(1143)

SEQ ID NO: 21894 - protein, 380 aa, Xylella fastidiosa; identical to SEQ ID NO: 1604

SEQ ID NO: 21895 - DNA, 1047 bp, Buchnera aphidicola; identical to SEQ ID NO: 1357
  CDS (1)..(1047)

SEQ ID NO: 21896 - protein, 348 aa, Buchnera aphidicola; identical to SEQ ID NO: 1358

SEQ ID NO: 21897 - DNA, 1089 bp, Haemophilus influenzae; identical to SEQ ID NO: 1359
  CDS (1)..(1089)

SEQ ID NO: 21898 - protein, 362 aa, Haemophilus influenzae; identical to SEQ ID NO: 1360

SEQ ID NO: 21899 - DNA, 1502 bp, Candida albicans; identical to SEQ ID NO: 1361
  CDS (336)..(1442)

SEQ ID NO: 21900 - protein, 368 aa, Candida albicans; identical to SEQ ID NO: 1362

SEQ ID NO: 21901 - DNA, 1113 bp, Saccharomyces cerevisiae; identical to SEQ ID NO: 1363
  CDS (1)..(1113)

SEQ ID NO: 21902 - protein, 370 aa, Saccharomyces cerevisiae; identical to SEQ ID NO: 1364

SEQ ID NO: 21903 - DNA, 2048 bp, Saccharomyces cerevisiae; identical to SEQ ID NO: 1365
  CDS (619)..(1731)

SEQ ID NO: 21904 - protein, 370 aa, Saccharomyces cerevisiae; identical to SEQ ID NO: 1366

SEQ ID NO: 21905 - DNA, 1107 bp, Schizosaccharomyces pombe; identical to SEQ ID NO: 1367
  CDS (1)..(1107)

SEQ ID NO: 21906 - protein, 368 aa, Schizosaccharomyces pombe; identical to SEQ ID NO: 1368

SEQ ID NO: 21907 - DNA, 1089 bp, Amycolatopsis orientalis; identical to SEQ ID NO: 1369
  CDS (1)..(1089)

SEQ ID NO: 21908 - protein, 362 aa, Amycolatopsis orientalis; identical to SEQ ID NO: 1370

SEQ ID NO: 21909 - DNA, 1248 bp, Corynebacterium glutamicum; identical to SEQ ID NO: 1373
  CDS (101)..(1228)

SEQ ID NO: 21910 - protein, 375 aa, Corynebacterium glutamicum; identical to SEQ ID NO: 1374

SEQ ID NO: 21911 - DNA, 1083 bp, Methylophilus methylotrophus; identical to SEQ ID NO: 1375
  CDS (1)..(1083)

SEQ ID NO: 21912 - protein, 360 aa, Methylophilus methylotrophus; identical to SEQ ID NO: 1376

SEQ ID NO: 21913 - DNA, 1047 bp, Yersinia pseudotuberculosis IP 32953; identical to SEQ ID NO: 1623
  CDS (1)..(1047)

SEQ ID NO: 21914 - protein, 348 aa, Yersinia pseudotuberculosis IP 32953; identical to SEQ ID NO: 1624

SEQ ID NO: 21915 - DNA, 1053 bp, Yersinia pseudotuberculosis IP 32953; identical to SEQ ID NO: 1487
  CDS (1)..(1053)

SEQ ID NO: 21916 - protein, 350 aa, Yersinia pseudotuberculosis IP 32953; identical to SEQ ID NO: 1488

SEQ ID NO: 21917 - DNA, 1107 bp, Debaryomyces hansenii CBS767; identical to SEQ ID NO: 1377
  CDS (1)..(1107)

SEQ ID NO: 21918 - protein, 368 aa, Debaryomyces hansenii CBS767; identical to SEQ ID NO: 1378

SEQ ID NO: 21919 - DNA, 1074 bp, Yarrowia lipolytica CLIB99; identical to SEQ ID NO: 1379
  CDS (1)..(1074)

SEQ ID NO: 21920 - protein, 357 aa, Yarrowia lipolytica CLIB99; identical to SEQ ID NO: 1380

SEQ ID NO: 21921 - DNA, 1089 bp, Yarrowia lipolytica CLIB99; identical to SEQ ID NO: 1381
  CDS (1)..(1089)

SEQ ID NO: 21922 - protein, 362 aa, Yarrowia lipolytica CLIB99; identical to SEQ ID NO: 1382

SEQ ID NO: 21923 - DNA, 1119 bp, Kluyveromyces lactis NRRL Y; identical to SEQ ID NO: 1383
  CDS (1)..(1119)

SEQ ID NO: 21924 - protein, 372 aa, Kluyveromyces lactis NRRL Y; identical to SEQ ID NO: 1384

SEQ ID NO: 21925 - DNA, 1095 bp, Kluyveromyces lactis NRRL Y; identical to SEQ ID NO: 1385
  CDS (1)..(1095)

SEQ ID NO: 21926 - protein, 364 aa, Kluyveromyces lactis NRRL Y; identical to SEQ ID NO: 1386

SEQ ID NO: 21927 - DNA, 1074 bp, Erwinia carotovora; identical to SEQ ID NO: 1387
  CDS (1)..(1074)

SEQ ID NO: 21928 - protein, 357 aa, Erwinia carotovora; identical to SEQ ID NO: 1388

SEQ ID NO: 21929 - DNA, 1047 bp, Erwinia carotovora; identical to SEQ ID NO: 1389
  CDS (1)..(1047)

SEQ ID NO: 21930 - protein, 348 aa, Erwinia carotovora; identical to SEQ ID NO: 1390

SEQ ID NO: 21931 - DNA, 1056 bp, Erwinia carotovora; identical to SEQ ID NO: 1391
  CDS (1)..(1056)

SEQ ID NO: 21932 - protein, 351 aa, Erwinia carotovora; identical to SEQ ID NO: 1392

SEQ ID NO: 21933 - DNA, 1113 bp, Acinetobacter sp; identical to SEQ ID NO: 1393
  CDS (1)..(1113)

SEQ ID NO: 21934 - protein, 370 aa, Acinetobacter sp; identical to SEQ ID NO: 1394

SEQ ID NO: 21935 - DNA, 1056 bp, Acinetobacter sp; identical to SEQ ID NO: 1395
  CDS (1)..(1056)

SEQ ID NO: 21936 - protein, 351 aa, Acinetobacter sp; identical to SEQ ID NO: 1396

SEQ ID NO: 21937 - DNA, 1119 bp, Candida glabrata CBS138; identical to SEQ ID NO: 1397
  CDS (1)..(1119)

SEQ ID NO: 21938 - protein, 372 aa, Candida glabrata CBS138; identical to SEQ ID NO: 1398

SEQ ID NO: 21939 - DNA, 1071 bp, Candida glabrata CBS138; identical to SEQ ID NO: 1399
  CDS (1)..(1071)

SEQ ID NO: 21940 - protein, 356 aa, Candida glabrata CBS138; identical to SEQ ID NO: 1400

SEQ ID NO: 21941 - DNA, 1083 bp, Photobacterium profundum; identical to SEQ ID NO: 1401
  CDS (1)..(1083)

SEQ ID NO: 21942 - protein, 360 aa, Photobacterium profundum; identical to SEQ ID NO: 1402

SEQ ID NO: 21943 - DNA, 1053 bp, Photobacterium profundum; identical to SEQ ID NO: 1403
  CDS (1)..(1053)

SEQ ID NO: 21944 - protein, 350 aa, Photobacterium profundum; identical to SEQ ID NO: 1404

SEQ ID NO: 21945 - DNA, 1113 bp, Photobacterium profundum; identical to SEQ ID NO: 1405
  CDS (1)..(1113)

SEQ ID NO: 21946 - protein, 370 aa, Photobacterium profundum; identical to SEQ ID NO: 1406

SEQ ID NO: 21947 - DNA, 1056 bp, Photobacterium profundum; identical to SEQ ID NO: 1407
  CDS (1)..(1056)

SEQ ID NO: 21948 - protein, 351 aa, Photobacterium profundum; identical to SEQ ID NO: 1408

SEQ ID NO: 21949 - DNA, 1092 bp, Parachlamydia sp; identical to SEQ ID NO: 1409
  CDS (1)..(1092)

SEQ ID NO: 21950 - protein, 363 aa, Parachlamydia sp; identical to SEQ ID NO: 1410

SEQ ID NO: 21951 - DNA, 1095 bp, Rhodopseudomonas palustris; identical to SEQ ID NO: 1411
  CDS (1)..(1095)

SEQ ID NO: 21952 - protein, 364 aa, Rhodopseudomonas palustris; identical to SEQ ID NO: 1412

SEQ ID NO: 21953 - DNA, 1100 bp, Amycolatopsis methanolica; identical to SEQ ID NO: 1413
  CDS (1)..(1086)

SEQ ID NO: 21954 - protein, 361 aa, Amycolatopsis methanolica; identical to SEQ ID NO: 1414

SEQ ID NO: 21955 - DNA, 1071 bp, Treponema denticola; identical to SEQ ID NO: 1415
  CDS (1)..(1071)

SEQ ID NO: 21956 - protein, 356 aa, Treponema denticola; identical to SEQ ID NO: 1416

SEQ ID NO: 21957 - DNA, 1020 bp, Geobacter sulfurreducens; identical to SEQ ID NO: 1667
  CDS (1)..(1020)

SEQ ID NO: 21958 - protein, 339 aa, Geobacter sulfurreducens; identical to SEQ ID NO: 1668

SEQ ID NO: 21959 - DNA, 1068 bp, Geobacter sulfurreducens; identical to SEQ ID NO: 1417
  CDS (1)..(1068)

SEQ ID NO: 21960 - protein, 355 aa, Geobacter sulfurreducens; identical to SEQ ID NO: 1418

SEQ ID NO: 21961 - DNA, 1122 bp, Ashbya gossypii; identical to SEQ ID NO: 1421
  CDS (1)..(1122)

SEQ ID NO: 21962 - protein, 373 aa, Ashbya gossypii; identical to SEQ ID NO: 1422

SEQ ID NO: 21963 - DNA, 1098 bp, Amycolatopsis balhimycina; identical to SEQ ID NO: 1423
  CDS (1)..(1098)

SEQ ID NO: 21964 - protein, 365 aa, Amycolatopsis balhimycina; identical to SEQ ID NO: 1424

SEQ ID NO: 21965 - DNA, 1053 bp, Vibrio vulnificus; identical to SEQ ID NO: 1675
  CDS (1)..(1053)

SEQ ID NO: 21966 - protein, 350 aa, Vibrio vulnificus; identical to SEQ ID NO: 1676

SEQ ID NO: 21967 - DNA, 1047 bp, Photorhabdus luminescens; identical to SEQ ID NO: 1427
  CDS (1)..(1047)

SEQ ID NO: 21968 - protein, 348 aa, Photorhabdus luminescens; identical to SEQ ID NO: 1428

SEQ ID NO: 21969 - DNA, 1053 bp, Photorhabdus luminescens; identical to SEQ ID NO: 1429
  CDS (1)..(1053)

SEQ ID NO: 21970 - protein, 350 aa, Photorhabdus luminescens; identical to SEQ ID NO: 1430

SEQ ID NO: 21971 - DNA, 1095 bp, Photorhabdus luminescens; identical to SEQ ID NO: 1431
  CDS (1)..(1095)

SEQ ID NO: 21972 - protein, 364 aa, Photorhabdus luminescens; identical to SEQ ID NO: 1432

SEQ ID NO: 21973 - DNA, 1119 bp, Gloeobacter violaceus; identical to SEQ ID NO: 1433
  CDS (1)..(1119)

SEQ ID NO: 21974 - protein, 372 aa, Gloeobacter violaceus; identical to SEQ ID NO: 1434

SEQ ID NO: 21975 - DNA, 1107 bp, Chromobacterium violaceum; identical to SEQ ID NO: 1435
  CDS (1)..(1107)

SEQ ID NO: 21976 - protein, 368 aa, Chromobacterium violaceum; identical to SEQ ID NO: 1436

SEQ ID NO: 21977 - DNA, 1059 bp, Chromobacterium violaceum; identical to SEQ ID NO: 1437
  CDS (1)..(1059)

SEQ ID NO: 21978 - protein, 352 aa, Chromobacterium violaceum; identical to SEQ ID NO: 1438

SEQ ID NO: 21979 - DNA, 1140 bp, Neurospora crassa; identical to SEQ ID NO: 1439
  CDS (1)..(1140)

SEQ ID NO: 21980 - protein, 379 aa, Neurospora crassa; identical to SEQ ID NO: 1440

SEQ ID NO: 21981 - DNA, 1092 bp, Neurospora crassa; identical to SEQ ID NO: 1441
  CDS (1)..(1092)

SEQ ID NO: 21982 - protein, 363 aa, Neurospora crassa; identical to SEQ ID NO: 1442

SEQ ID NO: 21983 - DNA, 1068 bp, Synechococcus sp; identical to SEQ ID NO: 1443
  CDS (1)..(1068)

SEQ ID NO: 21984 - protein, 355 aa, Synechococcus sp; identical to SEQ ID NO: 1444

SEQ ID NO: 21985 - DNA, 1053 bp, Rhodopirellula baltica; identical to SEQ ID NO: 1445
  CDS (1)..(1053)

SEQ ID NO: 21986 - protein, 350 aa, Rhodopirellula baltica; identical to SEQ ID NO: 1446

SEQ ID NO: 21987 - DNA, 1068 bp, Prochlorococcus marinus subsp; identical to SEQ ID NO: 1447
  CDS (1)..(1068)

SEQ ID NO: 21988 - protein, 355 aa, Prochlorococcus marinus subsp; identical to SEQ ID NO: 1448

SEQ ID NO: 21989 - DNA, 1083 bp, Prochlorococcus marinus; identical to SEQ ID NO: 1449
  CDS (1)..(1083)

SEQ ID NO: 21990 - protein, 360 aa, Prochlorococcus marinus; identical to SEQ ID NO: 1450

SEQ ID NO: 21991 - DNA, 1074 bp, Prochlorococcus marinus; identical to SEQ ID NO: 1451
  CDS (1)..(1074)

SEQ ID NO: 21992 - protein, 357 aa, Prochlorococcus marinus; identical to SEQ ID NO: 1452

SEQ ID NO: 21993 - DNA, 1113 bp, Haemophilus ducreyi; identical to SEQ ID NO: 1453
  CDS (1)..(1113)

SEQ ID NO: 21994 - protein, 370 aa, Haemophilus ducreyi; identical to SEQ ID NO: 1454

SEQ ID NO: 21995 - DNA, 1080 bp, Haemophilus ducreyi; identical to SEQ ID NO: 1455
  CDS (1)..(1080)

SEQ ID NO: 21996 - protein, 359 aa, Haemophilus ducreyi; identical to SEQ ID NO: 1456

SEQ ID NO: 21997 - DNA, 1086 bp, Candidatus Blochmannia floridanus; identical to SEQ ID NO: 1457
  CDS (1)..(1086)

SEQ ID NO: 21998 - protein, 361 aa, Candidatus Blochmannia floridanus; identical to SEQ ID NO: 1458

SEQ ID NO: 21999 - DNA, 1074 bp, Bordetella pertussis; identical to SEQ ID NO: 1459
  CDS (1)..(1074)

SEQ ID NO: 22000 - protein, 357 aa, Bordetella pertussis; identical to SEQ ID NO: 1460

SEQ ID NO: 22001 - DNA, 1119 bp, Bordetella bronchiseptica; identical to SEQ ID NO: 1461
  CDS (1)..(1119)

SEQ ID NO: 22002 - protein, 372 aa, Bordetella bronchiseptica; identical to SEQ ID NO: 1462

SEQ ID NO: 22003 - DNA, 1179 bp, Nitrosomonas europaea; identical to SEQ ID NO: 1463
  CDS (1)..(1179)

SEQ ID NO: 22004 - protein, 392 aa, Nitrosomonas europaea; identical to SEQ ID NO: 1464

SEQ ID NO: 22005 - DNA, 1083 bp, Coxiella burnetii; identical to SEQ ID NO: 1465
  CDS (1)..(1083)

SEQ ID NO: 22006 - protein, 360 aa, Coxiella burnetii; identical to SEQ ID NO: 1466

SEQ ID NO: 22007 - DNA, 1143 bp, Xylella fastidiosa; identical to SEQ ID NO: 1469
  CDS (1)..(1143)

SEQ ID NO: 22008 - protein, 380 aa, Xylella fastidiosa; identical to SEQ ID NO: 1470

SEQ ID NO: 22009 - DNA, 1053 bp, Vibrio parahaemolyticus; identical to SEQ ID NO: 1471
  CDS (1)..(1053)

SEQ ID NO: 22010 - protein, 350 aa, Vibrio parahaemolyticus; identical to SEQ ID NO: 1472

SEQ ID NO: 22011 - DNA, 1053 bp, Vibrio parahaemolyticus; identical to SEQ ID NO: 1473
  CDS (1)..(1053)

SEQ ID NO: 22012 - protein, 350 aa, Vibrio parahaemolyticus; identical to SEQ ID NO: 1474

SEQ ID NO: 22013 - DNA, 1074 bp, Vibrio parahaemolyticus; identical to SEQ ID NO: 1475
  CDS (1)..(1074)

SEQ ID NO: 22014 - protein, 357 aa, Vibrio parahaemolyticus; identical to SEQ ID NO: 1476

SEQ ID NO: 22015 - DNA, 1083 bp, Pseudomonas syringae; identical to SEQ ID NO: 1477
  CDS (1)..(1083)

SEQ ID NO: 22016 - protein, 360 aa, Pseudomonas syringae; identical to SEQ ID NO: 1478

SEQ ID NO: 22017 - DNA, 1077 bp, Pseudomonas syringae; identical to SEQ ID NO: 1479
  CDS (1)..(1077)

SEQ ID NO: 22018 - protein, 358 aa, Pseudomonas syringae; identical to SEQ ID NO: 1480

SEQ ID NO: 22019 - DNA, 1062 bp, Pseudomonas putida; identical to SEQ ID NO: 1481
  CDS (1)..(1062)

SEQ ID NO: 22020 - protein, 353 aa, Pseudomonas putida; identical to SEQ ID NO: 1482

SEQ ID NO: 22021 - DNA, 1113 bp, Pseudomonas putida; identical to SEQ ID NO: 1483
  CDS (1)..(1113)

SEQ ID NO: 22022 - protein, 370 aa, Pseudomonas putida; identical to SEQ ID NO: 1484

SEQ ID NO: 22023 - DNA, 1086 bp, Bradyrhizobium japonicum; identical to SEQ ID NO: 1485
  CDS (1)..(1086)

SEQ ID NO: 22024 - protein, 361 aa, Bradyrhizobium japonicum; identical to SEQ ID NO: 1486

SEQ ID NO: 22025 - DNA, 1077 bp, Yersinia pestis; identical to SEQ ID NO: 1489
  CDS (1)..(1077)

SEQ ID NO: 22026 - protein, 358 aa, Yersinia pestis; identical to SEQ ID NO: 1490

SEQ ID NO: 22027 - DNA, 1038 bp, Wigglesworthia glossinidia brevipalpis; identical to SEQ ID NO: 1491
  CDS (1)..(1038)

SEQ ID NO: 22028 - protein, 345 aa, Wigglesworthia glossinidia brevipalpis; identical to SEQ ID NO: 1492

SEQ ID NO: 22029 - DNA, 1071 bp, Vibrio vulnificus; identical to SEQ ID NO: 1739
  CDS (1)..(1071)

SEQ ID NO: 22030 - protein, 356 aa, Vibrio vulnificus; identical to SEQ ID NO: 1740

SEQ ID NO: 22031 - DNA, 1053 bp, Vibrio vulnificus; identical to SEQ ID NO: 1495
  CDS (1)..(1053)

SEQ ID NO: 22032 - protein, 350 aa, Vibrio vulnificus; identical to SEQ ID NO: 1496

SEQ ID NO: 22033 - DNA, 1071 bp, Vibrio vulnificus; identical to SEQ ID NO: 1497
  CDS (1)..(1071)

SEQ ID NO: 22034 - protein, 356 aa, Vibrio vulnificus; identical to SEQ ID NO: 1498

SEQ ID NO: 22035 - DNA, 1062 bp, Synechococcus elongatus; identical to SEQ ID NO: 1499
  CDS (1)..(1062)

SEQ ID NO: 22036 - protein, 353 aa, Synechococcus elongatus; identical to SEQ ID NO: 1500

SEQ ID NO: 22037 - DNA, 1032 bp, Streptococcus mutans; identical to SEQ ID NO: 1501
  CDS (1)..(1032)

SEQ ID NO: 22038 - protein, 343 aa, Streptococcus mutans; identical to SEQ ID NO: 1502

SEQ ID NO: 22039 - DNA, 1035 bp, Streptococcus mutans; identical to SEQ ID NO: 1503
  CDS (1)..(1035)

SEQ ID NO: 22040 - protein, 344 aa, Streptococcus mutans; identical to SEQ ID NO: 1504

SEQ ID NO: 22041 - DNA, 1008 bp, Streptococcus agalactiae; identical to SEQ ID NO: 1505
  CDS (1)..(1008)

SEQ ID NO: 22042 - protein, 335 aa, Streptococcus agalactiae; identical to SEQ ID NO: 1506

SEQ ID NO: 22043 - DNA, 1065 bp, Shewanella oneidensis; identical to SEQ ID NO: 1507
  CDS (1)..(1065)

SEQ ID NO: 22044 - protein, 354 aa, Shewanella oneidensis; identical to SEQ ID NO: 1508

SEQ ID NO: 22045 - DNA, 1092 bp, Shewanella oneidensis; identical to SEQ ID NO: 1509
  CDS (1)..(1092)

SEQ ID NO: 22046 - protein, 363 aa, Shewanella oneidensis; identical to SEQ ID NO: 1510

SEQ ID NO: 22047 - DNA, 1059 bp, Shewanella oneidensis; identical to SEQ ID NO: 1511
  CDS (1)..(1059)

SEQ ID NO: 22048 - protein, 352 aa, Shewanella oneidensis; identical to SEQ ID NO: 1512

SEQ ID NO: 22049 - DNA, 1053 bp, Escherichia coli O6; identical to SEQ ID NO: 1513
  CDS (1)..(1053)

SEQ ID NO: 22050 - protein, 350 aa, Escherichia coli O6; identical to SEQ ID NO: 1514

SEQ ID NO: 22051 - DNA, 1170 bp, Corynebacterium efficiens; identical to SEQ ID NO: 1515
  CDS (1)..(1170)

SEQ ID NO: 22052 - protein, 389 aa, Corynebacterium efficiens; identical to SEQ ID NO: 1516

SEQ ID NO: 22053 - DNA, 1134 bp, Bifidobacterium longum; identical to SEQ ID NO: 1517
  CDS (1)..(1134)

SEQ ID NO: 22054 - protein, 377 aa, Bifidobacterium longum; identical to SEQ ID NO: 1518

SEQ ID NO: 22055 - DNA, 1233 bp, Bifidobacterium longum; identical to SEQ ID NO: 1519
  CDS (1)..(1233)

SEQ ID NO: 22056 - protein, 410 aa, Bifidobacterium longum; identical to SEQ ID NO: 1520

SEQ ID NO: 22057 - DNA, 1221 bp, Phytophthora infestans; identical to SEQ ID NO: 1521
  CDS (20)..(1153)

SEQ ID NO: 22058 - protein, 377 aa, Phytophthora infestans; identical to SEQ ID NO: 1522

SEQ ID NO: 22059 - DNA, 1062 bp, Chlorobium tepidum; identical to SEQ ID NO: 1523
  CDS (1)..(1062)

SEQ ID NO: 22060 - protein, 353 aa, Chlorobium tepidum; identical to SEQ ID NO: 1524

SEQ ID NO: 22061 - DNA, 1074 bp, Xanthomonas campestris; identical to SEQ ID NO: 1525
  CDS (1)..(1074)

SEQ ID NO: 22062 - protein, 357 aa, Xanthomonas campestris; identical to SEQ ID NO: 1526

SEQ ID NO: 22063 - DNA, 1074 bp, Xanthomonas axonopodis; identical to SEQ ID NO: 1527
  CDS (1)..(1074)

SEQ ID NO: 22064 - protein, 357 aa, Xanthomonas axonopodis; identical to SEQ ID NO: 1528

SEQ ID NO: 22065 - DNA, 1080 bp, Ralstonia solanacearum; identical to SEQ ID NO: 1529
  CDS (1)..(1080)

SEQ ID NO: 22066 - protein, 359 aa, Ralstonia solanacearum; identical to SEQ ID NO: 1530

SEQ ID NO: 22067 - DNA, 1179 bp, Ralstonia solanacearum; identical to SEQ ID NO: 1531
  CDS (1)..(1179)

SEQ ID NO: 22068 - protein, 392 aa, Ralstonia solanacearum; identical to SEQ ID NO: 1532

SEQ ID NO: 22069 - DNA, 1065 bp, Synechococcus sp; identical to SEQ ID NO: 1533
  CDS (1)..(1065)

SEQ ID NO: 22070 - protein, 354 aa, Synechococcus sp; identical to SEQ ID NO: 1534

SEQ ID NO: 22071 - DNA, 1035 bp, Escherichia coli; identical to SEQ ID NO: 1535
  CDS (1)..(1035)

SEQ ID NO: 22072 - protein, 344 aa, Escherichia coli; identical to SEQ ID NO: 1536

SEQ ID NO: 22073 - DNA, 1200 bp, Stigmatella aurantiaca; identical to SEQ ID NO: 1537
  CDS (62)..(1147)

SEQ ID NO: 22074 - protein, 361 aa, Stigmatella aurantiaca; identical to SEQ ID NO: 1538

SEQ ID NO: 22075 - DNA, 1092 bp, Rhizobium loti; identical to SEQ ID NO: 1539
  CDS (1)..(1092)

SEQ ID NO: 22076 - protein, 363 aa, Rhizobium loti; identical to SEQ ID NO: 1540

SEQ ID NO: 22077 - DNA, 1083 bp, Amycolatopsis mediterranei; identical to SEQ ID NO: 1541
  CDS (1)..(1083)

SEQ ID NO: 22078 - protein, 360 aa, Amycolatopsis mediterranei; identical to SEQ ID NO: 1542

SEQ ID NO: 22079 - DNA, 1053 bp, Pasteurella multocida; identical to SEQ ID NO: 1543
  CDS (1)..(1053)

SEQ ID NO: 22080 - protein, 350 aa, Pasteurella multocida; identical to SEQ ID NO: 1544

SEQ ID NO: 22081 - DNA, 1086 bp, Pasteurella multocida; identical to SEQ ID NO: 1545
  CDS (1)..(1086)

SEQ ID NO: 22082 - protein, 361 aa, Pasteurella multocida; identical to SEQ ID NO: 1546

SEQ ID NO: 22083 - DNA, 1089 bp, Emericella nidulans; identical to SEQ ID NO: 1549
  CDS (1)..(1089)

SEQ ID NO: 22084 - protein, 362 aa, Emericella nidulans; identical to SEQ ID NO: 1550

SEQ ID NO: 22085 - DNA, 1239 bp, Vibrio cholerae; identical to SEQ ID NO: 1551
  CDS (114)..(1175)

SEQ ID NO: 22086 - protein, 353 aa, Vibrio cholerae; identical to SEQ ID NO: 1552

SEQ ID NO: 22087 - DNA, 1113 bp, Candida albicans; identical to SEQ ID NO: 1797
  CDS (1)..(1113)

SEQ ID NO: 22088 - protein, 370 aa, Candida albicans; identical to SEQ ID NO: 1554

SEQ ID NO: 22089 - DNA, 1047 bp, Buchnera aphidicola; identical to SEQ ID NO: 1557
  CDS (1)..(1047)

SEQ ID NO: 22090 - protein, 348 aa, Buchnera aphidicola; identical to SEQ ID NO: 1558

SEQ ID NO: 22091 - DNA, 1047 bp, Erwinia herbicola; identical to SEQ ID NO: 1559
  CDS (1)..(1047)

SEQ ID NO: 22092 - protein, 348 aa, Erwinia herbicola; identical to SEQ ID NO: 1560

SEQ ID NO: 22093 - DNA, 23 bp, Artificial sequence
  Primer sequence
atgcaaaaagacgcgctgaataa

SEQ ID NO: 22094 - DNA, 21 bp, Artificial sequence
  Primer sequence
ttaagccacgcgagccgtcag

SEQ ID NO: 22095 - protein, 296 aa, Artificial sequence; identical to SEQ ID NO: 2896
  Consensus
  Variant (5)..(35): Xaa in position 5 to 35 is any amino acid
  Variant (37)..(37): Xaa in position 37 is any amino acid
  Variant (39)..(40): Xaa in position 39 to 40 is any amino acid
  Variant (42)..(42): Xaa in position 42 is any amino acid
  Variant (45)..(47): Xaa in position 45 to 47 is any amino acid
  Variant (49)..(50): Xaa in position 49 to 50 is any amino acid
  Variant (52)..(55): Xaa in position 52 to 55 is any amino acid
  Variant (57)..(66): Xaa in position 57 to 66 is any amino acid
  Variant (68)..(71): Xaa in position 68 to 71 is any amino acid
  Variant (73)..(108): Xaa in position 73 to 108 is any amino acid
  Variant (112)..(117): Xaa in position 112 to 117 is any amino acid
  Variant (120)..(122): Xaa in position 120 to 122 is any amino acid
  Variant (124)..(131): Xaa in position 124 to 131 is any amino acid
  Variant (134)..(136): Xaa in position 134 to 136 is any amino acid
  Variant (138)..(170): Xaa in position 138 to 170 is any amino acid
  Variant (173)..(179): Xaa in position 173 to 179 is any amino acid
  Variant (182)..(191): Xaa in position 182 to 191 is any amino acid
  Variant (193)..(222): Xaa in position 193 to 222 is any amino acid
  Variant (224)..(225): Xaa in position 224 to 225 is any amino acid
  Variant (227)..(227): Xaa in position 227 is any amino acid
  Variant (229)..(260): Xaa in position 229 to 260 is any amino acid
  Variant (262)..(262): Xaa in position 262 is any amino acid
  Variant (264)..(268): Xaa in position 264 to 268 is any amino acid
  Variant (270)..(288): Xaa in position 270 to 288 is any amino acid
  Variant (290)..(290): Xaa in position 290 is any amino acid
  Variant (292)..(292): Xaa in position 292 is any amino acid
  Variant (295)..(295): Xaa in position 295 is any amino acid

SEQ ID NO: 22096 - protein, 352 aa, Artificial sequence; identical to SEQ ID NO: 2895
  Consensus
  Variant (2)..(3): Xaa in position 2 to 3 is any amino acid
  Variant (5)..(11): Xaa in position 5 to 11 is any amino acid
  Variant (13)..(24): Xaa in position 13 to 24 is any amino acid
  Variant (26)..(30): Xaa in position 26 to 30 is any amino acid
  Variant (32)..(33): Xaa in position 32 to 33 is any amino acid
  Variant (35)..(35): Xaa in position 35 is any amino acid
  Variant (37)..(40): Xaa in position 37 to 40 is any amino acid
  Variant (43)..(43): Xaa in position 43 is any amino acid
  Variant (45)..(46): Xaa in position 45 to 46 is any amino acid
  Variant (51)..(51): Xaa in position 51 is any amino acid
  Variant (54)..(55): Xaa in position 54 to 55 is any amino acid
  Variant (58)..(59): Xaa in position 58 to 59 is any amino acid
  Variant (62)..(63): Xaa in position 62 to 63 is any amino acid
  Variant (65)..(76): Xaa in position 65 to 76 is any amino acid
  Variant (78)..(80): Xaa in position 78 to 80 is any amino acid
  Variant (83)..(83): Xaa in position 83 is any amino acid
  Variant (85)..(85): Xaa in position 85 is any amino acid
  Variant (91)..(93): Xaa in position 91 to 93 is any amino acid
  Variant (100)..(100): Xaa in position 100 is any amino acid
  Variant (103)..(112): Xaa in position 103 to 112 is any amino acid
  Variant (115)..(117): Xaa in position 115 to 117 is any amino acid
  Variant (119)..(119): Xaa in position 119 is any amino acid
  Variant (121)..(130): Xaa in position 121 to 130 is any amino acid
  Variant (132)..(132): Xaa in position 132 is any amino acid
  Variant (134)..(134): Xaa in position 134 is any amino acid
  Variant (136)..(136): Xaa in position 136 is any amino acid
  Variant (139)..(142): Xaa in position 139 to 142 is any amino acid
  Variant (144)..(146): Xaa in position 144 to 146 is any amino acid
  Variant (148)..(150): Xaa in position 148 to 150 is any amino acid
  Variant (152)..(152): Xaa in position 152 is any amino acid
  Variant (163)..(163): Xaa in position 163 is any amino acid
  Variant (167)..(167): Xaa in position 167 is any amino acid
  Variant (170)..(170): Xaa in position 170 is any amino acid
  Variant (173)..(173): Xaa in position 173 is any amino acid
  Variant (175)..(175): Xaa in position 175 is any amino acid
  Variant (182)..(182): Xaa in position 182 is any amino acid
  Variant (184)..(187): Xaa in position 184 to 187 is any amino acid
  Variant (189)..(190): Xaa in position 189 to 190 is any amino acid
  Variant (192)..(194): Xaa in position 192 to 194 is any amino acid
  Variant (196)..(198): Xaa in position 196 to 198 is any amino acid
  Variant (200)..(200): Xaa in position 200 is any amino acid
  Variant (202)..(207): Xaa in position 202 to 207 is any amino acid
  Variant (209)..(214): Xaa in position 209 to 214 is any amino acid
  Variant (216)..(216): Xaa in position 216 is any amino acid
  Variant (219)..(221): Xaa in position 219 to 221 is any amino acid
  Variant (223)..(224): Xaa in position 223 to 224 is any amino acid
  Variant (229)..(237): Xaa in position 229 to 237 is any amino acid
  Variant (240)..(268): Xaa in position 240 to 268 is any amino acid
  Variant (270)..(270): Xaa in position 270 is any amino acid
  Variant (273)..(273): Xaa in position 273 is any amino acid
  Variant (276)..(276): Xaa in position 276 is any amino acid
  Variant (278)..(281): Xaa in position 278 to 281 is any amino acid
  Variant (283)..(284): Xaa in position 283 to 284 is any amino acid
  Variant (286)..(291): Xaa in position 286 to 291 is any amino acid
  Variant (293)..(295): Xaa in position 293 to 295 is any amino acid
  Variant (297)..(304): Xaa in position 297 to 304 is any amino acid
  Variant (306)..(306): Xaa in position 306 is any amino acid
  Variant (308)..(308): Xaa in position 308 is any amino acid
  Variant (311)..(314): Xaa in position 311 to 314 is any amino acid
  Variant (316)..(316): Xaa in position 316 is any amino acid
  Variant (318)..(333): Xaa in position 318 to 333 is any amino acid
  Variant (336)..(336): Xaa in position 336 is any amino acid
  Variant (338)..(338): Xaa in position 338 is any amino acid
  Variant (341)..(341): Xaa in position 341 is any amino acid
  Variant (343)..(344): Xaa in position 343 to 344 is any amino acid
  Variant (346)..(347): Xaa in position 346 to 347 is any amino acid
  Variant (349)..(351): Xaa in position 349 to 351 is any amino acid

SEQ ID NO: 22097 - protein, 26 aa, Artificial sequence
  Consensus
  Variant (1)..(1): Xaa in position 1 is Asp or Asn
  Variant (2)..(2): Xaa in position 2 is any amino acid
  Variant (4)..(4): Xaa in position 4 is any amino acid
  Variant (5)..(5): Xaa in position 5 is Leu, Val, Ile, Phe, Ala or Met
  Variant (6)..(6): Xaa in position 6 is Val, Ile, Leu or Ala
  Variant (7)..(7): Xaa in position 7 is Val or Ile
  Variant (8)..(8): Xaa in position 8 is Val, Ile, Cys or Thr
  Variant (13)..(13): Xaa in position 13 is Ile, Val, Ser or Leu
  Variant (14)..(14): Xaa in position 14 is His or Asp
  Variant (15)..(15): Xaa in position 15 is Asp or Asn
  Variant (16)..(18): Xaa in position 16 to 18 is any amino acid
  Variant (19)..(19): Xaa in position 19 is Ala, Val or Gly
  Variant (20)..(20): Xaa in position 20 is any amino acid
  Variant (21)..(21): Xaa in position 21 is Glu, Asp, Ala or Gln
  Variant (23)..(23): Xaa in position 23 is Ala, Gly, Ser or Cys
  Variant (24)..(25): Xaa in position 24 to 25 is any amino acid
  Variant (26)..(26): Xaa in position 26 is Leu, Ile or Phe
XXRXXXXXGPCSXXXXXXXXXYXXXX

SEQ ID NO: 22098 - protein, 40 aa, Artificial sequence; identical to SEQ ID NO: 2890
  Consensus
  Variant (1)..(1): Xaa in position 1 is Ile, Val, Leu or Met
  Variant (2)..(2): Xaa in position 2 is Val, Ile or Leu
  Variant (5)..(5): Xaa in position 5 is Val, Ala or Thr
  Variant (7)..(7): Xaa in position 7 is Phe, Leu, Thr or Val
  Variant (8)..(8): Xaa in position 8 is Glu, Ala or Gln
  Variant (13)..(14): Xaa in position 13 to 14 is any amino acid
  Variant (15)..(15): Xaa in position 15 is any or no amino acid
  Variant (17)..(17): Xaa in position 17 is Trp or Tyr
  Variant (18)..(18): Xaa in position 18 is Lys or Arg
  Variant (20)..(20): Xaa in position 20 is Leu, Phe, Tyr or Met
  Variant (21)..(21): Xaa in position 21 is Ile, Val, Ala or Leu
  Variant (22)..(22): Xaa in position 22 is any amino acid
  Variant (23)..(23): Xaa in position 23 is Asp, Glu or Gln
  Variant (25)..(25): Xaa in position 25 is any amino acid
  Variant (26)..(26): Xaa in position 26 is Leu, Met, Ile, Val, Ala or Thr
  Variant (27)..(27): Xaa in position 27 is Asp, Asn or Ser
  Variant (28)..(31): Xaa in position 28 to 31 is any amino acid
  Variant (32)..(32): Xaa in position 32 is Ile, Val, Leu or Met
  Variant (33)..(34): Xaa in position 33 to 34 is any amino acid
  Variant (36)..(36): Xaa in position 36 is Leu, Ile, Met or Val
  Variant (37)..(38): Xaa in position 37 to 38 is any amino acid
  Variant (39)..(39): Xaa in position 39 is Ala, Ser, Gly, Val or Thr
